United States Patent Application Publication US 2012/0159672 A1 - sequence listing, part 12

SEQ ID NO: 26415 - DNA, 848 bp, Zea mays subsp. mays
  misc_feature (1)..(848): Ceres Seq. ID no. 12344457
agactgctcgaccggaccgacgagcgacgaagcgcgcagaaagagaagaacctcggagctgagatggcacaagccatggcgtcgatgaccggcctctcgcagggcgtcctgcccagcaggcgcgccgacagcagaaccaggacggccgtcgtcatcgtcagggcgtccgcggagggcgacgccgttgcgcaggcgggccgccgcgccgtgatcgggctggtggccactggcatcgtcggcggcgccttgtcgcaggcggcgcgcgccgagaccgtcaagaccatcaagattggagccccgccgccgccctccggtggactccccgggactctcaactctgaccaggcgagggacttcgacctccccttgaaggagcggttctacctgcagccgctgccgccggcggaggcggcggcgagggtgaagacgtcggcgcaggacatcatcaacctcaagccgctcatcgacaagaaggcgtggccgtacgtccagaacgacctccgcctccgggcctcctacctgcgctacgacctcaagaccgtcatcgcttccaagcccaaggaggagaagaagagcctcaaggagctcaccggcaagctcttcagcaccatcgacgatcttgaccatgccgcgaagatcaagagcaccccagaggccgagaaatacttcgcagcaaccaaagatgctcttggcgatgttctcgccaagctaggctagacgcaagggctaataatggccatgtaatttcggacttgtgtttgttcatatggacccggcaaggcaatgtaccattttctgttgatattgtatcaggaagcacttaactacaatgctatcttgagtccttg

SEQ ID NO: 26416 - protein, 238 aa, Zea mays subsp. mays
  peptide (1)..(238): Ceres Seq. ID no. 12344458
  misc_feature (36)..(238): Pfam Name: PsbQ Pfam Description: Oxygen evolving enhancer protein 3
  misc_feature (22)..(238): NCBI GI NO: 11134057 NR Description: Oxygen-evolving enhancer protein 3-1
  misc_feature (22)..(238): NCBI GI NO: 11134066 NR Description: Oxygen-evolving enhancer protein 3-2
  misc_feature (26)..(238): NCBI GI NO: 34393258 NR Description: putative Oxygen-evolving enhancer protein 3-1
  misc_feature (22)..(238): NCBI GI NO: 15234637 NR Description: oxygen-evolving complex protein 16
  misc_feature (26)..(238): NCBI GI NO: 15233587 NR Description: oxygen-evolving complex protein 16
  misc_feature (22)..(238): NCBI GI NO: 131397 NR Description: Oxygen-evolving enhancer protein 3
  misc_feature (46)..(237): NCBI GI NO: 31096349 NR Description: oxygen-evolving enhancer protein 3 precursor
  misc_feature (26)..(238): NCBI GI NO: 4583542 NR Description: 16 kDa polypeptide of oxygen-evolving complex
  misc_feature (22)..(238): NCBI GI NO: 11133850 NR Description: Oxygen-evolving enhancer protein 3
  misc_feature (21)..(201): NCBI GI NO: 32400800 NR Description: oxygen-evolving complex precursor
RLLDRTDERRSAQKEKNLGAEMAQAMASMTGLSQGVLPSRRADSRTRTAVVIVRASAEGDAVAQAGRRAVIGLVATGIVGGALSQAARAETVKTIKIGAPPPPSGGLPGTLNSDQARDFDLPLKERFYLQPLPPAEAAARVKTSAQDIINLKPLIDKKAWPYVQNDLRLRASYLRYDLKTVIASKPKEEKKSLKELTGKLFSTIDDLDHAAKIKSTPEAEKYFAATKDALGDVLAKLG

SEQ ID NO: 26417 - protein, 217 aa, Zea mays subsp. mays
  peptide (1)..(217): Ceres Seq. ID no. 12344459
  misc_feature (15)..(217): Pfam Name: PsbQ Pfam Description: Oxygen evolving enhancer protein 3
  misc_feature (1)..(217): NCBI GI NO: 11134057 NR Description: Oxygen-evolving enhancer protein 3-1
  misc_feature (1)..(217): NCBI GI NO: 11134066 NR Description: Oxygen-evolving enhancer protein 3-2
  misc_feature (5)..(217): NCBI GI NO: 34393258 NR Description: putative Oxygen-evolving enhancer protein 3-1
  misc_feature (1)..(217): NCBI GI NO: 15234637 NR Description: oxygen-evolving complex protein 16
  misc_feature (5)..(217): NCBI GI NO: 15233587 NR Description: oxygen-evolving complex protein 16
  misc_feature (1)..(217): NCBI GI NO: 131397 NR Description: Oxygen-evolving enhancer protein 3
  misc_feature (25)..(216): NCBI GI NO: 31096349 NR Description: oxygen-evolving enhancer protein 3 precursor
  misc_feature (5)..(217): NCBI GI NO: 4583542 NR Description: 16 kDa polypeptide of oxygen-evolving complex
  misc_feature (1)..(217): NCBI GI NO: 11133850 NR Description: Oxygen-evolving enhancer protein 3
  misc_feature (1)..(180): NCBI GI NO: 32400800 NR Description: oxygen-evolving complex precursor
MAQAMASMTGLSQGVLPSRRADSRTRTAVVIVRASAEGDAVAQAGRRAVIGLVATGIVGGALSQAARAETVKTIKIGAPPPPSGGLPGTLNSDQARDFDLPLKERFYLQPLPPAEAAARVKTSAQDIINLKPLIDKKAWPYVQNDLRLRASYLRYDLKTVIASKPKEEKKSLKELTGKLFSTIDDLDHAAKIKSTPEAEKYFAATKDALGDVLAKLG

SEQ ID NO: 26418 - protein, 213 aa, Zea mays subsp. mays
  peptide (1)..(213): Ceres Seq. ID no. 12344460
  misc_feature (11)..(213): Pfam Name: PsbQ Pfam Description: Oxygen evolving enhancer protein 3
  misc_feature (1)..(213): NCBI GI NO: 11134057 NR Description: Oxygen-evolving enhancer protein 3-1
  misc_feature (1)..(213): NCBI GI NO: 11134066 NR Description: Oxygen-evolving enhancer protein 3-2
  misc_feature (1)..(213): NCBI GI NO: 34393258 NR Description: putative Oxygen-evolving enhancer protein 3-1
  misc_feature (1)..(213): NCBI GI NO: 15234637 NR Description: oxygen-evolving complex protein 16
  misc_feature (1)..(213): NCBI GI NO: 15233587 NR Description: oxygen-evolving complex protein 16
  misc_feature (1)..(213): NCBI GI NO: 131397 NR Description: Oxygen-evolving enhancer protein 3
  misc_feature (21)..(212): NCBI GI NO: 31096349 NR Description: oxygen-evolving enhancer protein 3 precursor
  misc_feature (1)..(213): NCBI GI NO: 4583542 NR Description: 16 kDa polypeptide of oxygen-evolving complex
  misc_feature (1)..(213): NCBI GI NO: 11133850 NR Description: Oxygen-evolving enhancer protein 3
  misc_feature (1)..(176): NCBI GI NO: 32400800 NR Description: oxygen-evolving complex precursor
MASMTGLSQGVLPSRRADSRTRTAVVIVRASAEGDAVAQAGRRAVIGLVATGIVGGALSQAARAETVKTIKIGAPPPPSGGLPGTLNSDQARDFDLPLKERFYLQPLPPAEAAARVKTSAQDIINLKPLIDKKAWPYVQNDLRLRASYLRYDLKTVIASKPKEEKKSLKELTGKLFSTIDDLDHAAKIKSTPEAEKYFAATKDALGDVLAKLG

SEQ ID NO: 26419 - DNA, 1767 bp, Zea mays subsp. mays
  misc_feature (1)..(1767): Ceres Seq. ID no. 13498593
acaagcacagcagcagcagcagcagcagcaggcaagaagaatccaaagcggaagggtctctccccccatctctgttccaccaggtgcggcgggcggcgatgggggcgcggaggcggctgcaggcagacgcgccgccggggcatcgccacaggcagggcgcgccggcgccggactcggagcgccgggtacctcaacgggtggctgtcgcagccgacgcccgtcttcggcctccgcctctgggtgctcatcggcatcgccgtcggcgccgccatcgtgctcgtgctcctcctcatcttcgtctgcctctcccgccgccgccgccgccgccgcctcgccgccaacccctactaccccgccgacaccaagctgctcaagaagcacctgcagcagcaggccacgcccacgcccacgcccaccaaggacatccaggagatcgtccgccgccagcaggagcccgcggtgcagctcgccaaggccgtgccgcagccgcagccgcagccgcagactcctccgccgccgccgcctccgcagcacaggccaccggcgcggaagacgcccggcagcggcgtgtcggccacgactagcggcgggagcgagcgggacggcgccacgcctaggagcaccggcagcggcgcggggctgccggaggtctcgcacctcgggtggggccactggttcacgctccgcgagctggaggaggccaccggcgggctcgccgaggagaatgtgatcggcgagggcgggtacgggatcgtgtacaagggcaccttgcacgactccactttggtcgccgtcaagaacctgctcaataatagggggcaggccgagaaggagttcaaggtggaggtggaagcaatcggtcgtgttcggcacaaaaatctcgtcaggttgctcggctactgcgtagagggtgcttacaggatgctcgtgtatgagtatgtggacaatggtaatcttgaccagtggcttcatggtgatgttggcgaagtgagccccactgacatgggacatcaggatgaacattatgcttgccacagctaaagggctggcctacctccacgaggggctggaaccgaaggtggtccaccgcgacatcaaggctagcaacatccttcttgaccagcagtggaacgccaaagtatcggatttcgggctcgcaaagctgttgtgctcggagagaagctacgttacgacccgtgtcatgggaaccttcggttacgtggcgcctgagtacgccagcaccggcatgctgaacgagaggagcgatgtgtatagcttcggcgtgctgataatggagatcatcaccggcagatgtcctgtggattacacaagggcggctggagaggtgcagctggtggagtggctcaagaacatggtggccgagaggaaagcggaggaggtagtggacagtaagatggccgagaggcctcctcccaagacgctgaagcgggcgctcctggtggcgctccgctgcgtggaccctgacgcgaacaagcggcctaagatggggcatgtgatccacatgctcgaaatggacgatctccagttccgagacgataagaggcccggggccgggagagatggtcgtcgtccccagggtccggataggtacagctccaagctaggtggaggaagggagcctcagcaagcgcgagcaccagcgtcggtacagatgagatgattgtcattagagagtagcgatattaaccatgttatttttttcccgtcagtaaatacattctttcccaactcgttccatcgattctc

SEQ ID NO: 26420 - protein, 346 aa, Zea mays subsp. mays
  peptide (1)..(346): Ceres Seq. ID no. 13498594
  misc_feature (238)..(332): Pfam Name: Pfam Description:  Protein kinase domain
  misc_feature (132)..(332): NCBI GI NO: 14194119 NR Description: At1g01540/F22L4_6 [Arabidopsis thaliana]
  misc_feature (132)..(332): NCBI GI NO: 15223428 NR Description: protein kinase family [Arabidopsis thaliana]
  misc_feature (61)..(151): NCBI GI NO: 14194119 NR Description: At1g01540/F22L4_6 [Arabidopsis thaliana]
  misc_feature (61)..(151): NCBI GI NO: 15223428 NR Description: protein kinase family [Arabidopsis thaliana]
  misc_feature (132)..(332): NCBI GI NO: 15234142 NR Description: protein kinase family [Arabidopsis thaliana]
  misc_feature (64)..(147): NCBI GI NO: 15234142 NR Description: protein kinase family [Arabidopsis thaliana]
  misc_feature (60)..(332): NCBI GI NO: 37536398 NR Description: putative receptor-like protein kinase
  misc_feature (83)..(332): NCBI GI NO: 34897534 NR Description: OSJNBa0042L16.4
  misc_feature (85)..(332): NCBI GI NO: 15235432 NR Description: protein kinase family [Arabidopsis thaliana]
  misc_feature (132)..(332): NCBI GI NO: 30678150 NR Description: protein kinase family [Arabidopsis thaliana]
TSTAAAAAAAGKKNPKRKGLSPHLCSTRCGGRRWGRGGGCRQTRRRGIATGRARRRRTRSAGYLNGWLSQPTPVFGLRLWVLIGIAVGAAIVLVLLLIFVCLSRRRRRRRLAANPYYPADTKLLKKHLQQQATPTPTPTKDIQEIVRRQQEPAVQLAKAVPQPQPQPQTPPPPPPPQHRPPARKTPGSGVSATTSGGSERDGATPRSTGSGAGLPEVSHLGWGHWFTLRELEEATGGLAEENVIGEGGYGIVYKGTLHDSTLVAVKNLLNNRGQAEKEFKVEVEAIGRVRHKNLVRLLGYCVEGAYRMLVYEYVDNGNLDQWLHGDVGEVSPTDMGHQDEHYACHS

SEQ ID NO: 26421 - protein, 242 aa, Zea mays subsp. mays
  peptide (1)..(242): Ceres Seq. ID no. 13498595
  misc_feature (75)..(159): NCBI GI NO: 15223161 NR Description: protein kinase -related [Arabidopsis thaliana]
  misc_feature (74)..(159): NCBI GI NO: 13447449 NR Description: receptor protein kinase PERK1 [Brassica napus]
  misc_feature (47)..(139): NCBI GI NO: 15223161 NR Description: protein kinase -related [Arabidopsis thaliana]
  misc_feature (57)..(159): NCBI GI NO: 13447449 NR Description: receptor protein kinase PERK1 [Brassica napus]
  misc_feature (44)..(152): NCBI GI NO: 15223161 NR Description: protein kinase -related [Arabidopsis thaliana]
  misc_feature (85)..(159): NCBI GI NO: 15230108 NR Description: protein kinase -related [Arabidopsis thaliana]
  misc_feature (63)..(152): NCBI GI NO: 15218591 NR Description: protein kinase family [Arabidopsis thaliana]
  misc_feature (73)..(157): NCBI GI NO: 15221470 NR Description: protein kinase family [Arabidopsis thaliana]
  misc_feature (88)..(159): NCBI GI NO: 15221470 NR Description: protein kinase family [Arabidopsis thaliana]
  misc_feature (46)..(167): NCBI GI NO: 30690042 NR Description: serine threonine protein kinase -related
QAQQQQQQQQARRIQSGRVSPPISVPPGAAGGDGGAEAAAGRRAAGASPQAGRAGAGLGAPGTSTGGCRSRRPSSASASGCSSASPSAPPSCSCSSSSSSASPAAAAAAASPPTPTTPPTPSCSRSTCSSRPRPRPRPPRTSRRSSAASRSPRCSSPRPCRSRSRSRRLLRRRRLRSTGHRRGRRPAAACRPRLAAGASGTAPRLGAPAAARGCRRSRTSGGATGSRSASWRRPPAGSPRRM

SEQ ID NO: 26422 - protein, 221 aa, Zea mays subsp. mays
  peptide (1)..(221): Ceres Seq. ID no. 13498596
  misc_feature (1)..(171): Pfam Name: Pfam Description:  Protein kinase domain
  misc_feature (1)..(194): NCBI GI NO: 14194119 NR Description: At1g01540/F22L4_6 [Arabidopsis thaliana]
  misc_feature (1)..(194): NCBI GI NO: 15223428 NR Description: protein kinase family [Arabidopsis thaliana]
  misc_feature (1)..(180): NCBI GI NO: 15234142 NR Description: protein kinase family [Arabidopsis thaliana]
  misc_feature (1)..(203): NCBI GI NO: 37536398 NR Description: putative receptor-like protein kinase
  misc_feature (1)..(193): NCBI GI NO: 34897534 NR Description: OSJNBa0042L16.4
  misc_feature (1)..(195): NCBI GI NO: 15235432 NR Description: protein kinase family [Arabidopsis thaliana]
  misc_feature (1)..(111): NCBI GI NO: 30678150 NR Description: protein kinase family [Arabidopsis thaliana]
  misc_feature (1)..(221): NCBI GI NO: 37535714 NR Description: putative kinase
  misc_feature (1)..(183): NCBI GI NO: 15231637 NR Description: protein kinase family [Arabidopsis thaliana]
  misc_feature (1)..(188): NCBI GI NO: 30690058 NR Description: protein kinase family [Arabidopsis thaliana]
MNIMLATAKGLAYLHEGLEPKVVHRDIKASNILLDQQWNAKVSDFGLAKLLCSERSYVTTRVMGTFGYVAPEYASTGMLNERSDVYSFGVLIMEIITGRCPVDYTRAAGEVQLVEWLKNMVAERKAEEVVDSKMAERPPPKTLKRALLVALRCVDPDANKRPKMGHVIHMLEMDDLQFRDDKRPGAGRDGRRPQGPDRYSSKLGGGREPQQARAPASVQMR

SEQ ID NO: 26423 - DNA, 1493 bp, Zea mays subsp. mays
  misc_feature (1)..(1493): Ceres Seq. ID no. 12352289
atagtcactcccccaactctgctgcttcccgtggccgtggttcaaaattcgaatccagaaagacttccccaagcattttccgtttctttaaaccgtcatcgtcctccctcgtgctagcctcgctcgttgcgcgttcaaatttcgaaccacctccgccttcgacgccccaaaccctagcccgacccctcctcctccacctgcgccaccgcccaccatgagctccgccgccgcgccagctgccgtcggcagcggcaaggagcttgccaacccgcccgccgacggaatcaccaacctccgcttctccaaccacagcaacaacctcctcgtctcctcatgggacaagacggtgcggctctacgacgccgacgccaacgtgctcaagggggagttcatgcaccccggggccgtcctcgactgctgcttccacgacgactcctcgggctttagcgccggtgccgaccacaccgtgcggaggttggtatttagctcgtccaaggaagatgttttggggcggcatgatggtccggttcgttgcgtggaatactcttatgctgcaggtcaagtcatcaccggcagctgggataaaactgtaaaatgctgggatccaagaggagttagtggaccagagcgcacccttgttgggacatatgctcaacctgaacgtgtatattctctttcgttagtaggaaataggttggttgttgcaacagctggaagacatgtaaatatttatgatctgcgcaatatgtctcaacctgagcaaaaaagagactcttctttgaaatatcaaacacgatgtgttcgatgttttcccaacggaacaggatatgctcttagttctgttgaagggcgagtttctatggaattctttgatctatctgagtctgctcaatctaaaaagtatgctttcaagtgtcatcggaagtctgaggccggcagggacaccgtttatcctgtcaatgcaattgctttccatcccatatatggaacatttgccaccggagggtgtgatggatttgtgaatgtgtgggatggcattaacaagaaaagactatatcagtactcgaagtacgcatcaagcatcgctgctctatcattcagtaaggatgggcatctgcttgctgtggcatccagctacacttatgaagagggagaaaaaacgcatgaacctgacgctatatttatccggacagtgaatgaagtcgaggtgaagccgaagcccaaggcattggcagccccccagtagtgctgtgacctgttctggaggctagatgacccgtacttctctgcgttgatgtcaattacattagttgacggagtgcttgtttgtgttgaaagagctgaaacgcctgtgtttcttaatctggaaccctcttctcccgttttacttgtccgtggaaacatttcatgttccagctggttgtatattccgaaacagaccatgttttagttcactcggttcttcgttgacttaagttatttatcaaatattt

SEQ ID NO: 26424 - protein, 343 aa, Zea mays subsp. mays
  peptide (1)..(343): Ceres Seq. ID no. 12352290
  misc_feature (12)..(342): NCBI GI NO: 18402300 NR Description: mitotic checkpoint protein, putative
  misc_feature (13)..(342): NCBI GI NO: 15222841 NR Description: mitotic checkpoint protein, putative
  misc_feature (1)..(337): NCBI GI NO: 28564814 NR Description: putative mitotic checkpoint protein
  misc_feature (13)..(255): NCBI GI NO: 12323596 NR Description: mitotic checkpoint protein, 3' partial
  misc_feature (11)..(335): NCBI GI NO: 4757880 NR Description: BUB3 budding uninhibited by benzimidazoles 3 homolog
  misc_feature (11)..(335): NCBI GI NO: 3986296 NR Description: mitotic checkpoint [Xenopus laevis]
  misc_feature (11)..(335): NCBI GI NO: 13122448 NR Description: WD repeat protein Bub3 [Xenopus laevis]
  misc_feature (15)..(335): NCBI GI NO: 37362190 NR Description: BUB3 budding uninhibited by benzimidazoles 3-like
  misc_feature (19)..(335): NCBI GI NO: 39591225 NR Description: Hypothetical protein CBG20696
  misc_feature (15)..(262): NCBI GI NO: 21428470 NR Description: LD23540p [Drosophila melanogaster]
MSSAAAPAAVGSGKELANPPADGITNLRFSNHSNNLLVSSWDKTVRLYDADANVLKGEFMHPGAVLDCCFHDDSSGFSAGADHTVRRLVFSSSKEDVLGRHDGPVRCVEYSYAAGQVITGSWDKTVKCWDPRGVSGPERTLVGTYAQPERVYSLSLVGNRLVVATAGRHVNIYDLRNMSQPEQKRDSSLKYQTRCVRCFPNGTGYALSSVEGRVSMEFFDLSESAQSKKYAFKCHRKSEAGRDTVYPVNAIAFHPIYGTFATGGCDGFVNVWDGINKKRLYQYSKYASSIAALSFSKDGHLLAVASSYTYEEGEKTHEPDAIFIRTVNEVEVKPKPKALAAPQ

SEQ ID NO: 26425 - protein, 284 aa, Zea mays subsp. mays
  peptide (1)..(284): Ceres Seq. ID no. 12352291
  misc_feature (1)..(283): NCBI GI NO: 18402300 NR Description: mitotic checkpoint protein, putative
  misc_feature (1)..(283): NCBI GI NO: 15222841 NR Description: mitotic checkpoint protein, putative
  misc_feature (1)..(278): NCBI GI NO: 28564814 NR Description: putative mitotic checkpoint protein
  misc_feature (1)..(196): NCBI GI NO: 12323596 NR Description: mitotic checkpoint protein, 3' partial
  misc_feature (1)..(276): NCBI GI NO: 4757880 NR Description: BUB3 budding uninhibited by benzimidazoles 3 homolog
  misc_feature (1)..(276): NCBI GI NO: 3986296 NR Description: mitotic checkpoint [Xenopus laevis]
  misc_feature (1)..(276): NCBI GI NO: 13122448 NR Description: WD repeat protein Bub3 [Xenopus laevis]
  misc_feature (1)..(276): NCBI GI NO: 37362190 NR Description: BUB3 budding uninhibited by benzimidazoles 3-like
  misc_feature (1)..(276): NCBI GI NO: 39591225 NR Description: Hypothetical protein CBG20696
  misc_feature (1)..(203): NCBI GI NO: 21428470 NR Description: LD23540p [Drosophila melanogaster]
MHPGAVLDCCFHDDSSGFSAGADHTVRRLVFSSSKEDVLGRHDGPVRCVEYSYAAGQVITGSWDKTVKCWDPRGVSGPERTLVGTYAQPERVYSLSLVGNRLVVATAGRHVNIYDLRNMSQPEQKRDSSLKYQTRCVRCFPNGTGYALSSVEGRVSMEFFDLSESAQSKKYAFKCHRKSEAGRDTVYPVNAIAFHPIYGTFATGGCDGFVNVWDGINKKRLYQYSKYASSIAALSFSKDGHLLAVASSYTYEEGEKTHEPDAIFIRTVNEVEVKPKPKALAAPQ

SEQ ID NO: 26426 - DNA, 1522 bp, Zea mays subsp. mays
  misc_feature (1)..(1522): Ceres Seq. ID no. 12409851
attattagagagagctacaacaagcatgaagctaagactggtagcgctagtgctggcggtagcgtccggtgtacgcttgctcgtcggcggcatcagcgttcgcgggggacgacgtcgtccgtgtcgcgctaaagcatgtcgacgctgggaagcagctgtccaggcccgagctgatccggcgcgccatgcggaggagcaaggcgagggcggccgcgctctccgcggtgaggaaccgcgcccgcttctctggcaagaacgagcagcaaacgcccgccggcgtgctgccggtgcgcccgtcgggggacctcgagtacgtcatcgacctcgccatcggcacgccgccgcagcccgtctcggcgctgctcgacaccggcagcgacctcatctggacgcagtgcgcgccgtgcgccagctgcctctcgcagccggacccgctgttcgcgccggggcagtcggcgtcgtacgagcccatgcggtgcgccgggacgctctgctctgacatcctgcaccacagctgcgagaggcccgacacgtgcacctaccgctacaactacggcgacggcacgatgaccgtgggcgtgtacgccacggagcgcttcaccttcgcgtcgtcgggcggcggcgggctcacgactaccgtcccgctcggcttcgggtgcggctccgtgaacgtcggcagcctcaacaacggctccggcatcgtgggcttcggccggaacccgctctcgctcgtgtcccagctctccatccgccgcttctcctactgcctcacgtcctacgccagccgcaggcagagcaccctcctgtttggctccctgtccgacggagtctacggtgacgccacgggccgcgtgcagaccacaccgctcctccagagcccccagaacccgaccttctactacgtacacttcacgggcctgaccgtcggcgccaggcggctgcggataccggagtcagcgttcgcgctccggcccgacggctcgggcggcgtgatcgtcgactccggcacggcgctcacgctcctcccagccgcggtgctcgcgggaggtggtgcgggcgttccgccagcagctgaggctgccgttcgcaaacggcggcaaccccgaggacggcgtgtgcttcctggtgcccgcggcctggcggcgctcgtcgtcgacgtcacagatgccggtcccgaggatggtgctccacttccagggcgcggacctcgacctgccgcgccgaaactacgtcctggacgaccacaggaggggccgcctgtgcctcctcctggcagactccggcgacgatggctccacgattggcaacctggtgcagcaggacatgcgcgtgctctacgatttggaggcagagaccttgtcgatcgctccggcacgatgctgacacgcgcgcaactagtagaaaggccgccgactactcgactactctcactgtatgcaagttagtgttaaccatgcaaatgcatgccaaccataccgggtcgcactttgcacgcaggcaaacaaattttttttgtcggtcg

SEQ ID NO: 26427 - protein, 419 aa, Zea mays subsp. mays
  peptide (1)..(419): Ceres Seq. ID no. 12409852
  misc_feature (45)..(280): Pfam Name: Pfam Description:  Eukaryotic aspartyl protease
  misc_feature (1)..(280): NCBI GI NO: 38344829 NR Description: OSJNBa0064H22.10
  misc_feature (1)..(280): NCBI GI NO: 30678047 NR Description: chloroplast nucleoid DNA binding protein -related
  misc_feature (1)..(280): NCBI GI NO: 34898756 NR Description: OJ1131_E05.2
  misc_feature (45)..(280): NCBI GI NO: 20197342 NR Description: putative chloroplast nucleoid DNA binding protein
  misc_feature (1)..(283): NCBI GI NO: 34898762 NR Description: OJ1131_E05.5
  misc_feature (1)..(284): NCBI GI NO: 15223368 NR Description: chloroplast nucleoid DNA binding protein, putative
  misc_feature (1)..(284): NCBI GI NO: 21594980 NR Description: chloroplast nucleoid DNA binding protein, putative
  misc_feature (1)..(280): NCBI GI NO: 15229656 NR Description: putative chloroplast nucleoid DNA-binding protein
  misc_feature (1)..(280): NCBI GI NO: 19424106 NR Description: putative chloroplast nucleoid DNA-binding protein
  misc_feature (1)..(286): NCBI GI NO: 34895664 NR Description: nucleoid DNA-binding protein cnd41-like protein
MRRSKARAAALSAVRNRARFSGKNEQQTPAGVLPVRPSGDLEYVIDLAIGTPPQPVSALLDTGSDLIWTQCAPCASCLSQPDPLFAPGQSASYEPMRCAGTLCSDILHHSCERPDTCTYRYNYGDGTMTVGVYATERFTFASSGGGGLTTTVPLGFGCGSVNVGSLNNGSGIVGFGRNPLSLVSQLSIRRFSYCLTSYASRRQSTLLFGSLSDGVYGDATGRVQTTPLLQSPQNPTFYYVHFTGLTVGARRLRIPESAFALRPDGSGGVIVDSGTALTLLPAAVLAGGGAGVPPAAEAAVRKRRQPRGRRVLPGARGLAALVVDVTDAGPEDGAPLPGRGPRPAAPKLRPGRPQEGPPVPPPGRLRRRWLHDWQPGAAGHARALRFGGRDLVDRSGTMLTRAQLVERPPTTRLLSLYAS

SEQ ID NO: 26428 - protein, 324 aa, Zea mays subsp. mays
  peptide (1)..(324): Ceres Seq. ID no. 12409853
  misc_feature (1)..(185): Pfam Name: Pfam Description:  Eukaryotic aspartyl protease
  misc_feature (1)..(185): NCBI GI NO: 38344829 NR Description: OSJNBa0064H22.10
  misc_feature (1)..(185): NCBI GI NO: 30678047 NR Description: chloroplast nucleoid DNA binding protein -related
  misc_feature (1)..(185): NCBI GI NO: 34898756 NR Description: OJ1131_E05.2
  misc_feature (1)..(185): NCBI GI NO: 20197342 NR Description: putative chloroplast nucleoid DNA binding protein
  misc_feature (1)..(188): NCBI GI NO: 34898762 NR Description: OJ1131_E05.5
  misc_feature (1)..(189): NCBI GI NO: 15223368 NR Description: chloroplast nucleoid DNA binding protein, putative
  misc_feature (1)..(189): NCBI GI NO: 21594980 NR Description: chloroplast nucleoid DNA binding protein, putative
  misc_feature (1)..(185): NCBI GI NO: 15229656 NR Description: putative chloroplast nucleoid DNA-binding protein
  misc_feature (1)..(185): NCBI GI NO: 19424106 NR Description: putative chloroplast nucleoid DNA-binding protein
  misc_feature (1)..(191): NCBI GI NO: 34895664 NR Description: nucleoid DNA-binding protein cnd41-like protein
MRCAGTLCSDILHHSCERPDTCTYRYNYGDGTMTVGVYATERFTFASSGGGGLTTTVPLGFGCGSVNVGSLNNGSGIVGFGRNPLSLVSQLSIRRFSYCLTSYASRRQSTLLFGSLSDGVYGDATGRVQTTPLLQSPQNPTFYYVHFTGLTVGARRLRIPESAFALRPDGSGGVIVDSGTALTLLPAAVLAGGGAGVPPAAEAAVRKRRQPRGRRVLPGARGLAALVVDVTDAGPEDGAPLPGRGPRPAAPKLRPGRPQEGPPVPPPGRLRRRWLHDWQPGAAGHARALRFGGRDLVDRSGTMLTRAQLVERPPTTRLLSLYAS

SEQ ID NO: 26429 - protein, 292 aa, Zea mays subsp. mays
  peptide (1)..(292): Ceres Seq. ID no. 12409854
  misc_feature (1)..(153): Pfam Name: Pfam Description:  Eukaryotic aspartyl protease
  misc_feature (1)..(153): NCBI GI NO: 38344829 NR Description: OSJNBa0064H22.10
  misc_feature (1)..(153): NCBI GI NO: 30678047 NR Description: chloroplast nucleoid DNA binding protein -related
  misc_feature (1)..(153): NCBI GI NO: 34898756 NR Description: OJ1131_E05.2
  misc_feature (1)..(153): NCBI GI NO: 20197342 NR Description: putative chloroplast nucleoid DNA binding protein
  misc_feature (1)..(156): NCBI GI NO: 34898762 NR Description: OJ1131_E05.5
  misc_feature (1)..(157): NCBI GI NO: 15223368 NR Description: chloroplast nucleoid DNA binding protein, putative
  misc_feature (1)..(157): NCBI GI NO: 21594980 NR Description: chloroplast nucleoid DNA binding protein, putative
  misc_feature (1)..(153): NCBI GI NO: 15229656 NR Description: putative chloroplast nucleoid DNA-binding protein
  misc_feature (1)..(153): NCBI GI NO: 19424106 NR Description: putative chloroplast nucleoid DNA-binding protein
  misc_feature (1)..(159): NCBI GI NO: 34895664 NR Description: nucleoid DNA-binding protein cnd41-like protein
MTVGVYATERFTFASSGGGGLTTTVPLGFGCGSVNVGSLNNGSGIVGFGRNPLSLVSQLSIRRFSYCLTSYASRRQSTLLFGSLSDGVYGDATGRVQTTPLLQSPQNPTFYYVHFTGLTVGARRLRIPESAFALRPDGSGGVIVDSGTALTLLPAAVLAGGGAGVPPAAEAAVRKRRQPRGRRVLPGARGLAALVVDVTDAGPEDGAPLPGRGPRPAAPKLRPGRPQEGPPVPPPGRLRRRWLHDWQPGAAGHARALRFGGRDLVDRSGTMLTRAQLVERPPTTRLLSLYAS

SEQ ID NO: 26430 - DNA, 1536 bp, Zea mays subsp. mays
  misc_feature (1)..(1536): Ceres Seq. ID no. 12387081
aaagcaaagtctcctgcttccttccgtcttgctcctcgacccttcttccttccccaccaccgcgttccaatcaatcccaatcgcgacccagccagaggcgagcgcgagaaaatccccattccccaatccccacgccacagcctcccttccctccccgtctcctccaaattcaatcgtctccaagcgccaatccgccccgtctccaaatcccaggcaggcaggcagccaaccagccatggagtgcgagccggaggagctgcagttcctgggcgtcgtcggcatctaccgcttctccgcggagatcctccgaggcccgcaccgcccgctcttcgcgcgcatcgcggccgccttcgcgctgcccctctccgcgcttttcctcctgcacgtcgccatctcgcacgcgctcttcacccacatcgactccgacgacacggccctggacgcatcctccccgggcaccgacacgcagcgccgcctgctgtcccgcctcgcctccgactggctcgccctgctcctcttcaagtccgcctacctcctcgcgctcctcctgctctcgctcctctccgtcgccgcctccgtgttctccgtcgcctccgtctactccgccaagcgcgacgcgctcaccttcccgcgcgtgctctccgtcgtgccccgcgtctggcggaggctcgccgccacgttcctcgccgccttcgcgctcctcttcgcctaccacgccgtcgccgtgctcgtcttcgtcggcctcctcgtcgccgcggacaacggctccggcctcgcgggcctgctcgccttcctcgtcgccgtcgcctacctgctcggcctcgtctacctcggcgtcgtctggcacctcgccagcgtcgtctccgtgctcgaggaccacaagggcttcgccgccatgcgcaagagcaaggacctcatcagggggaagctcgtcaccgcgggtgctatcttcttcacgctcaacgtcgtcttcgccgccgtcgagctcggcttccgcgcctgggtcgtcaggggatccggcgccgcgtcgtcaaggctcttgctcggcctcatcatgctcgccgcgctctgctgcgtcgtcatgctcgcgctcgtcacgcagaccgtcgtctacctcgtgtgcaagagctaccaccacgagagcctcgacaaggccaacatctccgaccacctcgaggtctacctcggcgactacgtccccgctaaaggcgtccgacgtgcagatggagcagttccaggtctgactgtgaatcccatagcttctctgtctttatcactgctcgccaatccatcctctgatgccggaattctcctgttaccaccggcagccaggtaatctgtaattgtgtacgtacagcaggcagcaggtgatgaacatacttgcgttaagtaggaagaattgggaatttttgtcttgggggtacaagaataatggggatctgtacttcccttagtctcttcctcaaggacatggttccttcccttgtttacatgatttataaacaggagatgaatggaattgggcatgccgaattt

SEQ ID NO: 26431 - protein, 444 aa, Zea mays subsp. mays
  peptide (1)..(444): Ceres Seq. ID no. 12387082
  misc_feature (79)..(402): NCBI GI NO: 18397813 NR Description: expressed protein; protein id: At1g31130
  misc_feature (79)..(402): NCBI GI NO: 30684945 NR Description: expressed protein [Arabidopsis thaliana]
  misc_feature (79)..(402): NCBI GI NO: 34908936 NR Description: P0691E06.20
  misc_feature (79)..(402): NCBI GI NO: 15241607 NR Description: putative protein; protein id: At5g44860
  misc_feature (79)..(402): NCBI GI NO: 7485737 NR Description: hypothetical protein F18F4
KQSLLLPSVLLLDPSSFPTTAFQSIPIATQPEASARKSPFPNPHATASLPSPSPPNSIVSKRQSAPSPNPRQAGSQPAMECEPEELQFLGVVGIYRFSAEILRGPHRPLFARIAAAFALPLSALFLLHVAISHALFTHIDSDDTALDASSPGTDTQRRLLSRLASDWLALLLFKSAYLLALLLLSLLSVAASVFSVASVYSAKRDALTFPRVLSVVPRVWRRLAATFLAAFALLFAYHAVAVLVFVGLLVAADNGSGLAGLLAFLVAVAYLLGLVYLGVVWHLASVVSVLEDHKGFAAMRKSKDLIRGKLVTAGAIFFTLNVVFAAVELGFRAWVVRGSGAASSRLLLGLIMLAALCCVVMLALVTQTVVYLVCKSYHHESLDKANISDHLEVYLGDYVPAKGVRRADGAVPGLTVNPIASLSLSLLANPSSDAGILLLPPAAR

SEQ ID NO: 26432 - protein, 413 aa, Zea mays subsp. mays
  peptide (1)..(413): Ceres Seq. ID no. 12387083
  misc_feature (82)..(400): Pfam Name: Pfam Description:  Equine herpesvirus glycoprotein gp2
  misc_feature (1)..(404): NCBI GI NO: 13592175 NR Description: ppg3 [Leishmania major]
  misc_feature (20)..(404): NCBI GI NO: 13592175 NR Description: ppg3 [Leishmania major]
  misc_feature (8)..(360): NCBI GI NO: 13592175 NR Description: ppg3 [Leishmania major]
  misc_feature (1)..(377): NCBI GI NO: 13592175 NR Description: ppg3 [Leishmania major]
  misc_feature (87)..(404): NCBI GI NO: 13592175 NR Description: ppg3 [Leishmania major]
  misc_feature (65)..(399): NCBI GI NO: 28828184 NR Description: similar to Leishmania major. Ppg3
  misc_feature (90)..(395): NCBI GI NO: 28828184 NR Description: similar to Leishmania major. Ppg3
  misc_feature (91)..(396): NCBI GI NO: 28828184 NR Description: similar to Leishmania major. Ppg3
  misc_feature (80)..(383): NCBI GI NO: 28828184 NR Description: similar to Leishmania major. Ppg3
  misc_feature (80)..(383): NCBI GI NO: 28828184 NR Description: similar to Leishmania major. Ppg3
SKVSCFLPSCSSTLLPSPPPRSNQSQSRPSQRRARENPHSPIPTPQPPFPPRLLQIQSSPSANPPRLQIPGRQAANQPWSASRRSCSSWASSASTASPRRSSEARTARSSRASRPPSRCPSPRFSSCTSPSRTRSSPTSTPTTRPWTHPPRAPTRSAACCPASPPTGSPCSSSSPPTSSRSSCSRSSPSPPPCSPSPPSTPPSATRSPSRACSPSCPASGGGSPPRSSPPSRSSSPTTPSPCSSSSASSSPRTTAPASRACSPSSSPSPTCSASSTSASSGTSPASSPCSRTTRASPPCARARTSSGGSSSPRVLSSSRSTSSSPPSSSASAPGSSGDPAPRRQGSCSASSCSPRSAASSCSRSSRRPSSTSCARATTTRASTRPTSPTTSRSTSATTSPLKASDVQMEQFQV

SEQ ID NO: 26433 - protein, 401 aa, Zea mays subsp. mays
  peptide (1)..(401): Ceres Seq. ID no. 12387084
  misc_feature (183)..(285): Pfam Name: Pfam Description:  Cupin
KAKSPASFRLAPRPFFLPHHRVPINPNRDPARGEREKIPIPQSPRHSLPSLPVSSKFNRLQAPIRPVSKSQAGRQPTSHGVRAGGAAVPGRRRHLPLLRGDPPRPAPPALRAHRGRLRAAPLRAFPPARRHLARALHPHRLRRHGPGRILPGHRHAAPPAVPPRLRLARPAPLQVRLPPRAPPALAPLRRRLRVLRRLRLLRQARRAHLPARALRRAPRLAEARRHVPRRLRAPLRLPRRRRARLRRPPRRRGQRLRPRGPARLPRRRRLPARPRLPRRRLAPRQRRLRARGPQGLRRHAQEQGPHQGEARHRGCYLLHAQRRLRRRRARLPRLGRQGIRRRVVKALARPHHARRALLRRHARARHADRRLPRVQELPPREPRQGQHLRPPRGLPRRLRPR

SEQ ID NO: 26434 - protein, 366 aa, Zea mays subsp. mays
  peptide (1)..(366): Ceres Seq. ID no. 12387085
  misc_feature (1)..(324): NCBI GI NO: 18397813 NR Description: expressed protein; protein id: At1g31130
  misc_feature (1)..(324): NCBI GI NO: 30684945 NR Description: expressed protein [Arabidopsis thaliana]
  misc_feature (1)..(324): NCBI GI NO: 34908936 NR Description: P0691E06.20
  misc_feature (1)..(324): NCBI GI NO: 15241607 NR Description: putative protein; protein id: At5g44860
  misc_feature (1)..(324): NCBI GI NO: 7485737 NR Description: hypothetical protein F18F4
MECEPEELQFLGVVGIYRFSAEILRGPHRPLFARIAAAFALPLSALFLLHVAISHALFTHIDSDDTALDASSPGTDTQRRLLSRLASDWLALLLFKSAYLLALLLLSLLSVAASVFSVASVYSAKRDALTFPRVLSVVPRVWRRLAATFLAAFALLFAYHAVAVLVFVGLLVAADNGSGLAGLLAFLVAVAYLLGLVYLGVVWHLASVVSVLEDHKGFAAMRKSKDLIRGKLVTAGAIFFTLNVVFAAVELGFRAWVVRGSGAASSRLLLGLIMLAALCCVVMLALVTQTVVYLVCKSYHHESLDKANISDHLEVYLGDYVPAKGVRRADGAVPGLTVNPIASLSLSLLANPSSDAGILLLPPAAR

SEQ ID NO: 26435 - DNA, 1314 bp, Zea mays subsp. mays
  misc_feature (1)..(1314): Ceres Seq. ID no. 12344048
gtacaagcctttggagacatcgtgtccgtcagttatttctcttcctcctccaaaccaccgatgtcgctaccggttctatccctgcgctgccattgctcgtccgcatcctccttggatttccctcccaggaaggttagggttttctgatgcgctcatacatggggcagcaagaagatgggatgtctgatggcttgtacacttacaagcatcaccgcgagcgaggagctgatatccacaccatctttgtgaagaagagcaaattcaggattctgctgtcatttatcggcacaacgttccttcttgtgtctgtttgctgcgccctgttatcgaaggatggtttatgtctttgttccctttggagcatttcatttgccagtgtaattgcgaaatgcctgcgatgtgaccctgtgaagaaagagtcattggtgatcatgccgacttttggaattcaattagagcaacacttttggagtggaagagttcatcgcaaatttgtgcccattggcaagattctaagaccagtgctgaatgagcatgtgacccctgtctcatgctactggagcttggccttgcttgtacgcgaagaatatgagctcatgcttgttttcaagagcttgaatccaccagtcaagatgttggttccaatctggaaagcgttatgtgcattcgtagactccaaaagtgttgctcaatataatgctagtcagctgatcacacagagagagactgtgagtagggagattaggaagatactgactgagagggctagattcttcaacattgctcttgatgacgtctccatcacaagcctgagctttgggaaggagtttactcatgccattgaagcgaagcaggttgctgcacaggaagctgagcgtgctaagttcattgtcgagaaagctgaacaagataagagaagtgcaattatcagggctcagggagaggctaagagtgcggagctgattggtcaagccatagcgaacaaccctgccttccttgccctgaggcagattgaagctgcaagggagatctcccacaccatttcggcctcagccaacaaggtgttcctggactccaacgacctgctgctcaacctccagcagctgaatgtatcgagcaagcagaagaaatgatgtcacaacgttatcccatttcttctgagtttgcagtcagtagtggatgcctttgtaccagacattgtgaggaacgctcggttttggatgtagtttcgccaatcttcctgttatgtggaacttgcgagtatttgctcaaaggcaagcaagctgacaggttttgtttaaacgtaactacagg

SEQ ID NO: 26436 - protein, 328 aa, Zea mays subsp. mays
  peptide (1)..(328): Ceres Seq. ID no. 12344049
  misc_feature (180)..(328): NCBI GI NO: 7716456 NR Description: prohibitin [Zea mays]
  misc_feature (180)..(328): NCBI GI NO: 34394832 NR Description: putative prohibitin
  misc_feature (180)..(328): NCBI GI NO: 34901014 NR Description: putative prohibitin
  misc_feature (180)..(328): NCBI GI NO: 7716462 NR Description: prohibitin [Zea mays]
  misc_feature (180)..(328): NCBI GI NO: 12751303 NR Description: prohibitin 1-like protein [Brassica napus]
  misc_feature (180)..(326): NCBI GI NO: 15219569 NR Description: putative prohibitin 2; protein id: At1g03860
  misc_feature (180)..(327): NCBI GI NO: 15235317 NR Description: prohibitin-like protein; protein id: At4g28510
  misc_feature (180)..(328): NCBI GI NO: 15225374 NR Description: putative prohibitin; protein id: At2g20530
  misc_feature (180)..(327): NCBI GI NO: 21593626 NR Description: prohibitin-like protein [Arabidopsis thaliana]
  misc_feature (180)..(318): NCBI GI NO: 15241424 NR Description: prohibitin; protein id: At5g44140.1
MRSYMGQQEDGMSDGLYTYKHHRERGADIHTIFVKKSKFRILLSFIGTTFLLVSVCCALLSKDGLCLCSLWSISFASVIAKCLRCDPVKKESLVIMPTFGIQLEQHFWSGRVHRKFVPIGKILRPVLNEHVTPVSCYWSLALLVREEYELMLVFKSLNPPVKMLVPIWKALCAFVDSKSVAQYNASQLITQRETVSREIRKILTERARFFNIALDDVSITSLSFGKEFTHAIEAKQVAAQEAERAKFIVEKAEQDKRSAIIRAQGEAKSAELIGQAIANNPAFLALRQIEAAREISHTISASANKVFLDSNDLLLNLQQLNVSSKQKK

SEQ ID NO: 26437 - protein, 324 aa, Zea mays subsp. mays
  peptide (1)..(324): Ceres Seq. ID no. 12344050
  misc_feature (176)..(324): NCBI GI NO: 7716456 NR Description: prohibitin [Zea mays]
  misc_feature (176)..(324): NCBI GI NO: 34394832 NR Description: putative prohibitin
  misc_feature (176)..(324): NCBI GI NO: 34901014 NR Description: putative prohibitin
  misc_feature (176)..(324): NCBI GI NO: 7716462 NR Description: prohibitin [Zea mays]
  misc_feature (176)..(324): NCBI GI NO: 12751303 NR Description: prohibitin 1-like protein [Brassica napus]
  misc_feature (176)..(322): NCBI GI NO: 15219569 NR Description: putative prohibitin 2; protein id: At1g03860
  misc_feature (176)..(323): NCBI GI NO: 15235317 NR Description: prohibitin-like protein; protein id: At4g28510
  misc_feature (176)..(324): NCBI GI NO: 15225374 NR Description: putative prohibitin; protein id: At2g20530
  misc_feature (176)..(323): NCBI GI NO: 21593626 NR Description: prohibitin-like protein [Arabidopsis thaliana]
  misc_feature (176)..(314): NCBI GI NO: 15241424 NR Description: prohibitin; protein id: At5g44140.1
MGQQEDGMSDGLYTYKHHRERGADIHTIFVKKSKFRILLSFIGTTFLLVSVCCALLSKDGLCLCSLWSISFASVIAKCLRCDPVKKESLVIMPTFGIQLEQHFWSGRVHRKFVPIGKILRPVLNEHVTPVSCYWSLALLVREEYELMLVFKSLNPPVKMLVPIWKALCAFVDSKSVAQYNASQLITQRETVSREIRKILTERARFFNIALDDVSITSLSFGKEFTHAIEAKQVAAQEAERAKFIVEKAEQDKRSAIIRAQGEAKSAELIGQAIANNPAFLALRQIEAAREISHTISASANKVFLDSNDLLLNLQQLNVSSKQKK

SEQ ID NO: 26438 - protein, 317 aa, Zea mays subsp. mays
  peptide (1)..(317): Ceres Seq. ID no. 12344051
  misc_feature (169)..(317): NCBI GI NO: 7716456 NR Description: prohibitin [Zea mays]
  misc_feature (169)..(317): NCBI GI NO: 34394832 NR Description: putative prohibitin
  misc_feature (169)..(317): NCBI GI NO: 34901014 NR Description: putative prohibitin
  misc_feature (169)..(317): NCBI GI NO: 7716462 NR Description: prohibitin [Zea mays]
  misc_feature (169)..(317): NCBI GI NO: 12751303 NR Description: prohibitin 1-like protein [Brassica napus]
  misc_feature (169)..(315): NCBI GI NO: 15219569 NR Description: putative prohibitin 2; protein id: At1g03860
  misc_feature (169)..(316): NCBI GI NO: 15235317 NR Description: prohibitin-like protein; protein id: At4g28510
  misc_feature (169)..(317): NCBI GI NO: 15225374 NR Description: putative prohibitin; protein id: At2g20530
  misc_feature (169)..(316): NCBI GI NO: 21593626 NR Description: prohibitin-like protein [Arabidopsis thaliana]
  misc_feature (169)..(307): NCBI GI NO: 15241424 NR Description: prohibitin; protein id: At5g44140.1
MSDGLYTYKHHRERGADIHTIFVKKSKFRILLSFIGTTFLLVSVCCALLSKDGLCLCSLWSISFASVIAKCLRCDPVKKESLVIMPTFGIQLEQHFWSGRVHRKFVPIGKILRPVLNEHVTPVSCYWSLALLVREEYELMLVFKSLNPPVKMLVPIWKALCAFVDSKSVAQYNASQLITQRETVSREIRKILTERARFFNIALDDVSITSLSFGKEFTHAIEAKQVAAQEAERAKFIVEKAEQDKRSAIIRAQGEAKSAELIGQAIANNPAFLALRQIEAAREISHTISASANKVFLDSNDLLLNLQQLNVSSKQKK

SEQ ID NO: 26439 - DNA, 1660 bp, Zea mays subsp. mays
  misc_feature (1)..(1660): Ceres Seq. ID no. 12373712
ctgatttctgaatttgttcctcgtttcgttgccagcccaatcggttcagtttcggcggtaacaagatcaaccgcggtcgccagtcgattctgtgagcctgccagccatggagttgtccagttccgtctcgtccacggcggcggcggcggcgcaggcgcggctgctccggccgccgtcgtttcgccagccggggccggcgggtaagatgaccttcgaccacttccctcgcgcctggattaaccccgcgctcgcgtttgcctctgccttcttcgactccatccaatccaaggaaagttgcaagtgtggcgtgccggctggaactgagcagattggacttcccggcatgctgaatcctgctgcacttggacctgcaactttgccaggatttgtgtaaccaaggcttgtagtacctcttagtgttccatgcaaatttcttgctggcagcaaaccttcagccttgcctgctagtgctaactggatgtcttctccttttgttctccaattccaaactcctgtgcttccgttgcagtttcgaggggtagcttaaaagttaaaactatgattctcctgccgctgcaggattcgtgtcctgtaggagttacgctataaggagcaaactggtgagggcgatgcctccgatccttgctagcttccagcctgcatctcctcagtacccaagctttcaagacgcaaatggcaaaagacgaaatgttccttgttatcagagacaacaaaccccgcaggtagaagtcaggtcgatggaggaggtatatgacactttggctgaacaccttctttctgtcttgaagaatattgaacatcttgattcaaaatacattgttggtctagctggcccacctggtgctggcaagtccacagttgcctctgaagttgttcgacgtgttaatacattttggtcccagaagcacacaaagggtagcgcagcactgcttcctaccaaggaaattgctgcaatgcttccaatggatggtttccacctttatcgtgcccagcttgatgcaatggaggatccaaaagaagcacatgcaagaagaggagcaccttggacattcaatccatcactgtttctgaaatgtctacatacactaagaacagagggttcagtttatgctccatcatttgatcatggtgttggcgacccagttgagaatgacatatttgtaaagccacagcacaaaatagtgatagttgaagggaactatctgttactggaagaagatgtttggaccgaaattagagacttgtttgatgagaaatggttcattgacattgacattgatatctccatgcaaagagtgctcaagagacatattgcaaccggaaaagagccagatgtagcagcatggaggatctcctacaacgaccgaccgaatgcagagcttatcctggaatcaaggaagaatgctgaccttgtgatcagatcagtagacttctcaagctagtgttcaattctttcaataggaaatagcattgtggttctagagttggaggttgttgtgggctgtttccgtggagattcctgtacatataataagctgaatgcctgtttcaaattttcatggtgattgtgttgcatgtaataagatattccttcactatgtaccgtggaggattgttaagtaatttattgacatttttt

SEQ ID NO: 26440 - protein, 277 aa, Zea mays subsp. mays
  peptide (1)..(277): Ceres Seq. ID no. 12373713
  misc_feature (70)..(273): Pfam Name: Pfam Description:  Phosphoribulokinase / Uridine kinase family
  misc_feature (24)..(274): NCBI GI NO: 15218676 NR Description: unknown protein; protein id: At1g03030.1
  misc_feature (28)..(143): NCBI GI NO: 25363622 NR Description: hypothetical protein F10O3
  misc_feature (166)..(274): NCBI GI NO: 25363622 NR Description: hypothetical protein F10O3
  misc_feature (66)..(272): NCBI GI NO: 40741109 NR Description: hypothetical protein AN4382.2
  misc_feature (38)..(273): NCBI GI NO: 19113880 NR Description: similarity to uridine kinase
  misc_feature (68)..(257): NCBI GI NO: 38108268 NR Description: hypothetical protein MG02303.4
  misc_feature (116)..(270): NCBI GI NO: 23500977 NR Description: kinase-related protein [Brucella suis 1330]
  misc_feature (58)..(124): NCBI GI NO: 23500977 NR Description: kinase-related protein [Brucella suis 1330]
  misc_feature (116)..(270): NCBI GI NO: 17988166 NR Description: PANTOTHENATE KINASE [Brucella melitensis]
  misc_feature (58)..(124): NCBI GI NO: 17988166 NR Description: PANTOTHENATE KINASE [Brucella melitensis]
MPPILASFQPASPQYPSFQDANGKRRNVPCYQRQQTPQVEVRSMEEVYDTLAEHLLSVLKNIEHLDSKYIVGLAGPPGAGKSTVASEVVRRVNTFWSQKHTKGSAALLPTKEIAAMLPMDGFHLYRAQLDAMEDPKEAHARRGAPWTFNPSLFLKCLHTLRTEGSVYAPSFDHGVGDPVENDIFVKPQHKIVIVEGNYLLLEEDVWTEIRDLFDEKWFIDIDIDISMQRVLKRHIATGKEPDVAAWRISYNDRPNAELILESRKNADLVIRSVDFSS

SEQ ID NO: 26441 - protein, 234 aa, Zea mays subsp. mays
  peptide (1)..(234): Ceres Seq. ID no. 12373714
  misc_feature (27)..(230): Pfam Name: Pfam Description:  Phosphoribulokinase / Uridine kinase family
  misc_feature (1)..(231): NCBI GI NO: 15218676 NR Description: unknown protein; protein id: At1g03030.1
  misc_feature (1)..(100): NCBI GI NO: 25363622 NR Description: hypothetical protein F10O3
  misc_feature (123)..(231): NCBI GI NO: 25363622 NR Description: hypothetical protein F10O3
  misc_feature (23)..(229): NCBI GI NO: 40741109 NR Description: hypothetical protein AN4382.2
  misc_feature (1)..(230): NCBI GI NO: 19113880 NR Description: similarity to uridine kinase
  misc_feature (25)..(214): NCBI GI NO: 38108268 NR Description: hypothetical protein MG02303.4
  misc_feature (73)..(227): NCBI GI NO: 23500977 NR Description: kinase-related protein [Brucella suis 1330]
  misc_feature (15)..(81): NCBI GI NO: 23500977 NR Description: kinase-related protein [Brucella suis 1330]
  misc_feature (73)..(227): NCBI GI NO: 17988166 NR Description: PANTOTHENATE KINASE [Brucella melitensis]
  misc_feature (15)..(81): NCBI GI NO: 17988166 NR Description: PANTOTHENATE KINASE [Brucella melitensis]
MEEVYDTLAEHLLSVLKNIEHLDSKYIVGLAGPPGAGKSTVASEVVRRVNTFWSQKHTKGSAALLPTKEIAAMLPMDGFHLYRAQLDAMEDPKEAHARRGAPWTFNPSLFLKCLHTLRTEGSVYAPSFDHGVGDPVENDIFVKPQHKIVIVEGNYLLLEEDVWTEIRDLFDEKWFIDIDIDISMQRVLKRHIATGKEPDVAAWRISYNDRPNAELILESRKNADLVIRSVDFSS

SEQ ID NO: 26442 - protein, 162 aa, Zea mays subsp. mays
  peptide (1)..(162): Ceres Seq. ID no. 12373715
  misc_feature (1)..(158): Pfam Name: Pfam Description:  Phosphoribulokinase / Uridine kinase family
  misc_feature (1)..(159): NCBI GI NO: 15218676 NR Description: unknown protein; protein id: At1g03030.1
  misc_feature (1)..(28): NCBI GI NO: 25363622 NR Description: hypothetical protein F10O3
  misc_feature (51)..(159): NCBI GI NO: 25363622 NR Description: hypothetical protein F10O3
  misc_feature (1)..(157): NCBI GI NO: 40741109 NR Description: hypothetical protein AN4382.2
  misc_feature (1)..(158): NCBI GI NO: 19113880 NR Description: similarity to uridine kinase
  misc_feature (1)..(142): NCBI GI NO: 38108268 NR Description: hypothetical protein MG02303.4
  misc_feature (1)..(155): NCBI GI NO: 23500977 NR Description: kinase-related protein [Brucella suis 1330]
  misc_feature (1)..(155): NCBI GI NO: 17988166 NR Description: PANTOTHENATE KINASE [Brucella melitensis]
  misc_feature (1)..(155): NCBI GI NO: 15887420 NR Description: AGR_C_100p [Agrobacterium tumefaciens]
  misc_feature (1)..(156): NCBI GI NO: 22959901 NR Description: hypothetical protein [Rhodobacter sphaeroides]
MLPMDGFHLYRAQLDAMEDPKEAHARRGAPWTFNPSLFLKCLHTLRTEGSVYAPSFDHGVGDPVENDIFVKPQHKIVIVEGNYLLLEEDVWTEIRDLFDEKWFIDIDIDISMQRVLKRHIATGKEPDVAAWRISYNDRPNAELILESRKNADLVIRSVDFSS

SEQ ID NO: 26443 - DNA, 1825 bp, Zea mays subsp. mays
  misc_feature (1)..(1825): Ceres Seq. ID no. 12406786
agtgctgtgctgtgctgtgctgtgcagcggttgctcctcctggtcctgctactgctccgctctcctcgtcgcttgctcgtcttttttccacactgggcggatttctttctcgcaaggagcaggaggaggaggagggggaaaggtttgtccgtttcttgcgagagcccgttgcagagatccagccaggcagcaggattcaagaacctgacctttttgtgctctactccccgagagattttcacccaaagtttggtccttggagccgattcgatccctggaaacaaccaagtgaaggtgccgcaaatccgttgtgactgcacaaaatcccaaaacgcctctgccacctatctatttgatcgttgggaacctagctccatccatctgagccaagaaagcagcagccgcagggcggaggggaggggagaggataggagagggcgtcctcttccgagcagcccgcattgccgcctgtcgatgagtgagcgctgcctccgatgccgtcggggtgctcggtgtccagtctcgcggcgcggttcgccttcttcccgccggagccggcgacgtacgccgtccggaaggacgaggccacgggccgcctcgtcgcctccggcgtgccgcgggacaacgccatggacgtcctgctcgtcgacaccagcagggggaacaaggtggtggccttctacttccggaacccctgcgcgcgcctcaccctgctctactcgcacggcaacgctgccgacctcggccagctgtacgacctctttgtgcagctcaaggtcaatctcaagatcaacctgatgggatatgactattctggctatggtgcatctactggcaagccaagtgaagagaatacatatgcagacattgaagcagtgtaccaatgcttagaaactgagtatgggatcagccagggaagacattatcttgtacggacaatctgtcggcagtggaccaacattacatttagcctctcgtttgcctagattgcgtggggtggttctccacagcgctatactgtcaggcctccgtgtggtttgccatgtgaactttactttctgctttgacatttacaaaaatgtcaagaaaataaaaaaggtcaaatgcccagtgctcgttattcatgggacggacgacgacgtggtggactggtcgcacgggaaggagctgtggaggctggcgagggagcctcacgacccgctctggatcaagggcggcgggcactgcaacctggagctgtacccggacttcatccgccacctgtcgcggttcgtccgcgagatggagaccgtgacgacgaaggcccggctgaggaagatccggccggccctccaccagctccgcaagaaggcggcgcaccgggcaagcacggcggcgacgacgaccaccaccaccaccttcaccgccaactgctgctgccgcgtccgcgtccgcaagccgacctgccccagctgcggctccttcggctgtggctgctgcgggccgcttaggagctgcctcgcgctccggtttcccaggtgctgccggcctcctgctgcctgcttcacctgcggcggctgctgttggtcatgcaggtgcaggagctgcttcaagtgctgctgctgctgatgatgatgttgagacgtgcgtcaatgagtgccgcccgccgatcgatccctgcgcgcgcgcgcgcgcgtatggtataatgaagaggaatgacagtggtcatgggatccctgctaacaaaccctttaaacgccgtagactataaaaaaaacctagatttgagctggtggctgctgaacgttgtattaacagatcccaggactccccgccgtttgtggtc

SEQ ID NO: 26444 - protein, 265 aa, Zea mays subsp. mays
  peptide (1)..(265): Ceres Seq. ID no. 12406787
  misc_feature (76)..(265): NCBI GI NO: 13592175 NR Description: ppg3 [Leishmania major]
  misc_feature (166)..(265): NCBI GI NO: 11360494 NR Description: antifreeze glycopeptide AFGP polyprotein precursor
  misc_feature (88)..(265): NCBI GI NO: 13592175 NR Description: ppg3 [Leishmania major]
SAVLCCAVQRLLLLVLLLLRSPRRLLVFFPHWADFFLARSRRRRRGKGLSVSCESPLQRSSQAAGFKNLTFLCSTPREIFTQSLVLGADSIPGNNQVKVPQIRCDCTKSQNASATYLFDRWEPSSIHLSQESSSRRAEGRGEDRRGRPLPSSPHCRLSMSERCLRCRRGARCPVSRRGSPSSRRSRRRTPSGRTRPRAASSPPACRGTTPWTSCSSTPAGGTRWWPSTSGTPARASPCSTRTATLPTSASCTTSLCSSRSISRST

SEQ ID NO: 26445 - protein, 235 aa, Zea mays subsp. mays
  peptide (1)..(235): Ceres Seq. ID no. 12406788
  misc_feature (172)..(235): Pfam Name: Pfam Description:  Keratin, high sulfur B2 protein
  misc_feature (1)..(235): NCBI GI NO: 34905260 NR Description: P0577B11.1
  misc_feature (2)..(235): NCBI GI NO: 15222598 NR Description: hypothetical protein; protein id: At1g32190.1
  misc_feature (2)..(132): NCBI GI NO: 28393521 NR Description: unknown protein [Arabidopsis thaliana]
  misc_feature (57)..(132): NCBI GI NO: 30688887 NR Description: expressed protein [Arabidopsis thaliana]
  misc_feature (2)..(63): NCBI GI NO: 30688887 NR Description: expressed protein [Arabidopsis thaliana]
  misc_feature (57)..(129): NCBI GI NO: 15224121 NR Description: hypothetical protein; protein id: At2g24320.1
  misc_feature (1)..(59): NCBI GI NO: 15224121 NR Description: hypothetical protein; protein id: At2g24320.1
  misc_feature (2)..(129): NCBI GI NO: 15230760 NR Description: unknown protein; protein id: At3g30380.1
  misc_feature (1)..(129): NCBI GI NO: 15232168 NR Description: unknown protein; protein id: At3g01690.1
  misc_feature (2)..(154): NCBI GI NO: 15241394 NR Description: putative protein; protein id: At5g14390
MGSAREDIILYGQSVGSGPTLHLASRLPRLRGVVLHSAILSGLRVVCHVNFTFCFDIYKNVKKIKKVKCPVLVIHGTDDDVVDWSHGKELWRLAREPHDPLWIKGGGHCNLELYPDFIRHLSRFVREMETVTTKARLRKIRPALHQLRKKAAHRASTAATTTTTTTFTANCCCRVRVRKPTCPSCGSFGCGCCGPLRSCLALRFPRCCRPPAACFTCGGCCWSCRCRSCFKCCCC

SEQ ID NO: 26446 - protein, 163 aa, Zea mays subsp. mays
  peptide (1)..(163): Ceres Seq. ID no. 12406789
  misc_feature (1)..(140): NCBI GI NO: 34905260 NR Description: P0577B11.1
  misc_feature (4)..(140): NCBI GI NO: 15222598 NR Description: hypothetical protein; protein id: At1g32190.1
  misc_feature (4)..(140): NCBI GI NO: 28393521 NR Description: unknown protein [Arabidopsis thaliana]
  misc_feature (4)..(140): NCBI GI NO: 30688887 NR Description: expressed protein [Arabidopsis thaliana]
  misc_feature (4)..(140): NCBI GI NO: 15224121 NR Description: hypothetical protein; protein id: At2g24320.1
  misc_feature (4)..(140): NCBI GI NO: 15230760 NR Description: unknown protein; protein id: At3g30380.1
  misc_feature (4)..(140): NCBI GI NO: 15232168 NR Description: unknown protein; protein id: At3g01690.1
  misc_feature (4)..(140): NCBI GI NO: 15241394 NR Description: putative protein; protein id: At5g14390
  misc_feature (4)..(140): NCBI GI NO: 15233975 NR Description: putative protein; protein id: At4g24760
  misc_feature (4)..(138): NCBI GI NO: 10177798 NR Description: emb|CAB87778
MPSGCSVSSLAARFAFFPPEPATYAVRKDEATGRLVASGVPRDNAMDVLLVDTSRGNKVVAFYFRNPCARLTLLYSHGNAADLGQLYDLFVQLKVNLKINLMGYDYSGYGASTGKPSEENTYADIEAVYQCLETEYGISQGRHYLVRTICRQWTNITFSLSFA

SEQ ID NO: 26447 - DNA, 498 bp, Zea mays subsp. mays
  misc_feature (1)..(498): Ceres Seq. ID no. 13572049
aggttccagtattccaccacgcggcgtcgctgcycgaaccccgaaccttctcgaggtcgaggcccctcccctttcgccaggagaaaacaatgagcaggcgcaacagccgtaccatctatgtaggcaatctccctggggacatccgtgagagggaggttgaggatctcttctacaagtatggccgtattttggatattgacttgaaaatacctccgagacctcctggatacgcattcgttgagtttgaggatccacgtgatgctgatgatgcaatttatggccgtgatgggtataactttgatggctacaggttgagggttgaattagctcatggtggcagaggccagtcttattcttatgatcgttcaagcagctatagcagtgcatgccgtggaggtgtttctaggcgctctgatttccgtgttatggtcactggtttacctcatcggcatcgtggcaagatctgaaggaccacatgcggcgcgctggtgatgtctg

SEQ ID NO: 26448 - protein, 154 aa, Zea mays subsp. mays
  peptide (1)..(154): Ceres Seq. ID no. 13572050
  misc_feature (38)..(106): Pfam Name: a.k.a. RRM, RBD, or RNP domain Pfam Description: RNA recognition motif.
  misc_feature (30)..(147): NCBI GI NO: 34894608 NR Description: putative pre-mRNA splicing factor SF2
  misc_feature (27)..(147): NCBI GI NO: 33146854 NR Description: putative pre-mRNA splicing factor SF2
  misc_feature (30)..(147): NCBI GI NO: 4775270 NR Description: SF2/ASF-like splicing modulator Srp30
  misc_feature (30)..(147): NCBI GI NO: 4775271 NR Description: SF2/ASF-like splicing modulator Srp30, variant 1
  misc_feature (30)..(147): NCBI GI NO: 22329428 NR Description: arginine/serine-rich splicing factor, atSRp30
  misc_feature (30)..(147): NCBI GI NO: 25386570 NR Description: hypothetical protein
  misc_feature (30)..(147): NCBI GI NO: 7484802 NR Description: alternative splicing factor ASF-2 homolog T14P8
  misc_feature (30)..(147): NCBI GI NO: 30679138 NR Description: arginine/serine-rich splicing factor
  misc_feature (30)..(147): NCBI GI NO: 30679143 NR Description: arginine/serine-rich splicing factor
  misc_feature (30)..(147): NCBI GI NO: 2443473 NR Description: ASF/SF2 homolog [Arabidopsis thaliana]
  misc_feature (11)..(11): Xaa is any aa, unknown or other
VPVFHHAASLXEPRTFSRSRPLPFRQEKTMSRRNSRTIYVGNLPGDIREREVEDLFYKYGRILDIDLKIPPRPPGYAFVEFEDPRDADDAIYGRDGYNFDGYRLRVELAHGGRGQSYSYDRSSSYSSACRGGVSRRSDFRVMVTGLPHRHRGKI

SEQ ID NO: 26449 - protein, 125 aa, Zea mays subsp. mays
  peptide (1)..(125): Ceres Seq. ID no. 13572051
  misc_feature (9)..(77): Pfam Name: a.k.a. RRM, RBD, or RNP domain Pfam Description: RNA recognition motif.
  misc_feature (1)..(118): NCBI GI NO: 34894608 NR Description: putative pre-mRNA splicing factor SF2
  misc_feature (1)..(118): NCBI GI NO: 33146854 NR Description: putative pre-mRNA splicing factor SF2
  misc_feature (1)..(118): NCBI GI NO: 4775270 NR Description: SF2/ASF-like splicing modulator Srp30
  misc_feature (1)..(118): NCBI GI NO: 22329428 NR Description: arginine/serine-rich splicing factor, atSRp30
  misc_feature (1)..(118): NCBI GI NO: 25386570 NR Description: hypothetical protein
  misc_feature (1)..(118): NCBI GI NO: 4775271 NR Description: SF2/ASF-like splicing modulator Srp30, variant 1
  misc_feature (1)..(118): NCBI GI NO: 7484802 NR Description: alternative splicing factor ASF-2 homolog T14P8
  misc_feature (1)..(118): NCBI GI NO: 30679138 NR Description: arginine/serine-rich splicing factor
  misc_feature (1)..(118): NCBI GI NO: 30679143 NR Description: arginine/serine-rich splicing factor
  misc_feature (1)..(118): NCBI GI NO: 2443473 NR Description: ASF/SF2 homolog [Arabidopsis thaliana]
MSRRNSRTIYVGNLPGDIREREVEDLFYKYGRILDIDLKIPPRPPGYAFVEFEDPRDADDAIYGRDGYNFDGYRLRVELAHGGRGQSYSYDRSSSYSSACRGGVSRRSDFRVMVTGLPHRHRGKI

SEQ ID NO: 26450 - DNA, 2103 bp, Zea mays subsp. mays
  misc_feature (1)..(2103): Ceres Seq. ID no. 12344495
gtcgcattccgcaacacctgctcctcgcccccttctctcagaggcgacgcctcgggcgctcctaccctgccccgtctccggtccccccgcgccgtcggcgaggcagccggccgtcacagaagcccgatccggaccccgcgagaaatccttgttatacctgatggctatgattgatgagcctctttatccaattgctgtactgattgacgagctcaagaatgaagacatccagttgcgtctaaactccattagaagactttcaacaattgcacggctcttggagaagaaagaaccaggaaggagctgattccttttcttagtgaaaacaacgatgatgaagacgaggtgcttcttgcaatggctgaggaattgggtgtgttcattccgtatgttggtggtgtagaacatgctcatgttttgctcccacctttggagacattgtgtacagtggaggaaacttgtgtccgtgataaagcagttgaatctctgtgccgtattggtgcacaaatgaaggaaactgacattgtcgactggttcattccagtagtaaagaggctagcagctggagagtggtttacagctcgcgtatcgtcctgtggtcttttccacatagcctatccaagtgcgtcggaccaattgaaaacagaattgaggactatctatggtcagctatgtcaggatgacatgcctatggtcagaagagcagcagcatcaaatcttggaaagtttgcagctacagttgaacagaatcatttgaagacagaaataatgtcaatatttgatgatttaacccaagatgatcaagattcagtgcgtctgttggctgttgaaggctgtgctgcccttggtaaattgttggaaccacaagattgcgtagcacacattcttccagtcattgtcaatttctcccaggataaatcatggcgtgttcgttatatggtcgccaatcaattatatgagctctgtgaggctgttggccctgagcctacaagagctgatttggtgcctgcctatgttcgcctccttcgtgataatgaggctgaagtgcggatagcagctgctggaaaagtaactaagttttgccgcatattaaatcctcagctctcagtccaacatattcttccatgcgttaaggaattgtcatcagattcatcccagcatgttcgttcagctttagcctcagtgattatgggaatggctcctgtactgggaaaggatgctaccattgaacagcttgttccaattttcctctctttgttgaaagacgaatttcctgatgttcgacttaacataatcagcaaacttgatcaagttaatcaggttattggaattgacttgctatctcaatcactgctaccagcaattgtagaacttgcagaggataggcactggagagtccggcttgcaataattgagtacatcccattgttggcgagtcaattaggtgttgggtttttcgatgacaagctgggggcgctctgcatgcaatggttggaagacaaggtcttttcaatcagagatgctgccgctaacaacttgaagcgccttgcagaagagtttggtccagagtgggcaatgcagcatataatccctcaggtgctggagaagatcaacaacccacactatttataccgcatgacgattctgcaggcaatctccttgctagctcctgtcatgggtgcagagatcacctgtcaaaagctgcttccagtcgtcattaattcttcgaaggacagggttcccaacatcaagttcaatgttgcgaaagtactacagtcacttgtaccgatcctcgaccaatctgtggtggagaagaccgtgaaaccgtgcctcgttgagctcagcgaggaccctgacgtcgacgtaaggtactacgcaaaccaggcactgcaggcgtgcgaccagatgatggtgtcaagctaactagcctttgtgtcaagtatttagagagttcgatcgatgctccatagtccaattttggattacctgtaatttggcctttagatttgaagagttgtttgtgtccagcctcggtaacagataaaaacggacggtcctgatccccttgttcgtttgtgttaattaatgttgtaattgagcagg

SEQ ID NO: 26451 - protein, 521 aa, Zea mays subsp. mays
  peptide (1)..(521): Ceres Seq. ID no. 12344496
  misc_feature (168)..(206): Pfam Name: Pfam Description:  HEAT repeat
  misc_feature (1)..(521): NCBI GI NO: 5679684 NR Description: phosphatase 2A regulatory A subunit [Oryza sativa]
  misc_feature (1)..(521): NCBI GI NO: 15230896 NR Description: protein phosphatase 2A 65 kDa regulatory subunit
  misc_feature (1)..(521): NCBI GI NO: 1076389 NR Description: phospho protein phosphatase 2A 65K regulatory chainhomolog pDF1
  misc_feature (1)..(521): NCBI GI NO: 11094365 NR Description: Ser/Thr specific protein phosphatase 2A Aregulatory subunit alpha isoform
  misc_feature (1)..(521): NCBI GI NO: 11094367 NR Description: Ser/Thr specific protein phosphatase 2A Aregulatory subunit beta isoform
  misc_feature (1)..(521): NCBI GI NO: 22329534 NR Description: protein phosphatase 2A regulatory subunit,putative
  misc_feature (1)..(520): NCBI GI NO: 7447393 NR Description: phosphoprotein phosphatase (EC 3
  misc_feature (1)..(521): NCBI GI NO: 25313492 NR Description: probable protein phosphotase 2a 65K chain -Arabidopsis thaliana
  misc_feature (1)..(515): NCBI GI NO: 15222601 NR Description: phosphoprotein phosphatase 2A, regulatory subunitA
  misc_feature (1)..(515): NCBI GI NO: 1254996 NR Description: serine/threonine protein phosphatase type 2Aregulatory subunit A
MAEELGVFIPYVGGVEHAHVLLPPLETLCTVEETCVRDKAVESLCRIGAQMKETDIVDWFIPVVKRLAAGEWFTARVSSCGLFHIAYPSASDQLKTELRTIYGQLCQDDMPMVRRAAASNLGKFAATVEQNHLKTEIMSIFDDLTQDDQDSVRLLAVEGCAALGKLLEPQDCVAHILPVIVNFSQDKSWRVRYMVANQLYELCEAVGPEPTRADLVPAYVRLLRDNEAEVRIAAAGKVTKFCRILNPQLSVQHILPCVKELSSDSSQHVRSALASVIMGMAPVLGKDATIEQLVPIFLSLLKDEFPDVRLNIISKLDQVNQVIGIDLLSQSLLPAIVELAEDRHWRVRLAIIEYIPLLASQLGVGFFDDKLGALCMQWLEDKVFSIRDAAANNLKRLAEEFGPEWAMQHIIPQVLEKINNPHYLYRMTILQAISLLAPVMGAEITCQKLLPVVINSSKDRVPNIKFNVAKVLQSLVPILDQSVVEKTVKPCLVELSEDPDVDVRYYANQALQACDQMMVSS

SEQ ID NO: 26452 - protein, 471 aa, Zea mays subsp. mays
  peptide (1)..(471): Ceres Seq. ID no. 12344497
  misc_feature (118)..(156): Pfam Name: Pfam Description:  HEAT repeat
  misc_feature (1)..(471): NCBI GI NO: 5679684 NR Description: phosphatase 2A regulatory A subunit [Oryza sativa]
  misc_feature (1)..(471): NCBI GI NO: 15230896 NR Description: protein phosphatase 2A 65 kDa regulatory subunit
  misc_feature (1)..(471): NCBI GI NO: 1076389 NR Description: phospho protein phosphatase 2A 65K regulatory chainhomolog pDF1
  misc_feature (1)..(471): NCBI GI NO: 11094365 NR Description: Ser/Thr specific protein phosphatase 2A Aregulatory subunit alpha isoform
  misc_feature (1)..(471): NCBI GI NO: 11094367 NR Description: Ser/Thr specific protein phosphatase 2A Aregulatory subunit beta isoform
  misc_feature (1)..(471): NCBI GI NO: 22329534 NR Description: protein phosphatase 2A regulatory subunit,putative
  misc_feature (1)..(470): NCBI GI NO: 7447393 NR Description: phosphoprotein phosphatase (EC 3
  misc_feature (1)..(471): NCBI GI NO: 25313492 NR Description: probable protein phosphotase 2a 65K chain -Arabidopsis thaliana
  misc_feature (1)..(465): NCBI GI NO: 15222601 NR Description: phosphoprotein phosphatase 2A, regulatory subunitA
  misc_feature (1)..(465): NCBI GI NO: 1254996 NR Description: serine/threonine protein phosphatase type 2Aregulatory subunit A
MKETDIVDWFIPVVKRLAAGEWFTARVSSCGLFHIAYPSASDQLKTELRTIYGQLCQDDMPMVRRAAASNLGKFAATVEQNHLKTEIMSIFDDLTQDDQDSVRLLAVEGCAALGKLLEPQDCVAHILPVIVNFSQDKSWRVRYMVANQLYELCEAVGPEPTRADLVPAYVRLLRDNEAEVRIAAAGKVTKFCRILNPQLSVQHILPCVKELSSDSSQHVRSALASVIMGMAPVLGKDATIEQLVPIFLSLLKDEFPDVRLNIISKLDQVNQVIGIDLLSQSLLPAIVELAEDRHWRVRLAIIEYIPLLASQLGVGFFDDKLGALCMQWLEDKVFSIRDAAANNLKRLAEEFGPEWAMQHIIPQVLEKINNPHYLYRMTILQAISLLAPVMGAEITCQKLLPVVINSSKDRVPNIKFNVAKVLQSLVPILDQSVVEKTVKPCLVELSEDPDVDVRYYANQALQACDQMMVSS

SEQ ID NO: 26453 - protein, 412 aa, Zea mays subsp. mays
  peptide (1)..(412): Ceres Seq. ID no. 12344498
  misc_feature (59)..(97): Pfam Name: Pfam Description:  HEAT repeat
  misc_feature (1)..(412): NCBI GI NO: 5679684 NR Description: phosphatase 2A regulatory A subunit [Oryza sativa]
  misc_feature (1)..(412): NCBI GI NO: 15230896 NR Description: protein phosphatase 2A 65 kDa regulatory subunit
  misc_feature (1)..(412): NCBI GI NO: 1076389 NR Description: phospho protein phosphatase 2A 65K regulatory chainhomolog pDF1
  misc_feature (1)..(412): NCBI GI NO: 11094365 NR Description: Ser/Thr specific protein phosphatase 2A Aregulatory subunit alpha isoform
  misc_feature (1)..(412): NCBI GI NO: 11094367 NR Description: Ser/Thr specific protein phosphatase 2A Aregulatory subunit beta isoform
  misc_feature (1)..(412): NCBI GI NO: 22329534 NR Description: protein phosphatase 2A regulatory subunit,putative
  misc_feature (1)..(411): NCBI GI NO: 7447393 NR Description: phosphoprotein phosphatase (EC 3
  misc_feature (1)..(412): NCBI GI NO: 25313492 NR Description: probable protein phosphotase 2a 65K chain -Arabidopsis thaliana
  misc_feature (1)..(406): NCBI GI NO: 15222601 NR Description: phosphoprotein phosphatase 2A, regulatory subunitA
  misc_feature (1)..(406): NCBI GI NO: 1254996 NR Description: serine/threonine protein phosphatase type 2Aregulatory subunit A
MPMVRRAAASNLGKFAATVEQNHLKTEIMSIFDDLTQDDQDSVRLLAVEGCAALGKLLEPQDCVAHILPVIVNFSQDKSWRVRYMVANQLYELCEAVGPEPTRADLVPAYVRLLRDNEAEVRIAAAGKVTKFCRILNPQLSVQHILPCVKELSSDSSQHVRSALASVIMGMAPVLGKDATIEQLVPIFLSLLKDEFPDVRLNIISKLDQVNQVIGIDLLSQSLLPAIVELAEDRHWRVRLAIIEYIPLLASQLGVGFFDDKLGALCMQWLEDKVFSIRDAAANNLKRLAEEFGPEWAMQHIIPQVLEKINNPHYLYRMTILQAISLLAPVMGAEITCQKLLPVVINSSKDRVPNIKFNVAKVLQSLVPILDQSVVEKTVKPCLVELSEDPDVDVRYYANQALQACDQMMVSS

SEQ ID NO: 26454 - DNA, 1638 bp, Zea mays subsp. mays
  misc_feature (1)..(1638): Ceres Seq. ID no. 12344499
tgatttctctctgcctgcccagaatcccgccagttgccttccacttccgccagactccgcgttcctcctgagcagctgccgccggcccgagagtggagggggaggcaggcgcccaggcggccaatggggacggggagcgcgacggcggcgcaggccctggcgctcgccgccttgctcctcgcctgctctggcgtcgcagtcgtcacggcgcaggacatcgagcggatccaaggaagtgccggcgacgtgctggaggacgaccccgtcgggcggctcaaggtgtacgtgtacgagctgccccccaagtacaacaagaacgtggtggcgaaggactcgcggtgcctgagccacatgttcgccacggagatcttcatgcaccgcttcctgctggcgagcgcggtccggaccctgaacccggacgaggcggactggttctacaccccggtctacaccacgtgcgacctcacgccgtggggccatcccctcaccgtcaagtccccgcggatgatgaggagcgccatccagtacgtctccaagcgctggccctactggaacaggacggagggggccgaccatttcttcgtcactccacatgactttggagcgtgcttctacttccaggaagagaaggccatccagcgaggtgtcctcccggtgctgcgccgcgctacgctggtccagacgtttgggcagaagaaccatgtctgcctcagggaaggctccatcaccatcccgccatacgctccgcctcacaagataagagctcatatcgtcccgccagagacgcctcggtcgatcttcgtctacttccgcggcctgttctacgacaccgcgaacgaccccgagggtggttactatgcaaggggcgcccgtgcgtcggtgtgggagaacttcaagaacaacgcgctgttcgacatctcgacggagcacccgccgacgtactacgaggacatgcagcgcgccatcttctgcctgtgcccgctgggctgggcgccgtggagcccgcgcctggtggaggccgtggtgttcggctgcatccccgtcatcatcgccgacgacatcgtgctgcccttcgcggacgccatcccgtgggaggagatcgccgtgttcgtgcccgaggacgacgtcctgaggctggacaccatcctcacgtccatccccatggacgagatcctccgcaagcagaggctgctggccaacccgtccatgaagcaggcgatgctgttcccgcagcccgcggagccgagggacgccttccaccaggtcctcaacgggctggcgcgcaagctgccccacgccaaggacgtcttcctcaagcccggccagaaggtgctcaactggacagagggcaccccaggatgacctcaagccgtggtaggccgtggctgctgctcttttggaaacgacacaaccagatcgatgatggtgaggctgatgaatgaacgacacaacaaccattggttaaatgtaaagctcttaatcctcttgctcctccaacctttcttctttttgaggcaatgtgcatgtcttgcctgtatatattacatgacaatcagggtggccggccggggcaagacaagttgaggtgccaacatactaatagtattagtattatattctagcatgtatgttttgacg

SEQ ID NO: 26455 - protein, 412 aa, Zea mays subsp. mays
  peptide (1)..(412): Ceres Seq. ID no. 12344500
  misc_feature (53)..(357): Pfam Name: Pfam Description:  Exostosin family
  misc_feature (8)..(412): NCBI GI NO: 34907046 NR Description: contains EST D39982
  misc_feature (12)..(410): NCBI GI NO: 18642697 NR Description: Unknown protein [Oryza sativa]
  misc_feature (14)..(409): NCBI GI NO: 15223522 NR Description: unknown protein; protein id: At1g27440.1
  misc_feature (29)..(409): NCBI GI NO: 18424516 NR Description: putative protein; protein id: At5g61840
  misc_feature (29)..(409): NCBI GI NO: 21592991 NR Description: unknown [Arabidopsis thaliana]
  misc_feature (77)..(412): NCBI GI NO: 23821292 NR Description: pectin-glucuronyltransferase
  misc_feature (77)..(409): NCBI GI NO: 10176877 NR Description: gb|AAC80624
  misc_feature (51)..(389): NCBI GI NO: 15237173 NR Description: putative protein; protein id: At5g22940.1
  misc_feature (43)..(389): NCBI GI NO: 25407954 NR Description: hypothetical protein At2g28110
  misc_feature (50)..(389): NCBI GI NO: 9758008 NR Description: contains similarity to limonenecyclase~gene_id:MED24
MGTGSATAAQALALAALLLACSGVAVVTAQDIERIQGSAGDVLEDDPVGRLKVYVYELPPKYNKNVVAKDSRCLSHMFATEIFMHRFLLASAVRTLNPDEADWFYTPVYTTCDLTPWGHPLTVKSPRMMRSAIQYVSKRWPYWNRTEGADHFFVTPHDFGACFYFQEEKAIQRGVLPVLRRATLVQTFGQKNHVCLREGSITIPPYAPPHKIRAHIVPPETPRSIFVYFRGLFYDTANDPEGGYYARGARASVWENFKNNALFDISTEHPPTYYEDMQRAIFCLCPLGWAPWSPRLVEAVVFGCIPVIIADDIVLPFADAIPWEEIAVFVPEDDVLRLDTILTSIPMDEILRKQRLLANPSMKQAMLFPQPAEPRDAFHQVLNGLARKLPHAKDVFLKPGQKVLNWTEGTPG

SEQ ID NO: 26456 - protein, 336 aa, Zea mays subsp. mays
  peptide (1)..(336): Ceres Seq. ID no. 12344501
  misc_feature (1)..(281): Pfam Name: Pfam Description:  Exostosin family
  misc_feature (1)..(336): NCBI GI NO: 34907046 NR Description: contains EST D39982
  misc_feature (1)..(334): NCBI GI NO: 18642697 NR Description: Unknown protein [Oryza sativa]
  misc_feature (1)..(333): NCBI GI NO: 15223522 NR Description: unknown protein; protein id: At1g27440.1
  misc_feature (1)..(333): NCBI GI NO: 18424516 NR Description: putative protein; protein id: At5g61840
  misc_feature (1)..(333): NCBI GI NO: 21592991 NR Description: unknown [Arabidopsis thaliana]
  misc_feature (1)..(336): NCBI GI NO: 23821292 NR Description: pectin-glucuronyltransferase
  misc_feature (1)..(333): NCBI GI NO: 10176877 NR Description: gb|AAC80624
  misc_feature (1)..(313): NCBI GI NO: 15237173 NR Description: putative protein; protein id: At5g22940.1
  misc_feature (1)..(313): NCBI GI NO: 25407954 NR Description: hypothetical protein At2g28110
  misc_feature (1)..(313): NCBI GI NO: 9758008 NR Description: contains similarity to limonenecyclase~gene_id:MED24
MFATEIFMHRFLLASAVRTLNPDEADWFYTPVYTTCDLTPWGHPLTVKSPRMMRSAIQYVSKRWPYWNRTEGADHFFVTPHDFGACFYFQEEKAIQRGVLPVLRRATLVQTFGQKNHVCLREGSITIPPYAPPHKIRAHIVPPETPRSIFVYFRGLFYDTANDPEGGYYARGARASVWENFKNNALFDISTEHPPTYYEDMQRAIFCLCPLGWAPWSPRLVEAVVFGCIPVIIADDIVLPFADAIPWEEIAVFVPEDDVLRLDTILTSIPMDEILRKQRLLANPSMKQAMLFPQPAEPRDAFHQVLNGLARKLPHAKDVFLKPGQKVLNWTEGTPG

SEQ ID NO: 26457 - protein, 329 aa, Zea mays subsp. mays
  peptide (1)..(329): Ceres Seq. ID no. 12344502
  misc_feature (1)..(274): Pfam Name: Pfam Description:  Exostosin family
  misc_feature (1)..(329): NCBI GI NO: 34907046 NR Description: contains EST D39982
  misc_feature (1)..(327): NCBI GI NO: 18642697 NR Description: Unknown protein [Oryza sativa]
  misc_feature (1)..(326): NCBI GI NO: 15223522 NR Description: unknown protein; protein id: At1g27440.1
  misc_feature (1)..(326): NCBI GI NO: 18424516 NR Description: putative protein; protein id: At5g61840
  misc_feature (1)..(326): NCBI GI NO: 21592991 NR Description: unknown [Arabidopsis thaliana]
  misc_feature (1)..(329): NCBI GI NO: 23821292 NR Description: pectin-glucuronyltransferase
  misc_feature (1)..(326): NCBI GI NO: 10176877 NR Description: gb|AAC80624
  misc_feature (1)..(306): NCBI GI NO: 15237173 NR Description: putative protein; protein id: At5g22940.1
  misc_feature (1)..(306): NCBI GI NO: 25407954 NR Description: hypothetical protein At2g28110
  misc_feature (1)..(306): NCBI GI NO: 9758008 NR Description: contains similarity to limonenecyclase~gene_id:MED24
MHRFLLASAVRTLNPDEADWFYTPVYTTCDLTPWGHPLTVKSPRMMRSAIQYVSKRWPYWNRTEGADHFFVTPHDFGACFYFQEEKAIQRGVLPVLRRATLVQTFGQKNHVCLREGSITIPPYAPPHKIRAHIVPPETPRSIFVYFRGLFYDTANDPEGGYYARGARASVWENFKNNALFDISTEHPPTYYEDMQRAIFCLCPLGWAPWSPRLVEAVVFGCIPVIIADDIVLPFADAIPWEEIAVFVPEDDVLRLDTILTSIPMDEILRKQRLLANPSMKQAMLFPQPAEPRDAFHQVLNGLARKLPHAKDVFLKPGQKVLNWTEGTPG

SEQ ID NO: 26458 - DNA, 1417 bp, Zea mays subsp. mays
  misc_feature (1)..(1417): Ceres Seq. ID no. 12352296
accgcgcgtgtaggcattctacgagcagctcggtcttgtcgttggagagatgaagaagaacaccatgagggatttcttgggtttcttgttcggagtagctgccgcggcggcctgcttcggcctgctcctgctgcatgttccatgcccccgtggcctcttgcccgcacagcaaggcctcatcatcttgggtaggagtactactaacggaacaaactctgatcccactcccagcaccaagaaacctggcatcgtatgtgcacagatttcactccaaaaatgattccgatcctatgttaccatacgcgcgttgatctccaattggtcaccctgcactggttctggtttcatatattgcatattcactggtttaatcagtcaccttcttctattttctcttaataaacaggcccctgctccagctccaggtgacgacaagctggaggcgctgctgaggcgagcgtccatggccgaccttgacaagaccgtcatactaaccttcgcgagccaagcgtggacggctccgggctcactccaggacctcttgctccagagcttccgcctgggcgtggggacggagccccttctcaagcacttggtcatcgtcgccgacggcgccaaggcgtacgaacagtgccagctcgtgcacccgctctgctaccacctcgaagccggcggcgtcgactacgccgcacagcaatcgtacatggccaagggctacctcgagatcgtgtggcgcaagttcctgtcccaggcccgggtcctcaacctcggctacagcttcgtcttcaccgacatggacatcatctggctgcggaacccgctgctgcgcatccccatcggcgccgacctggccatgtcgtgcgacaagtactacggcgacaacccctacgacctcgacaagctggccaacaccgggttcatgtacgtgaaggcgagccccaggatggtggccttctacgagagctggtacaaggcgcggctgtcctaccggtacacgcacgagcagtatgtgttccagcaggtgaaggacaagctgccggcgcagcacggcatacgggtgcagttcgtggacacggcgtacttcaccggcttctgtcagctacgcaaggattttaacaaggtatgcacggtgcatgcgaactgcctcgtcgggctcaagtccaagcaggagaagctcactcaagtcttagacgagtggaaggagttcaagaagaaggctgctttgctaggcagcaataccactactgccctaactcactgaacaattaacatcttcactgggggcggatctatctaggaaaagtgtagttgtttaaagccattctacgtttttaaacatatatagatgaataattcaaaatacagcataagatgcaatttttcaatacaaataaactaatagttcttctgtggcgct

SEQ ID NO: 26459 - protein, 265 aa, Zea mays subsp. mays
  peptide (1)..(265): Ceres Seq. ID no. 12352297
  misc_feature (1)..(248): NCBI GI NO: 34897442 NR Description: putative regulatory protein
  misc_feature (1)..(260): NCBI GI NO: 15235236 NR Description: hypothetical protein common family
  misc_feature (1)..(253): NCBI GI NO: 34904674 NR Description: P0446G09.1
  misc_feature (1)..(248): NCBI GI NO: 21536907 NR Description: regulatory protein [Arabidopsis thaliana]
  misc_feature (1)..(264): NCBI GI NO: 18395292 NR Description: unknown protein; protein id: At2g02060.1
  misc_feature (1)..(250): NCBI GI NO: 34897440 NR Description: putative regulatory protein
  misc_feature (1)..(248): NCBI GI NO: 38344278 NR Description: OSJNBa0013K16.10
  misc_feature (1)..(250): NCBI GI NO: 19386737 NR Description: P0678F11.26
  misc_feature (5)..(252): NCBI GI NO: 19386738 NR Description: P0678F11.28
  misc_feature (1)..(248): NCBI GI NO: 15235236 NR Description: hypothetical protein common family
MADLDKTVILTFASQAWTAPGSLQDLLLQSFRLGVGTEPLLKHLVIVADGAKAYEQCQLVHPLCYHLEAGGVDYAAQQSYMAKGYLEIVWRKFLSQARVLNLGYSFVFTDMDIIWLRNPLLRIPIGADLAMSCDKYYGDNPYDLDKLANTGFMYVKASPRMVAFYESWYKARLSYRYTHEQYVFQQVKDKLPAQHGIRVQFVDTAYFTGFCQLRKDFNKVCTVHANCLVGLKSKQEKLTQVLDEWKEFKKKAALLGSNTTTALTH

SEQ ID NO: 26460 - protein, 185 aa, Zea mays subsp. mays
  peptide (1)..(185): Ceres Seq. ID no. 12352298
  misc_feature (1)..(168): NCBI GI NO: 34897442 NR Description: putative regulatory protein
  misc_feature (1)..(180): NCBI GI NO: 15235236 NR Description: hypothetical protein common family
  misc_feature (1)..(173): NCBI GI NO: 34904674 NR Description: P0446G09.1
  misc_feature (1)..(168): NCBI GI NO: 21536907 NR Description: regulatory protein [Arabidopsis thaliana]
  misc_feature (1)..(184): NCBI GI NO: 18395292 NR Description: unknown protein; protein id: At2g02060.1
  misc_feature (1)..(170): NCBI GI NO: 34897440 NR Description: putative regulatory protein
  misc_feature (1)..(168): NCBI GI NO: 38344278 NR Description: OSJNBa0013K16.10
  misc_feature (1)..(170): NCBI GI NO: 19386737 NR Description: P0678F11.26
  misc_feature (1)..(172): NCBI GI NO: 19386738 NR Description: P0678F11.28
  misc_feature (1)..(168): NCBI GI NO: 15235236 NR Description: hypothetical protein common family
MAKGYLEIVWRKFLSQARVLNLGYSFVFTDMDIIWLRNPLLRIPIGADLAMSCDKYYGDNPYDLDKLANTGFMYVKASPRMVAFYESWYKARLSYRYTHEQYVFQQVKDKLPAQHGIRVQFVDTAYFTGFCQLRKDFNKVCTVHANCLVGLKSKQEKLTQVLDEWKEFKKKAALLGSNTTTALTH

SEQ ID NO: 26461 - protein, 155 aa, Zea mays subsp. mays
  peptide (1)..(155): Ceres Seq. ID no. 12352299
  misc_feature (1)..(138): NCBI GI NO: 34897442 NR Description: putative regulatory protein
  misc_feature (1)..(150): NCBI GI NO: 15235236 NR Description: hypothetical protein common family
  misc_feature (1)..(143): NCBI GI NO: 34904674 NR Description: P0446G09.1
  misc_feature (1)..(138): NCBI GI NO: 21536907 NR Description: regulatory protein [Arabidopsis thaliana]
  misc_feature (1)..(154): NCBI GI NO: 18395292 NR Description: unknown protein; protein id: At2g02060.1
  misc_feature (1)..(140): NCBI GI NO: 34897440 NR Description: putative regulatory protein
  misc_feature (1)..(138): NCBI GI NO: 38344278 NR Description: OSJNBa0013K16.10
  misc_feature (1)..(140): NCBI GI NO: 19386737 NR Description: P0678F11.26
  misc_feature (1)..(142): NCBI GI NO: 19386738 NR Description: P0678F11.28
  misc_feature (1)..(138): NCBI GI NO: 15235236 NR Description: hypothetical protein common family
MDIIWLRNPLLRIPIGADLAMSCDKYYGDNPYDLDKLANTGFMYVKASPRMVAFYESWYKARLSYRYTHEQYVFQQVKDKLPAQHGIRVQFVDTAYFTGFCQLRKDFNKVCTVHANCLVGLKSKQEKLTQVLDEWKEFKKKAALLGSNTTTALTH

SEQ ID NO: 26462 - DNA, 1500 bp, Zea mays subsp. mays
  misc_feature (1)..(1500): Ceres Seq. ID no. 12405643
taagagagaaaaggaagagagatggagatgacgatgccatggatgtttcagaaaatggccatggcgattcttcattctgcaagaagccgaaggaaggtgatgttcatgtctcttccagttcaactgaagtggtaggaaccattccagagatgaatggaggcgatcatcatatacctggaagctccttttcatgtctagtgaagatctatgacatgcctgatagtcaagtgaaattaaatgatgttattgagtttattggcgtatatacatttgacccagaacttgctgctcctagtgacaacccagatgatataatgttagacctcatcgaagatgtaacagttcagttgcctccgagcaaggtgccacgtcttcactgtttggtatggagaaaattatcattccatgattttatttcaaggcctgttgttgagccttcacccagcctgttaagaggcattcggcaatctttgctctcacacctcacccttgtattaggcaatgacgagcttgcagcccagtgcttgctgttgcatcttctatccagacttcgtaatagggtggatgtggtcaccgttggcagactctccttgaatttcactggcttcaacagggaaagtgcttccatatttgggaatcagctgtattctttgatccagaaattggtgccgtattcacaagccatacctctgtcaattgagtatctcaacacagctacacttcaacctagaaaggacaacaagtcaggaaggttggtcacaggagttctgcagctacctcaaggcactcatctgatctttgatgagactcttctgcagacaggatcattgacatccaaaggtgtggagaataccatgctgctcaagaacctgatggagtcgcagaaggttgactacgattttgagtactacaagctggaaatggcagctgatgtgcagctactcactctctctgaggggaaatcaaacatccttccttcagatttggtagtgcctttccggccatcctctgttcccacaattaatgcaggtgctgaggaaactgagagctggaggtggtttttgaccacagtaaggtctcttcctcagtccactgaacctgaaacttaccagatgattcaggatgaaatggtcagtgccatgcgtgatgataggagcttgggttgttctgaacttagcagatggctaacaatggcacaaataatggcctccagctttggcgagaagagtctttctttggagcactggcagatggtgaaggagcttgagaggcttagaaagcagaggatgcaatgagatgacttaccattagcatgtgtttttgcactctaattgtttatgttggtatgctgttatgtgtatagtactagacgtttgaatcaagacatggatccaagtcatttctgtaacaactgacaacttctatgatcgtatgcatgtgtatctgctgcgcattttctttgctcaaatttgagatttactctgggagctatggaatgcc

SEQ ID NO: 26463 - protein, 430 aa, Zea mays subsp. mays
  peptide (1)..(430): Ceres Seq. ID no. 12405644
  misc_feature (68)..(430): NCBI GI NO: 34896132 NR Description: P0701D05.20
  misc_feature (146)..(430): NCBI GI NO: 15226711 NR Description: hypothetical protein; protein id: At2g40550.1
  misc_feature (1)..(123): NCBI GI NO: 15226711 NR Description: hypothetical protein; protein id: At2g40550.1
  misc_feature (3)..(430): NCBI GI NO: 27882367 NR Description: Similar to hypothetical protein FLJ13081
  misc_feature (21)..(430): NCBI GI NO: 13278834 NR Description: Unknown (protein for MGC:2809) [Homo sapiens]
  misc_feature (57)..(430): NCBI GI NO: 34859388 NR Description: similar to cDNA sequence BC025641
  misc_feature (2)..(430): NCBI GI NO: 18129620 NR Description: CG3430-PA [Drosophila melanogaster]
  misc_feature (107)..(430): NCBI GI NO: 22122389 NR Description: cDNA sequence BC025641
  misc_feature (107)..(430): NCBI GI NO: 13376243 NR Description: hypothetical protein FLJ13081 [Homo sapiens]
  misc_feature (1)..(430): NCBI GI NO: 27769126 NR Description: Similar to hypothetical protein FLJ13081
REKRKRDGDDDAMDVSENGHGDSSFCKKPKEGDVHVSSSSTEVVGTIPEMNGGDHHIPGSSFSCLVKIYDMPDSQVKLNDVIEFIGVYTFDPELAAPSDNPDDIMLDLIEDVTVQLPPSKVPRLHCLVWRKLSFHDFISRPVVEPSPSLLRGIRQSLLSHLTLVLGNDELAAQCLLLHLLSRLRNRVDVVTVGRLSLNFTGFNRESASIFGNQLYSLIQKLVPYSQAIPLSIEYLNTATLQPRKDNKSGRLVTGVLQLPQGTHLIFDETLLQTGSLTSKGVENTMLLKNLMESQKVDYDFEYYKLEMAADVQLLTLSEGKSNILPSDLVVPFRPSSVPTINAGAEETESWRWFLTTVRSLPQSTEPETYQMIQDEMVSAMRDDRSLGCSELSRWLTMAQIMASSFGEKSLSLEHWQMVKELERLRKQRMQ

SEQ ID NO: 26464 - protein, 418 aa, Zea mays subsp. mays
  peptide (1)..(418): Ceres Seq. ID no. 12405645
  misc_feature (56)..(418): NCBI GI NO: 34896132 NR Description: P0701D05.20
  misc_feature (134)..(418): NCBI GI NO: 15226711 NR Description: hypothetical protein; protein id: At2g40550.1
  misc_feature (1)..(111): NCBI GI NO: 15226711 NR Description: hypothetical protein; protein id: At2g40550.1
  misc_feature (1)..(418): NCBI GI NO: 27882367 NR Description: Similar to hypothetical protein FLJ13081
  misc_feature (9)..(418): NCBI GI NO: 13278834 NR Description: Unknown (protein for MGC:2809) [Homo sapiens]
  misc_feature (45)..(418): NCBI GI NO: 34859388 NR Description: similar to cDNA sequence BC025641
  misc_feature (1)..(418): NCBI GI NO: 18129620 NR Description: CG3430-PA [Drosophila melanogaster]
  misc_feature (95)..(418): NCBI GI NO: 22122389 NR Description: cDNA sequence BC025641
  misc_feature (95)..(418): NCBI GI NO: 13376243 NR Description: hypothetical protein FLJ13081 [Homo sapiens]
  misc_feature (1)..(418): NCBI GI NO: 27769126 NR Description: Similar to hypothetical protein FLJ13081
MDVSENGHGDSSFCKKPKEGDVHVSSSSTEVVGTIPEMNGGDHHIPGSSFSCLVKIYDMPDSQVKLNDVIEFIGVYTFDPELAAPSDNPDDIMLDLIEDVTVQLPPSKVPRLHCLVWRKLSFHDFISRPVVEPSPSLLRGIRQSLLSHLTLVLGNDELAAQCLLLHLLSRLRNRVDVVTVGRLSLNFTGFNRESASIFGNQLYSLIQKLVPYSQAIPLSIEYLNTATLQPRKDNKSGRLVTGVLQLPQGTHLIFDETLLQTGSLTSKGVENTMLLKNLMESQKVDYDFEYYKLEMAADVQLLTLSEGKSNILPSDLVVPFRPSSVPTINAGAEETESWRWFLTTVRSLPQSTEPETYQMIQDEMVSAMRDDRSLGCSELSRWLTMAQIMASSFGEKSLSLEHWQMVKELERLRKQRMQ

SEQ ID NO: 26465 - protein, 381 aa, Zea mays subsp. mays
  peptide (1)..(381): Ceres Seq. ID no. 12405646
  misc_feature (19)..(381): NCBI GI NO: 34896132 NR Description: P0701D05.20
  misc_feature (97)..(381): NCBI GI NO: 15226711 NR Description: hypothetical protein; protein id: At2g40550.1
  misc_feature (1)..(74): NCBI GI NO: 15226711 NR Description: hypothetical protein; protein id: At2g40550.1
  misc_feature (1)..(381): NCBI GI NO: 27882367 NR Description: Similar to hypothetical protein FLJ13081
  misc_feature (1)..(381): NCBI GI NO: 13278834 NR Description: Unknown (protein for MGC:2809) [Homo sapiens]
  misc_feature (8)..(381): NCBI GI NO: 34859388 NR Description: similar to cDNA sequence BC025641
  misc_feature (1)..(381): NCBI GI NO: 18129620 NR Description: CG3430-PA [Drosophila melanogaster]
  misc_feature (58)..(381): NCBI GI NO: 22122389 NR Description: cDNA sequence BC025641
  misc_feature (58)..(381): NCBI GI NO: 13376243 NR Description: hypothetical protein FLJ13081 [Homo sapiens]
  misc_feature (1)..(381): NCBI GI NO: 27769126 NR Description: Similar to hypothetical protein FLJ13081
MNGGDHHIPGSSFSCLVKIYDMPDSQVKLNDVIEFIGVYTFDPELAAPSDNPDDIMLDLIEDVTVQLPPSKVPRLHCLVWRKLSFHDFISRPVVEPSPSLLRGIRQSLLSHLTLVLGNDELAAQCLLLHLLSRLRNRVDVVTVGRLSLNFTGFNRESASIFGNQLYSLIQKLVPYSQAIPLSIEYLNTATLQPRKDNKSGRLVTGVLQLPQGTHLIFDETLLQTGSLTSKGVENTMLLKNLMESQKVDYDFEYYKLEMAADVQLLTLSEGKSNILPSDLVVPFRPSSVPTINAGAEETESWRWFLTTVRSLPQSTEPETYQMIQDEMVSAMRDDRSLGCSELSRWLTMAQIMASSFGEKSLSLEHWQMVKELERLRKQRMQ

SEQ ID NO: 26466 - DNA, 908 bp, Zea mays subsp. mays
  misc_feature (1)..(908): Ceres Seq. ID no. 12366814
gtgtggatgattccagtcctcctcctgttctttgtttcccgtcccatcgtgtgtgagcgcgtctgctggtctgccaagaggaggaaaggaaggagagagatggcttgccctgcgcagtccatgctctccgccagcggctgcatcttcctgaggagcaagcctcaggcggcatcccaagtgcgagggggcatcatcggcggtggccgcagcagcaggccgttcctgctcacctgcaacgcttcctcttctccgtccccttcctcgccggcgccggcgcaggaagaccccgactgcaacgaggaggagtgcgccccggagaaggaggtcgggagcctgagcgctgagtggctggccgaggagaggacccaggtcgtcggcactttccctcccaagaagagagggtggaaccggcttagtggagaaggacaccgccggccagaccaacatctactccgtcgagccgatggtgtacgtggccgagagcgccatcagctccggcacggcgggtacgtcggcggagggcgccgagaacacggccgccatcgccgcggggctcgtcctcatcaccgtagccgcggcctcgtccatcctcatccaggtgaacaagagccaggtgccgcaggtgccggaagccgcctacagcggcccgccgctcagctactacgtcaccaagttccagccggcggtggctgcgccggcgcagaccctcgaggcccccgcccccgccgaggcacaagacggcgccgccgccaccgtcgaggctccggaggtaccggcaccgcagctgtcgtcgtgagctgattcggttttgtggcatgcagctttatactacggatgagccagtagcgcatgatgatggaagatatgtatccatgatacaagcatttcggaattgtattaaagtttgt

SEQ ID NO: 26467 - protein, 266 aa, Zea mays subsp. mays
  peptide (1)..(266): Ceres Seq. ID no. 12366815
  misc_feature (92)..(135): NCBI GI NO: 18415378 NR Description: expressed protein; protein id: At5g07020
  misc_feature (92)..(135): NCBI GI NO: 21553857 NR Description: unknown [Arabidopsis thaliana]
VWMIPVLLLFFVSRPIVCERVCWSAKRRKGRREMACPAQSMLSASGCIFLRSKPQAASQVRGGIIGGGRSSRPFLLTCNASSSPSPSSPAPAQEDPDCNEEECAPEKEVGSLSAEWLAEERTQVVGTFPPKKRGWNRLSGEGHRRPDQHLLRRADGVRGRERHQLRHGGYVGGGRREHGRHRRGARPHHRSRGLVHPHPGEQEPGAAGAGSRLQRPAAQLLRHQVPAGGGCAGADPRGPRPRRGTRRRRRHRRGSGGTGTAAVVVS

SEQ ID NO: 26468 - protein, 264 aa, Zea mays subsp. mays
  peptide (1)..(264): Ceres Seq. ID no. 12366816
  misc_feature (90)..(133): NCBI GI NO: 18415378 NR Description: expressed protein; protein id: At5g07020
  misc_feature (90)..(133): NCBI GI NO: 21553857 NR Description: unknown [Arabidopsis thaliana]
MIPVLLLFFVSRPIVCERVCWSAKRRKGRREMACPAQSMLSASGCIFLRSKPQAASQVRGGIIGGGRSSRPFLLTCNASSSPSPSSPAPAQEDPDCNEEECAPEKEVGSLSAEWLAEERTQVVGTFPPKKRGWNRLSGEGHRRPDQHLLRRADGVRGRERHQLRHGGYVGGGRREHGRHRRGARPHHRSRGLVHPHPGEQEPGAAGAGSRLQRPAAQLLRHQVPAGGGCAGADPRGPRPRRGTRRRRRHRRGSGGTGTAAVVVS

SEQ ID NO: 26469 - protein, 233 aa, Zea mays subsp. mays
  peptide (1)..(233): Ceres Seq. ID no. 12366817
  misc_feature (59)..(102): NCBI GI NO: 18415378 NR Description: expressed protein; protein id: At5g07020
  misc_feature (59)..(102): NCBI GI NO: 21553857 NR Description: unknown [Arabidopsis thaliana]
MACPAQSMLSASGCIFLRSKPQAASQVRGGIIGGGRSSRPFLLTCNASSSPSPSSPAPAQEDPDCNEEECAPEKEVGSLSAEWLAEERTQVVGTFPPKKRGWNRLSGEGHRRPDQHLLRRADGVRGRERHQLRHGGYVGGGRREHGRHRRGARPHHRSRGLVHPHPGEQEPGAAGAGSRLQRPAAQLLRHQVPAGGGCAGADPRGPRPRRGTRRRRRHRRGSGGTGTAAVVVS

SEQ ID NO: 26470 - DNA, 1488 bp, Zea mays subsp. mays
  misc_feature (1)..(1488): Ceres Seq. ID no. 12365496
agcataccgtctgtacttccagcagcagcatcatcagccgccgccgccgccgccgcgcttccactttgtcttgagccctgccctcaacgacgactcgcgggccggcagcacagcacgtatagctatggaaggaaacggtggcgcgggcggcggtagcggaagcgcggcaccgccctgggatctcgccatgcactggccacccgccgtgtcgtcctacccgccgcagcccttggagctgcagcagcagggagcttacctgcctcaagctggggaagcggcccgcctgctgctgggcaggggcgccggggccgggcaaccaagcggcgcaggtccacggcaatggcggcgctggtggcgcagctgctgagggtaagaggaaggagaaggcgcctgccgcggcggccgtgccgaggtgccaggtggaggggtgccacctgtcgctggcggacgccaaggagtaccaccggcggcacaaggtgtgcgaggcgcactccaaggcgcctcgggtcgtcgtcctcggcgccgagcagcgcttctgccagcagtgcagccggttccacgcgatctcggagttcgacgacgcgaagcggagctgccggcggcgtctggccgggcacaacgagcggcggcggaagagcaacgccagcgaggccatggccagaggcgttgcgcacccacacggggtgacggctttcggcccacggcggcttcctgccctcgcgcggcctccccgcgccgcccgcagggtccccggcggcggctggtgctctctctcttctgtcatcggccagaggcagcgtggcgggcgccagcgggccctggctggtcacggcggcgcgggaggacatccccgcgcgctccagcgcggcgctcgacgaccttatcgccgagaaccgcgccgccgcgctcctcgcgcggcagtacttcgtctccgaccgctcgccggcgcccagacgggatttcgtcgcctcttcgacggcgggttgcgccctccagcagcagcagcacccgcccgatcacacagccggctggcacccgcacccccacccctacagtggcgttggcgttggcgttggcagcggtggtggccggtaccagtaccaccacgtggcgccgccgagcgcgtggcacacgacgaccctggatcttatgcagccgacagcaagcaccgccgccgctccctccaccgccggcgcagcgttgtggccagcagtgtcgccggagagggcgggcgcgaggtcgtctcgctctcgcagcaagaccaaggatggcgacgcgtcgggatgtagcggcttggacgcgtgggcgcccactggtggagctcgtgtgctgtgatcgccatgcaatcgacgagcgtgacggccattatatatgttgcgcctgtactggtcgggtgttgcgtggtgcctgatctgtcccaaaagggatgtgtaatccaatgtacttcgggatgtgcttttttttttagtaatgaatcgtgtttttctc

SEQ ID NO: 26471 - protein, 211 aa, Zea mays subsp. mays
  peptide (1)..(211): Ceres Seq. ID no. 12365497
  misc_feature (1)..(29): NCBI GI NO: 21742343 NR Description: OSJNBb0034G17.20
  misc_feature (1)..(60): NCBI GI NO: 28411864 NR Description: putative SBP-domain protein 5
  misc_feature (1)..(16): NCBI GI NO: 25458128 NR Description: squamosa promoter binding protein-homolog 3
  misc_feature (1)..(128): NCBI GI NO: 5931786 NR Description: SBP-domain protein 5 [Zea mays]
  misc_feature (1)..(84): NCBI GI NO: 5931780 NR Description: SBP-domain protein 2 [Zea mays]
  misc_feature (1)..(47): NCBI GI NO: 15230904 NR Description: squamosa promoter-binding protein homolog
  misc_feature (1)..(12): NCBI GI NO: 15218091 NR Description: putative SPL1-related protein
MARGVAHPHGVTAFGPRRLPALARPPRAARRVPGGGWCSLSSVIGQRQRGGRQRALAGHGGAGGHPRALQRGARRPYRREPRRRAPRAAVLRLRPLAGAQTGFRRLFDGGLRPPAAAAPARSHSRLAPAPPPLQWRWRWRWQRWWPVPVPPRGAAERVAHDDPGSYAADSKHRRRSLHRRRSVVASSVAGEGGREVVSLSQQDQGWRRVGM

SEQ ID NO: 26472 - protein, 121 aa, Zea mays subsp. mays
  peptide (1)..(121): Ceres Seq. ID no. 12365498
AYRLYFQQQHHQPPPPPPRFHFVLSPALNDDSRAGSTARIAMEGNGGAGGGSGSAAPPWDLAMHWPPAVSSYPPQPLELQQQGAYLPQAGEAARLLLGRGAGAGQPSGAGPRQWRRWWRSC

SEQ ID NO: 26473 - protein, 115 aa, Zea mays subsp. mays
  peptide (1)..(115): Ceres Seq. ID no. 12365499
MAALVAQLLRVRGRRRRLPRRPCRGARWRGATCRWRTPRSTTGGTRCARRTPRRLGSSSSAPSSASASSAAGSTRSRSSTTRSGAAGGVWPGTTSGGGRATPARPWPEALRTHTG

SEQ ID NO: 26474 - DNA, 1667 bp, Zea mays subsp. mays
  misc_feature (1)..(1667): Ceres Seq. ID no. 12409847
  misc_feature (104)..(104): n is a, c, t, g, unknown, or other
  misc_feature (436)..(436): n is a, c, t, g, unknown, or other
  misc_feature (429)..(429): n is a, c, t, g, unknown, or other
  misc_feature (406)..(406): n is a, c, t, g, unknown, or other
  misc_feature (456)..(456): n is a, c, t, g, unknown, or other
  misc_feature (1011)..(1011): n is a, c, t, g, unknown, or other
  misc_feature (409)..(409): n is a, c, t, g, unknown, or other
  misc_feature (405)..(405): n is a, c, t, g, unknown, or other
atccctgactattttcctgccttctgtctccattttcctagtgctatactaatttctgaagacctcctggaggaattctctgcttcatttctcgagcgggagancggccgccttcagtcaaggaaaatcgctgaagacagccgcagattcccagattcgtagttccgcttctgcttcggcgcacctgttcggtgtggaatgatggaggtgagcccgtctccggagcaaggagtgatggcgggaagggagccgttcgggctgccgaagaccccggcaacgccgccgtcctccgggggcacgcagggcctgcgcatggcgtacacgacggacggcaccgccatcttcaccccggtgagctccgtgccgcccgcgacggcgacataccagcccgtgggcggcagcgcnngtnctgcttcaagcttggctggngtaggangcaatggtggcgcgcccgtncactcgggtggcgcgggtgagccggggaccaagaaaaagcgtggccggccaagaaagtacggccccgacggctccatgtcgctggcattggtgcccgcatccatggctggggagccggcgccggcggctcttggagcttccggtcctttctcgcctaacggcccgaaggcgccgaacactgcgccgtcagcgtcgccggacggcgcgaagaagcggggccggccgaagggctccaccaacaagaagcacgtggctgcgctcgggccagcgggggcaggttttacgcctcatcttatttttgtaaaagccggagaggacgtatcggcaaagatcatgtcgttctcgcagcacgggacacgcgcggtctgcatcctttcagcaaacggcgccatatcaaatgtgacgcttcggcaatctgccacttcgggtggaacggtgacatacgagggtcgtttcgagatactgtctctgtccgggtcgtttcttctgtcagagaacggtggccagcgcagtcgaactggtgggctcagcgtttcgctagcaggccccgacggncgtgtcctgggtggctgtgttgccggactcctgacggctgcttcaccggtacagatcgtagtggggagcttcgacgccggtggaaagaagcagccgaagcagcagcagcagcagcagcttgctccgtcaccggcgccactaaatctcgcgccgacgggcgtggcggcagggccgagcagcccgccgtccagaggcacattgagcctaagcgagtcgtccagtggcgccccgccgagcccgccgcacgcaggggccagcggtggccatgggcagcagcagcagcagccacagccaggtggcttctccggtctgttctggaaatgacgagacccccggacaccgtctgaccgtggtagaactggcagaaaggactaaaggcgcgtgaggcactcgtcgaggccgaagctcactcggtgagaagcagcggtagcttgtaggtggtgtcaagactgtgtagctcttgctgttgctgtaggtgtaaatcgtgcgttgtgattgtgaggtggttgcttattgtctgtcgtctggaatggatgccgtgtactgaacctgtgcccccaatgcagcatgtcggaagttcttggtttcttctgcttgggtgcatcggcttgccgcacgatatgcatccatgcccataataatacgtgtatagattc

SEQ ID NO: 26475 - protein, 378 aa, Zea mays subsp. mays
  peptide (1)..(378): Ceres Seq. ID no. 12409848
  misc_feature (3)..(178): Pfam Name: Pfam Description:  Glycoprotein GG/GX
  misc_feature (137)..(367): NCBI GI NO: 2598227 NR Description: AT-hook protein 1 [Arabidopsis thaliana]
  misc_feature (137)..(367): NCBI GI NO: 18403332 NR Description: AT-hook DNA-binding protein
  misc_feature (44)..(147): NCBI GI NO: 2598227 NR Description: AT-hook protein 1 [Arabidopsis thaliana]
  misc_feature (44)..(147): NCBI GI NO: 18403332 NR Description: AT-hook DNA-binding protein
  misc_feature (137)..(367): NCBI GI NO: 14326504 NR Description: At2g33620/F4P9.39 [Arabidopsis thaliana]
  misc_feature (44)..(147): NCBI GI NO: 14326504 NR Description: At2g33620/F4P9.39 [Arabidopsis thaliana]
  misc_feature (137)..(367): NCBI GI NO: 25408293 NR Description: AT-hook DNA-binding protein (AHP1)
  misc_feature (54)..(147): NCBI GI NO: 25408293 NR Description: AT-hook DNA-binding protein (AHP1)
  misc_feature (18)..(368): NCBI GI NO: 37537056 NR Description: putative AT-Hook DNA-binding protein
  misc_feature (13)..(377): NCBI GI NO: 38346715 NR Description: OSJNBa0086O06.13
  misc_feature (69)..(69): Xaa is any aa, unknown or other
  misc_feature (70)..(70): Xaa is any aa, unknown or other
  misc_feature (71)..(71): Xaa is any aa, unknown or other
  misc_feature (77)..(77): Xaa is any aa, unknown or other
  misc_feature (80)..(80): Xaa is any aa, unknown or other
  misc_feature (86)..(86): Xaa is any aa, unknown or other
  misc_feature (271)..(271): Xaa is any aa, unknown or other
MMEVSPSPEQGVMAGREPFGLPKTPATPPSSGGTQGLRMAYTTDGTAIFTPVSSVPPATATYQPVGGSXXXASSLAXVGXNGGAPXHSGGAGEPGTKKKRGRPRKYGPDGSMSLALVPASMAGEPAPAALGASGPFSPNGPKAPNTAPSASPDGAKKRGRPKGSTNKKHVAALGPAGAGFTPHLIFVKAGEDVSAKIMSFSQHGTRAVCILSANGAISNVTLRQSATSGGTVTYEGRFEILSLSGSFLLSENGGQRSRTGGLSVSLAGPDXRVLGGCVAGLLTAASPVQIVVGSFDAGGKKQPKQQQQQQLAPSPAPLNLAPTGVAAGPSSPPSRGTLSLSESSSGAPPSPPHAGASGGHGQQQQQPQPGGFSGLFWK

SEQ ID NO: 26476 - protein, 377 aa, Zea mays subsp. mays
  peptide (1)..(377): Ceres Seq. ID no. 12409849
  misc_feature (2)..(177): Pfam Name: Pfam Description:  Glycoprotein GG/GX
  misc_feature (136)..(366): NCBI GI NO: 2598227 NR Description: AT-hook protein 1 [Arabidopsis thaliana]
  misc_feature (136)..(366): NCBI GI NO: 18403332 NR Description: AT-hook DNA-binding protein
  misc_feature (43)..(146): NCBI GI NO: 2598227 NR Description: AT-hook protein 1 [Arabidopsis thaliana]
  misc_feature (43)..(146): NCBI GI NO: 18403332 NR Description: AT-hook DNA-binding protein
  misc_feature (136)..(366): NCBI GI NO: 14326504 NR Description: At2g33620/F4P9.39 [Arabidopsis thaliana]
  misc_feature (43)..(146): NCBI GI NO: 14326504 NR Description: At2g33620/F4P9.39 [Arabidopsis thaliana]
  misc_feature (136)..(366): NCBI GI NO: 25408293 NR Description: AT-hook DNA-binding protein (AHP1)
  misc_feature (53)..(146): NCBI GI NO: 25408293 NR Description: AT-hook DNA-binding protein (AHP1)
  misc_feature (17)..(367): NCBI GI NO: 37537056 NR Description: putative AT-Hook DNA-binding protein
  misc_feature (12)..(376): NCBI GI NO: 38346715 NR Description: OSJNBa0086O06.13
  misc_feature (68)..(68): Xaa is any aa, unknown or other
  misc_feature (69)..(69): Xaa is any aa, unknown or other
  misc_feature (70)..(70): Xaa is any aa, unknown or other
  misc_feature (76)..(76): Xaa is any aa, unknown or other
  misc_feature (79)..(79): Xaa is any aa, unknown or other
  misc_feature (85)..(85): Xaa is any aa, unknown or other
  misc_feature (270)..(270): Xaa is any aa, unknown or other
MEVSPSPEQGVMAGREPFGLPKTPATPPSSGGTQGLRMAYTTDGTAIFTPVSSVPPATATYQPVGGSXXXASSLAXVGXNGGAPXHSGGAGEPGTKKKRGRPRKYGPDGSMSLALVPASMAGEPAPAALGASGPFSPNGPKAPNTAPSASPDGAKKRGRPKGSTNKKHVAALGPAGAGFTPHLIFVKAGEDVSAKIMSFSQHGTRAVCILSANGAISNVTLRQSATSGGTVTYEGRFEILSLSGSFLLSENGGQRSRTGGLSVSLAGPDXRVLGGCVAGLLTAASPVQIVVGSFDAGGKKQPKQQQQQQLAPSPAPLNLAPTGVAAGPSSPPSRGTLSLSESSSGAPPSPPHAGASGGHGQQQQQPQPGGFSGLFWK

SEQ ID NO: 26477 - protein, 366 aa, Zea mays subsp. mays
  peptide (1)..(366): Ceres Seq. ID no. 12409850
  misc_feature (1)..(166): Pfam Name: Pfam Description:  Glycoprotein GG/GX
  misc_feature (125)..(355): NCBI GI NO: 2598227 NR Description: AT-hook protein 1 [Arabidopsis thaliana]
  misc_feature (125)..(355): NCBI GI NO: 18403332 NR Description: AT-hook DNA-binding protein
  misc_feature (32)..(135): NCBI GI NO: 2598227 NR Description: AT-hook protein 1 [Arabidopsis thaliana]
  misc_feature (32)..(135): NCBI GI NO: 18403332 NR Description: AT-hook DNA-binding protein
  misc_feature (125)..(355): NCBI GI NO: 14326504 NR Description: At2g33620/F4P9.39 [Arabidopsis thaliana]
  misc_feature (32)..(135): NCBI GI NO: 14326504 NR Description: At2g33620/F4P9.39 [Arabidopsis thaliana]
  misc_feature (125)..(355): NCBI GI NO: 25408293 NR Description: AT-hook DNA-binding protein (AHP1)
  misc_feature (42)..(135): NCBI GI NO: 25408293 NR Description: AT-hook DNA-binding protein (AHP1)
  misc_feature (6)..(356): NCBI GI NO: 37537056 NR Description: putative AT-Hook DNA-binding protein
  misc_feature (1)..(365): NCBI GI NO: 38346715 NR Description: OSJNBa0086O06.13
  misc_feature (57)..(57): Xaa is any aa, unknown or other
  misc_feature (58)..(58): Xaa is any aa, unknown or other
  misc_feature (59)..(59): Xaa is any aa, unknown or other
  misc_feature (65)..(65): Xaa is any aa, unknown or other
  misc_feature (68)..(68): Xaa is any aa, unknown or other
  misc_feature (74)..(74): Xaa is any aa, unknown or other
  misc_feature (259)..(259): Xaa is any aa, unknown or other
MAGREPFGLPKTPATPPSSGGTQGLRMAYTTDGTAIFTPVSSVPPATATYQPVGGSXXXASSLAXVGXNGGAPXHSGGAGEPGTKKKRGRPRKYGPDGSMSLALVPASMAGEPAPAALGASGPFSPNGPKAPNTAPSASPDGAKKRGRPKGSTNKKHVAALGPAGAGFTPHLIFVKAGEDVSAKIMSFSQHGTRAVCILSANGAISNVTLRQSATSGGTVTYEGRFEILSLSGSFLLSENGGQRSRTGGLSVSLAGPDXRVLGGCVAGLLTAASPVQIVVGSFDAGGKKQPKQQQQQQLAPSPAPLNLAPTGVAAGPSSPPSRGTLSLSESSSGAPPSPPHAGASGGHGQQQQQPQPGGFSGLFWK

SEQ ID NO: 26478 - DNA, 1517 bp, Zea mays subsp. mays
  misc_feature (1)..(1517): Ceres Seq. ID no. 12365500
gcacgagaccattacctagaacatcctaacgaaaaagagcttgttacgaggcaatggcgccgacagtggaggtgctgacgtcggagatggtcgtcccagctgaagaggccccggcgggcaccatttggctgtccaacctggacctcgccgcacgccgcgggtacacgcccacggtctacttcttccggcccaacggtgacccggggttcttcgccccggacgtcgtcaagggcagcctcgccaggacgctagtcacgttctacccgctcgcggggcggcctcgcgctcgacggcgccgggcgccgtccaggtcgactgcaccggcgagggtgcggtgttcgtgaccgcgcggtcggactacgcgctcgacgacctgatgcgcgagttcgtgccgtgccgcgagatgcgggacctgctggtgcccccggcgcccgcgccggacccgccgtgcgcgctgctgttcgtgcaggtcacgcgcctgcgctgcggcggcgccgtgctcgccctgtccatgcaccactccgtgtgcgacgcgcggagcgccgcgcacttcttcgatacgtgggcgagcatcgcgcgcggggacgccgccgccgccgccgcgaacgctcctgtgccaccgtgcttcgactacgcgctgctcgccgcgcgcccggcgctcgcggtgctgtacgaccaccccgagtacaagcccgagccggagcctgtggacgccgcgtccgactacgcgagcgccatcgtcgtcatgaccaaagcgcaggtgggcgcgctcaaggcgcggtgttccggggcgtccacgttccgcgccgtggtggcgctggtgtggcagtgcgtgtgccgcgcgcgggcgctgccccccgaggcggagacgcggctctactccatgatcgacatgcgctcgcgcctggatccgccgctccctacgggatacttcggcaacgcggttgtccgcacctcggtctccgccacggtcggcgaggtgacgtccaaccccgtaggccacgccgcgcgccgcgcgctcgcggtaacgagccagggcgacgactacgcgcggtcgctggtggactacctagagggcgtggacgccatgaacctgcccagaagcggcatctcgcgtgcgcacctccgcgccatcagctggatgggcatgtcgctgtacaaggccgacttcgggtggggcgcgccggtgttcatggggccggcgatcatgtactacagtggcttcgtgtacgtcatgaacgcggcggggaaggagggtgccctcgcgctcgtgctgtcgctggagccggagagcatgccggagttcaggaaggtgttcgccgaggagctcgccagcctggacgtgatctagtgcatacatatagctcgaagtatgtaccggccggctaagccgccaggcgccagtggacagttgcatgcgtggaacgtactacgtgttaggctatccacactcatatcaccctatttctctaaatatctaccatataactgtgggttatgataattagagataccca

SEQ ID NO: 26479 - protein, 324 aa, Zea mays subsp. mays
  peptide (1)..(324): Ceres Seq. ID no. 12365501
  misc_feature (1)..(312): Pfam Name: Pfam Description:  Transferase family
  misc_feature (1)..(312): NCBI GI NO: 6469032 NR Description: N-hydroxycinnamoyl/benzoyltransferase
  misc_feature (1)..(312): NCBI GI NO: 27475616 NR Description: hydroxycinnamoyl transferase [Nicotiana tabacum]
  misc_feature (1)..(316): NCBI GI NO: 40644084 NR Description: hydroxycinnamoyl CoA quinate transferase
  misc_feature (1)..(316): NCBI GI NO: 40644899 NR Description: hydroxycinnamoyl CoA quinate transferase
  misc_feature (1)..(316): NCBI GI NO: 15239747 NR Description: anthranilate N-benzoyltransferase
  misc_feature (1)..(316): NCBI GI NO: 21536883 NR Description: anthranilate N-benzoyltransferase
  misc_feature (1)..(316): NCBI GI NO: 38345030 NR Description: OSJNBa0029H02.14
  misc_feature (1)..(314): NCBI GI NO: 7484689 NR Description: anthranilate N-benzoyltransferase (EC 2
  misc_feature (1)..(314): NCBI GI NO: 7484691 NR Description: anthranilate N-benzoyltransferase (EC 2
  misc_feature (1)..(314): NCBI GI NO: 7484690 NR Description: anthranilate N-benzoyltransferase (EC 2
MREFVPCREMRDLLVPPAPAPDPPCALLFVQVTRLRCGGAVLALSMHHSVCDARSAAHFFDTWASIARGDAAAAAANAPVPPCFDYALLAARPALAVLYDHPEYKPEPEPVDAASDYASAIVVMTKAQVGALKARCSGASTFRAVVALVWQCVCRARALPPEAETRLYSMIDMRSRLDPPLPTGYFGNAVVRTSVSATVGEVTSNPVGHAARRALAVTSQGDDYARSLVDYLEGVDAMNLPRSGISRAHLRAISWMGMSLYKADFGWGAPVFMGPAIMYYSGFVYVMNAAGKEGALALVLSLEPESMPEFRKVFAEELASLDVI

SEQ ID NO: 26480 - protein, 315 aa, Zea mays subsp. mays
  peptide (1)..(315): Ceres Seq. ID no. 12365502
  misc_feature (1)..(303): Pfam Name: Pfam Description:  Transferase family
  misc_feature (1)..(303): NCBI GI NO: 6469032 NR Description: N-hydroxycinnamoyl/benzoyltransferase
  misc_feature (1)..(303): NCBI GI NO: 27475616 NR Description: hydroxycinnamoyl transferase [Nicotiana tabacum]
  misc_feature (1)..(307): NCBI GI NO: 40644084 NR Description: hydroxycinnamoyl CoA quinate transferase
  misc_feature (1)..(307): NCBI GI NO: 40644899 NR Description: hydroxycinnamoyl CoA quinate transferase
  misc_feature (1)..(307): NCBI GI NO: 15239747 NR Description: anthranilate N-benzoyltransferase
  misc_feature (1)..(307): NCBI GI NO: 21536883 NR Description: anthranilate N-benzoyltransferase
  misc_feature (1)..(307): NCBI GI NO: 38345030 NR Description: OSJNBa0029H02.14
  misc_feature (1)..(305): NCBI GI NO: 7484689 NR Description: anthranilate N-benzoyltransferase (EC 2
  misc_feature (1)..(305): NCBI GI NO: 7484691 NR Description: anthranilate N-benzoyltransferase (EC 2
  misc_feature (1)..(305): NCBI GI NO: 7484690 NR Description: anthranilate N-benzoyltransferase (EC 2
MRDLLVPPAPAPDPPCALLFVQVTRLRCGGAVLALSMHHSVCDARSAAHFFDTWASIARGDAAAAAANAPVPPCFDYALLAARPALAVLYDHPEYKPEPEPVDAASDYASAIVVMTKAQVGALKARCSGASTFRAVVALVWQCVCRARALPPEAETRLYSMIDMRSRLDPPLPTGYFGNAVVRTSVSATVGEVTSNPVGHAARRALAVTSQGDDYARSLVDYLEGVDAMNLPRSGISRAHLRAISWMGMSLYKADFGWGAPVFMGPAIMYYSGFVYVMNAAGKEGALALVLSLEPESMPEFRKVFAEELASLDVI

SEQ ID NO: 26481 - protein, 279 aa, Zea mays subsp. mays
  peptide (1)..(279): Ceres Seq. ID no. 12365503
  misc_feature (1)..(267): Pfam Name: Pfam Description:  Transferase family
  misc_feature (1)..(267): NCBI GI NO: 6469032 NR Description: N-hydroxycinnamoyl/benzoyltransferase
  misc_feature (1)..(267): NCBI GI NO: 27475616 NR Description: hydroxycinnamoyl transferase [Nicotiana tabacum]
  misc_feature (1)..(271): NCBI GI NO: 40644084 NR Description: hydroxycinnamoyl CoA quinate transferase
  misc_feature (1)..(271): NCBI GI NO: 40644899 NR Description: hydroxycinnamoyl CoA quinate transferase
  misc_feature (1)..(271): NCBI GI NO: 15239747 NR Description: anthranilate N-benzoyltransferase
  misc_feature (1)..(271): NCBI GI NO: 21536883 NR Description: anthranilate N-benzoyltransferase
  misc_feature (1)..(271): NCBI GI NO: 38345030 NR Description: OSJNBa0029H02.14
  misc_feature (1)..(269): NCBI GI NO: 7484689 NR Description: anthranilate N-benzoyltransferase (EC 2
  misc_feature (1)..(269): NCBI GI NO: 7484691 NR Description: anthranilate N-benzoyltransferase (EC 2
  misc_feature (1)..(269): NCBI GI NO: 7484690 NR Description: anthranilate N-benzoyltransferase (EC 2
MHHSVCDARSAAHFFDTWASIARGDAAAAAANAPVPPCFDYALLAARPALAVLYDHPEYKPEPEPVDAASDYASAIVVMTKAQVGALKARCSGASTFRAVVALVWQCVCRARALPPEAETRLYSMIDMRSRLDPPLPTGYFGNAVVRTSVSATVGEVTSNPVGHAARRALAVTSQGDDYARSLVDYLEGVDAMNLPRSGISRAHLRAISWMGMSLYKADFGWGAPVFMGPAIMYYSGFVYVMNAAGKEGALALVLSLEPESMPEFRKVFAEELASLDVI

SEQ ID NO: 26482 - DNA, 866 bp, Zea mays subsp. mays; identical to SEQ ID NO: 23787
  misc_feature (1)..(866): Ceres Seq. ID no. 12351502

SEQ ID NO: 26483 - protein, 196 aa, Zea mays subsp. mays; identical to SEQ ID NO: 23788
  peptide (1)..(196): Ceres Seq. ID no. 12351503
  misc_feature (35)..(105): Pfam Name: Pfam Description:  linker histone H1 and H5 family
  misc_feature (1)..(196): NCBI GI NO: 22135471 NR Description: histone H1-like protein HON101 [Zea mays]
  misc_feature (1)..(196): NCBI GI NO: 5230785 NR Description: histone H1 WH1B.1 [Triticum aestivum]
  misc_feature (1)..(193): NCBI GI NO: 729668 NR Description: Histone H1
  misc_feature (1)..(193): NCBI GI NO: 7439658 NR Description: histone H1, stress-inducible - tomato
  misc_feature (1)..(196): NCBI GI NO: 121950 NR Description: HISTONE H1
  misc_feature (1)..(194): NCBI GI NO: 2623960 NR Description: histone H1 [Apium graveolens]
  misc_feature (1)..(196): NCBI GI NO: 5726575 NR Description: histone H1C [Nicotiana tabacum]
  misc_feature (8)..(193): NCBI GI NO: 7595978 NR Description: histone H1 variant [Lycopersicon chilense]
  misc_feature (5)..(196): NCBI GI NO: 7439660 NR Description: histone H1 (clone TH32) - wheat
  misc_feature (1)..(195): NCBI GI NO: 21465093 NR Description: histone H1 [Lathyrus aphaca]

SEQ ID NO: 26484 - protein, 155 aa, Zea mays subsp. mays; identical to SEQ ID NO: 23789
  peptide (1)..(155): Ceres Seq. ID no. 12351504
  misc_feature (1)..(64): Pfam Name: Pfam Description:  linker histone H1 and H5 family
  misc_feature (1)..(155): NCBI GI NO: 22135471 NR Description: histone H1-like protein HON101 [Zea mays]
  misc_feature (1)..(155): NCBI GI NO: 5230785 NR Description: histone H1 WH1B.1 [Triticum aestivum]
  misc_feature (1)..(152): NCBI GI NO: 729668 NR Description: Histone H1
  misc_feature (1)..(152): NCBI GI NO: 7439658 NR Description: histone H1, stress-inducible - tomato
  misc_feature (1)..(155): NCBI GI NO: 121950 NR Description: HISTONE H1
  misc_feature (1)..(153): NCBI GI NO: 2623960 NR Description: histone H1 [Apium graveolens]
  misc_feature (1)..(155): NCBI GI NO: 5726575 NR Description: histone H1C [Nicotiana tabacum]
  misc_feature (1)..(152): NCBI GI NO: 7595978 NR Description: histone H1 variant [Lycopersicon chilense]
  misc_feature (1)..(155): NCBI GI NO: 7439660 NR Description: histone H1 (clone TH32) - wheat
  misc_feature (1)..(154): NCBI GI NO: 21465093 NR Description: histone H1 [Lathyrus aphaca]

SEQ ID NO: 26485 - protein, 148 aa, Zea mays subsp. mays; identical to SEQ ID NO: 23790
  peptide (1)..(148): Ceres Seq. ID no. 12351505

SEQ ID NO: 26486 - DNA, 1382 bp, Zea mays subsp. mays
  misc_feature (1)..(1382): Ceres Seq. ID no. 12407780
  misc_feature (288)..(288): n is a, c, t, g, unknown, or other
tccctcccagtcccaggagcgtggcctcactctcctcgtcgcatcccctctcctcatcttcaaagcgcgggcggcggcaatggcgatggcctccacctacgcgccgggcggaggcgcgggggcgctcgcgcagggaagatgcagggtccgcggtcccgcggggctgggcttcctcggcccctccaaggccgccggcctcccccgccccctcgccctcgccaggcggacgagcagccccgtcgcggtgggcgccaggctgcgatgcgcggcgtcgtcgtcccccgcggnaggcgcggcccgccacggcgccgcgcttcatccagcacaagaaggaggccttctggttctaccgcttcctctccatcgtgtacgaccacgtcatcaacccgggccactggaccgaggacatgcgcgacgacgcgctggaacccgccgacctcttcagccgccacctcacggtcgtcgacgtcggcggcggcacggggttcaccacgctcggcatcgtcaagcacgtcaacccggagaacgtcacgctgctcgaccagtccccgcaccagctcgacaaggcccggcagaaggaggccctcaagggggtcaccatcatggagggcgacgccgaggacctcccgttccccaccgactccttcgaccgatacatctccgccggcagcatcgagtactggccagacccacagcgggggatcaaggaagcctacagggtcctgagatttggtgggctagcttgtgtgatcggcccggtctacccgaccttctggctgtcccgcttcttcgccgacatgtggatgctcttccccaaggaggaagagtacatcgagtggttcaagaaggctgggtttagggatgtcaagctgaagaggattggaccgaagtggtaccgcggtgtccgaaggcatggcctcatcatgggctgctccgtcaccggcgtcaagagagagcgcggtgactctcccttggagcttggtcccaaggcggaggatgtcagcaagccagtgaatccgatcaccttcctcttccgcttcctcgtaggaacgatttgtgctgcgtactatgttctggtgcctatttacatgtggataaaggaccagatcgtgccaaaaggcatgccaatctgagtgaagggaatgagctgcatggaagagaggatagccaacgtctgaattttagtcttctctatattagacgcttcctgcctgttttgtattaatacctcttgttttccttctgctatttacttcttgcactgctgttcctgtttgtggtaattaataatactaagacatcgatgttctcctgtttcttgagcatgactggttgcagtggaacctggaaactaagttatatgatgtgtaatttagttggtc

SEQ ID NO: 26487 - protein, 376 aa, Zea mays subsp. mays
  peptide (1)..(376): Ceres Seq. ID no. 12407781
  misc_feature (97)..(376): NCBI GI NO: 34393472 NR Description: putative 37kDa chloroplast inner envelope membranepolypeptide precursor
  misc_feature (97)..(376): NCBI GI NO: 7489166 NR Description: membrane protein
  misc_feature (98)..(376): NCBI GI NO: 124429 NR Description: 37 KD INNER ENVELOPE MEMBRANE PROTEIN
  misc_feature (97)..(376): NCBI GI NO: 15005009 NR Description: APG1 [Arabidopsis thaliana]
  misc_feature (97)..(376): NCBI GI NO: 15229430 NR Description: putative chloroplast inner envelope protein
  misc_feature (97)..(376): NCBI GI NO: 21553996 NR Description: putative chloroplast inner envelope protein
  misc_feature (97)..(372): NCBI GI NO: 37265798 NR Description: MPBQ/MSBQ methyltransferase
  misc_feature (98)..(225): NCBI GI NO: 25458195 NR Description: membrane protein, 37K, chloroplast inner envelope
  misc_feature (106)..(299): NCBI GI NO: 11498123 NR Description: chloroplast inner envelope membrane protein
  misc_feature (106)..(289): NCBI GI NO: 15790980 NR Description: membrane protein; Hmp [Halobacterium sp. NRC-1]
  misc_feature (96)..(96): Xaa is any aa, unknown or other
PPSPRSVASLSSSHPLSSSSKRGRRQWRWPPPTRRAEARGRSRREDAGSAVPRGWASSAPPRPPASPAPSPSPGGRAAPSRWAPGCDARRRRPPRXARPATAPRFIQHKKEAFWFYRFLSIVYDHVINPGHWTEDMRDDALEPADLFSRHLTVVDVGGGTGFTTLGIVKHVNPENVTLLDQSPHQLDKARQKEALKGVTIMEGDAEDLPFPTDSFDRYISAGSIEYWPDPQRGIKEAYRVLRFGGLACVIGPVYPTFWLSRFFADMWMLFPKEEEYIEWFKKAGFRDVKLKRIGPKWYRGVRRHGLIMGCSVTGVKRERGDSPLELGPKAEDVSKPVNPITFLFRFLVGTICAAYYVLVPIYMWIKDQIVPKGMPI

SEQ ID NO: 26488 - protein, 285 aa, Zea mays subsp. mays
  peptide (1)..(285): Ceres Seq. ID no. 12407782
  misc_feature (135)..(215): Pfam Name: Pfam Description:  TT viral ORF2
  misc_feature (96)..(96): Xaa is any aa, unknown or other
PSQSQERGLTLLVASPLLIFKARAAAMAMASTYAPGGGAGALAQGRCRVRGPAGLGFLGPSKAAGLPRPLALARRTSSPVAVGARLRCAASSSPAXGAARHGAALHPAQEGGLLVLPLPLHRVRPRHQPGPLDRGHARRRAGTRRPLQPPPHGRRRRRRHGVHHARHRQARQPGERHAARPVPAPARQGPAEGGPQGGHHHGGRRRGPPVPHRLLRPIHLRRQHRVLARPTAGDQGSLQGPEIWWASLCDRPGLPDLLAVPLLRRHVDALPQGGRVHRVVQEGWV

SEQ ID NO: 26489 - protein, 259 aa, Zea mays subsp. mays
  peptide (1)..(259): Ceres Seq. ID no. 12407783
  misc_feature (109)..(189): Pfam Name: Pfam Description:  TT viral ORF2
  misc_feature (70)..(70): Xaa is any aa, unknown or other
MAMASTYAPGGGAGALAQGRCRVRGPAGLGFLGPSKAAGLPRPLALARRTSSPVAVGARLRCAASSSPAXGAARHGAALHPAQEGGLLVLPLPLHRVRPRHQPGPLDRGHARRRAGTRRPLQPPPHGRRRRRRHGVHHARHRQARQPGERHAARPVPAPARQGPAEGGPQGGHHHGGRRRGPPVPHRLLRPIHLRRQHRVLARPTAGDQGSLQGPEIWWASLCDRPGLPDLLAVPLLRRHVDALPQGGRVHRVVQEGWV

SEQ ID NO: 26490 - DNA, 1393 bp, Zea mays subsp. mays
  misc_feature (1)..(1393): Ceres Seq. ID no. 12409839
ctcctcccctcttcctaccattagcagtagccacagccagaacaccagcagacagcagcatcagcagggaggaacacgatgagcggcgccggtccggatctgcagctgccaccggggttccggtttccacccgacggacgaggagctggtgatgcactacctctgccgccgctgcgccggcctgcccatcgccgtccccatcatcgccgagatcgacctctacaagttcgacccatggcagctcccaaggatggcgctgtacggcgagaaggagtggtacttcttctccccgcgggaccgcaagtacccgaacgggtccaggcccaaccgcgccgccggggctgggtactggaaggccaccggcgctgacaagcccgtgggcacgcccaagccgctggccatcaagaaggcgctcgtcttctacgccggcaaggcgcccaagggcgagaagaccaactggatcatgcacgagtaccgcctcgccgacgtcgaccgctcggcgcgcaagaagaacagcctcaggttggatgactgggtcctgtgccgcatctacaacaagaagggcggcgggctggagaaggcgccggcggctggcggcgaccacaagcctatgttcgccacgccggcggtgagctccccgccggagcagaagccgttcgtggcggcggcgggcgggctgcccccggcgttcccggagctggcggcgtactacgaccggccgtcggactcgatgccgcggctgcacgcggactactccagctgctcggagcaggtgctgtccccggagcagctggcgtgcgaccgggaggtgcagagccagcccaagatcagcgagtgggagcggaccttcgcctccgaccccgtgaaccccgcgggctccatgctcgaccccgtcgtcggccacgccggcggcgacccgctgctgcaggacatcctcatgtactggggcaagccgttctagacgacgccgcccatcatgtcctgagggcgaggggaggtgggggtggcgaagcatgcatgcaaacacccatcctcggctgcggttggttggttgattgatctgtcttgggcagcgcaatgcaatgcaaccgcacggtgtgggctttgactcaggcgagccgccattgttgacttgcaaggaggatataatatgaaactatagctggattacatggagaggcggcaatgagaccgtctggccccgccggaagggagacggagacggagacggagacggatggcgcagtgcatcgggtgtggtggatcgtgcgcggcatgtgtgtgtgtgtctgtaatcgactccatcagcttgccgcctttcctgtcctattctgattgttttcatccattgatgccgtcgtcgcagtaataaacttggaacgaacgattccac

SEQ ID NO: 26491 - protein, 269 aa, Zea mays subsp. mays
  peptide (1)..(269): Ceres Seq. ID no. 12409840
  misc_feature (1)..(111): Pfam Name: NAM Pfam Description: No apical meristem
  misc_feature (1)..(269): NCBI GI NO: 25458553 NR Description: OsNAC6 protein [imported] - rice
  misc_feature (1)..(269): NCBI GI NO: 21105748 NR Description: nam-like protein 10 [Petunia x hybrida]
  misc_feature (1)..(269): NCBI GI NO: 15223456 NR Description: NAC domain protein, putative; protein id:At1g01720
  misc_feature (1)..(269): NCBI GI NO: 40647397 NR Description: NAC domain protein [Lycopersicon esculentum]
  misc_feature (1)..(246): NCBI GI NO: 14485513 NR Description: putative NAC domain protein [Solanum tuberosum]
  misc_feature (1)..(230): NCBI GI NO: 21105734 NR Description: nam-like protein 3 [Petunia x hybrida]
  misc_feature (1)..(194): NCBI GI NO: 15223963 NR Description: GRAB1-like protein; protein id: At1g77450
  misc_feature (1)..(194): NCBI GI NO: 21593134 NR Description: GRAB1-like protein [Arabidopsis thaliana]
  misc_feature (1)..(153): NCBI GI NO: 30697896 NR Description: No apical meristem (NAM) protein family
  misc_feature (1)..(164): NCBI GI NO: 22326685 NR Description: Expressed protein; protein id: At5g08790
MHYLCRRCAGLPIAVPIIAEIDLYKFDPWQLPRMALYGEKEWYFFSPRDRKYPNGSRPNRAAGAGYWKATGADKPVGTPKPLAIKKALVFYAGKAPKGEKTNWIMHEYRLADVDRSARKKNSLRLDDWVLCRIYNKKGGGLEKAPAAGGDHKPMFATPAVSSPPEQKPFVAAAGGLPPAFPELAAYYDRPSDSMPRLHADYSSCSEQVLSPEQLACDREVQSQPKISEWERTFASDPVNPAGSMLDPVVGHAGGDPLLQDILMYWGKPF

SEQ ID NO: 26492 - protein, 236 aa, Zea mays subsp. mays
  peptide (1)..(236): Ceres Seq. ID no. 12409841
  misc_feature (1)..(78): Pfam Name: NAM Pfam Description: No apical meristem
  misc_feature (1)..(236): NCBI GI NO: 25458553 NR Description: OsNAC6 protein [imported] - rice
  misc_feature (1)..(236): NCBI GI NO: 21105748 NR Description: nam-like protein 10 [Petunia x hybrida]
  misc_feature (1)..(236): NCBI GI NO: 15223456 NR Description: NAC domain protein, putative; protein id:At1g01720
  misc_feature (1)..(236): NCBI GI NO: 40647397 NR Description: NAC domain protein [Lycopersicon esculentum]
  misc_feature (1)..(213): NCBI GI NO: 14485513 NR Description: putative NAC domain protein [Solanum tuberosum]
  misc_feature (1)..(197): NCBI GI NO: 21105734 NR Description: nam-like protein 3 [Petunia x hybrida]
  misc_feature (1)..(161): NCBI GI NO: 15223963 NR Description: GRAB1-like protein; protein id: At1g77450
  misc_feature (1)..(161): NCBI GI NO: 21593134 NR Description: GRAB1-like protein [Arabidopsis thaliana]
  misc_feature (1)..(120): NCBI GI NO: 30697896 NR Description: No apical meristem (NAM) protein family
  misc_feature (1)..(131): NCBI GI NO: 22326685 NR Description: Expressed protein; protein id: At5g08790
MALYGEKEWYFFSPRDRKYPNGSRPNRAAGAGYWKATGADKPVGTPKPLAIKKALVFYAGKAPKGEKTNWIMHEYRLADVDRSARKKNSLRLDDWVLCRIYNKKGGGLEKAPAAGGDHKPMFATPAVSSPPEQKPFVAAAGGLPPAFPELAAYYDRPSDSMPRLHADYSSCSEQVLSPEQLACDREVQSQPKISEWERTFASDPVNPAGSMLDPVVGHAGGDPLLQDILMYWGKPF

SEQ ID NO: 26493 - protein, 165 aa, Zea mays subsp. mays
  peptide (1)..(165): Ceres Seq. ID no. 12409842
  misc_feature (1)..(165): NCBI GI NO: 25458553 NR Description: OsNAC6 protein [imported] - rice
  misc_feature (1)..(165): NCBI GI NO: 21105748 NR Description: nam-like protein 10 [Petunia x hybrida]
  misc_feature (1)..(165): NCBI GI NO: 15223456 NR Description: NAC domain protein, putative; protein id:At1g01720
  misc_feature (1)..(165): NCBI GI NO: 40647397 NR Description: NAC domain protein [Lycopersicon esculentum]
  misc_feature (1)..(142): NCBI GI NO: 14485513 NR Description: putative NAC domain protein [Solanum tuberosum]
  misc_feature (1)..(126): NCBI GI NO: 21105734 NR Description: nam-like protein 3 [Petunia x hybrida]
  misc_feature (1)..(90): NCBI GI NO: 15223963 NR Description: GRAB1-like protein; protein id: At1g77450
  misc_feature (1)..(90): NCBI GI NO: 21593134 NR Description: GRAB1-like protein [Arabidopsis thaliana]
  misc_feature (1)..(49): NCBI GI NO: 30697896 NR Description: No apical meristem (NAM) protein family
  misc_feature (1)..(60): NCBI GI NO: 22326685 NR Description: Expressed protein; protein id: At5g08790
MHEYRLADVDRSARKKNSLRLDDWVLCRIYNKKGGGLEKAPAAGGDHKPMFATPAVSSPPEQKPFVAAAGGLPPAFPELAAYYDRPSDSMPRLHADYSSCSEQVLSPEQLACDREVQSQPKISEWERTFASDPVNPAGSMLDPVVGHAGGDPLLQDILMYWGKPF

SEQ ID NO: 26494 - DNA, 1140 bp, Zea mays subsp. mays
  misc_feature (1)..(1140): Ceres Seq. ID no. 12386869
ccaccaacccaacctctgacgatcaccatcgccgctagcctccaccaccaacttcccatcgcctccccctcatctccccacactcctgacctcacctctccgaactgcagcacctcccctcccgccacccacacgtgctcccatggccgccaccgcgatctcagtccgcctccacccaaccgccgcgcgccatgtggcctccgcccgccgcgcccgcctcggggccgtccgcgcgcagtccgcgccggcggcggcggcggcggcgctgacgcaggacgacctcaagcggctggcggcggtgcgcgccgtcgagcaggtgaagagcgggatggtgctcgggctcgggacgggctccacggccgccttcgccgtcgccgagatcggcgcgctcctggccgcgggcaagctcgagaagatcgtcggcgtgcccacatccaagcgcaccttcgagcaggcgcagtcgctcggcatcccgctctccacgctcgacgacaacccgctcatcgacctcgccatcgacggtgccgacgaggttgaccctgacctcaaccttgtgaaagggcggggtggtgctcttcttcgtgagaagatggttgaggcagcatcggacaagtttattgttattgttgacgagacaaaactagttgatgggttaggaggtagtggtctagccatgccagtggaagttgtgcagttctgctggaagtacaaccttgtaagattgcaggaactgtttaaggaggaaggagtcgaggcaaagctaaggtttgaaggcgacaagccctatgttactgacaactcaaactacatcgtcgatttatacttcaagacgccaatcaaggatgcgttggcagcaggacaggaaattgcagctctggaaggagttgttgaccatgggttgttcttgaacatggcgagttcagtgatcattgctggaacggacggtgtcagtgtcaaaacgaagtgagtttttgagttgctttgttgtttgtgttgagttttacaatttaatgtacaagctattggtgtaaaagcagctgataagatgcttcaataaaggtgttcccccaatgtggggattgactatcacttattgtgggataaaaagccattttaataggttgaaacttctgttgattc

SEQ ID NO: 26495 - protein, 274 aa, Zea mays subsp. mays
  peptide (1)..(274): Ceres Seq. ID no. 12386870
  misc_feature (92)..(270): Pfam Name: phosphoriboisomerase A Pfam Description: Ribose 5-phosphate isomerase A
  misc_feature (1)..(274): NCBI GI NO: 34393835 NR Description: putative ribose-5-phosphate isomerase
  misc_feature (31)..(274): NCBI GI NO: 34393836 NR Description: putative ribose-5-phosphate isomerase
  misc_feature (29)..(274): NCBI GI NO: 18654317 NR Description: ribose-5-phosphate isomerase [Spinacia oleracea]
  misc_feature (1)..(274): NCBI GI NO: 21594002 NR Description: putative ribose 5-phosphate isomerase
  misc_feature (1)..(274): NCBI GI NO: 15229349 NR Description: putative ribose 5-phosphate isomerase
  misc_feature (26)..(274): NCBI GI NO: 15226223 NR Description: putative ribose 5-phosphate isomerase
  misc_feature (26)..(274): NCBI GI NO: 21592672 NR Description: putative ribose 5-phosphate isomerase
  misc_feature (26)..(274): NCBI GI NO: 15223936 NR Description: putative ribose 5-phosphate isomerase
  misc_feature (26)..(274): NCBI GI NO: 13430836 NR Description: putative ribose 5-phosphate isomerase
  misc_feature (34)..(268): NCBI GI NO: 38347196 NR Description: OSJNBa0023J03.8
MAATAISVRLHPTAARHVASARRARLGAVRAQSAPAAAAAALTQDDLKRLAAVRAVEQVKSGMVLGLGTGSTAAFAVAEIGALLAAGKLEKIVGVPTSKRTFEQAQSLGIPLSTLDDNPLIDLAIDGADEVDPDLNLVKGRGGALLREKMVEAASDKFIVIVDETKLVDGLGGSGLAMPVEVVQFCWKYNLVRLQELFKEEGVEAKLRFEGDKPYVTDNSNYIVDLYFKTPIKDALAAGQEIAALEGVVDHGLFLNMASSVIIAGTDGVSVKTK

SEQ ID NO: 26496 - protein, 212 aa, Zea mays subsp. mays
  peptide (1)..(212): Ceres Seq. ID no. 12386871
  misc_feature (30)..(208): Pfam Name: phosphoriboisomerase A Pfam Description: Ribose 5-phosphate isomerase A
  misc_feature (1)..(212): NCBI GI NO: 34393835 NR Description: putative ribose-5-phosphate isomerase
  misc_feature (1)..(212): NCBI GI NO: 34393836 NR Description: putative ribose-5-phosphate isomerase
  misc_feature (1)..(212): NCBI GI NO: 18654317 NR Description: ribose-5-phosphate isomerase [Spinacia oleracea]
  misc_feature (1)..(212): NCBI GI NO: 21594002 NR Description: putative ribose 5-phosphate isomerase
  misc_feature (1)..(212): NCBI GI NO: 15229349 NR Description: putative ribose 5-phosphate isomerase
  misc_feature (1)..(212): NCBI GI NO: 15226223 NR Description: putative ribose 5-phosphate isomerase
  misc_feature (1)..(212): NCBI GI NO: 21592672 NR Description: putative ribose 5-phosphate isomerase
  misc_feature (1)..(212): NCBI GI NO: 15223936 NR Description: putative ribose 5-phosphate isomerase
  misc_feature (1)..(212): NCBI GI NO: 13430836 NR Description: putative ribose 5-phosphate isomerase
  misc_feature (1)..(206): NCBI GI NO: 38347196 NR Description: OSJNBa0023J03.8
MVLGLGTGSTAAFAVAEIGALLAAGKLEKIVGVPTSKRTFEQAQSLGIPLSTLDDNPLIDLAIDGADEVDPDLNLVKGRGGALLREKMVEAASDKFIVIVDETKLVDGLGGSGLAMPVEVVQFCWKYNLVRLQELFKEEGVEAKLRFEGDKPYVTDNSNYIVDLYFKTPIKDALAAGQEIAALEGVVDHGLFLNMASSVIIAGTDGVSVKTK

SEQ ID NO: 26497 - protein, 178 aa, Zea mays subsp. mays
  peptide (1)..(178): Ceres Seq. ID no. 12386872
PPTQPLTITIAASLHHQLPIASPSSPHTPDLTSPNCSTSPPATHTCSHGRHRDLSPPPPNRRAPCGLRPPRPPRGRPRAVRAGGGGGGADAGRPQAAGGGARRRAGEERDGARARDGLHGRLRRRRDRRAPGRGQAREDRRRAHIQAHLRAGAVARHPALHARRQPAHRPRHRRCRRG

SEQ ID NO: 26498 - DNA, 1650 bp, Zea mays subsp. mays
  misc_feature (1)..(1650): Ceres Seq. ID no. 12409835
agcttcttctccctactcctccagtcctccgtcatccgtttcgctctctgccgccgccaccgcacaagaagctagctcctgcctgtaccgccccgtcatggcgatgctatcccgcgcagcctcctccgcggcccggcgcccgctgctgccgccgcctaggcttctggcggtgagggcgatggcgtcgtcgctcttcggccacgtcgagccggcgcccaaggaccccatcctcggcgtcaccgaggctttcctcgccgacccctcgtccgacaaagtgaacgtcggcgtcggcgcctaccgggacgacaacggccagcccgtcgtgctcagctgcgtgcgcgaggccgagcgccggatcgcgggcaacctcaacatggagtaccttccgatgggaggcagcgtcaagatgattgaagagtcactgaagctggcgtacggagaagattctgacttcatcaaagataagaggatagcagcggtgcaggcgctttcaggcactggtgcctgccggctctttgctgatttccaaaagcgttttttgccggattcgcagatctacataccaacaccaacgtggtccaaccatcacaatatttggagggatgctcaagtgccacagaagacattcacatactaccatccagagtcaagagggcttgatttctcaggattgatgaatgaaatcaagaatgctccagatggttcattctttttgcttcatgcatgtgctcataatcccaccggtgtagatcctacggaggaacaatggagagaaatatcccatcagttcaaggtgaaaaaaacattttccattctttgacatggcataccaagggtttgccagtggtgatccagagagagatgccaaggcaatccgaattttccttgaagatggacaccaaattggatgtgctcagtcatacgcaaagaacatgggactttatggacaaagagcaggatgcctgagtattttgtgtgaggatgagatgcaagcagttgctgtcaagagccaactgcaacagatcgcaagaccaatgtacagcaacccacctgttcatggtgcactggttgtttctataatcctcagtgatccagaattgaagagtttgtggttaaaagaagtcaagggtatggctgatcgtatcattggaatgcggaaggcacttaaggaaaatcttgaaaagctaggttcacctttgtcatgggatcatatcactaatcagattggaatgttctgctacagtgggatgacacctgaacaagttgaccgtttaacaaatgaataccacatttacatgacccgcaatgggaggataagcatggctggtgttacgacaggaaatgttggttacctagcaaatgcaattcatgaggttaccaaaccaaattgagttagggtcctaccttctttggtcgatggaagctgatggaatgagactgtgaagcggcgtttccccccctctgttcctgacagaaataagtttagcctgctgctaccatatacatggacacagactcagatgtagacactcaagttttgagagctgtgatcctgtttcatttaatcaaaaacaattttgtttttttttcatcttgtcatggcaaatgttacaccagctgcaaaataattacaataattgatcttgatcc

SEQ ID NO: 26499 - protein, 272 aa, Zea mays subsp. mays
  peptide (1)..(272): Ceres Seq. ID no. 12409836
  misc_feature (142)..(269): Pfam Name: Pfam Description:  Aminotransferase class I and II
  misc_feature (33)..(269): NCBI GI NO: 100728 NR Description: aspartate transaminase (EC 2
  misc_feature (33)..(269): NCBI GI NO: 100726 NR Description: aspartate transaminase (EC 2
  misc_feature (33)..(269): NCBI GI NO: 2130067 NR Description: aspartate transaminase (EC 2
  misc_feature (33)..(270): NCBI GI NO: 15224592 NR Description: aspartate aminotransferase
  misc_feature (33)..(269): NCBI GI NO: 1362046 NR Description: aspartate transaminase (EC 2
  misc_feature (33)..(270): NCBI GI NO: 6980972 NR Description: glutamate oxaloacetate transaminase 2
  misc_feature (33)..(270): NCBI GI NO: 2690302 NR Description: aspartate aminotransferase precursor
  misc_feature (33)..(270): NCBI GI NO: 6754036 NR Description: glutamate oxaloacetate transaminase 2
  misc_feature (51)..(270): NCBI GI NO: 4504069 NR Description: aspartate aminotransferase 2 precursor
  misc_feature (1)..(269): NCBI GI NO: 445118 NR Description: Asp aminotransferase
ASSPYSSSPPSSVSLSAAATAQEASSCLYRPVMAMLSRAASSAARRPLLPPPRLLAVRAMASSLFGHVEPAPKDPILGVTEAFLADPSSDKVNVGVGAYRDDNGQPVVLSCVREAERRIAGNLNMEYLPMGGSVKMIEESLKLAYGEDSDFIKDKRIAAVQALSGTGACRLFADFQKRFLPDSQIYIPTPTWSNHHNIWRDAQVPQKTFTYYHPESRGLDFSGLMNEIKNAPDGSFFLLHACAHNPTGVDPTEEQWREISHQFKVKKTFSIL

SEQ ID NO: 26500 - protein, 240 aa, Zea mays subsp. mays
  peptide (1)..(240): Ceres Seq. ID no. 12409837
  misc_feature (110)..(237): Pfam Name: Pfam Description:  Aminotransferase class I and II
  misc_feature (1)..(237): NCBI GI NO: 100728 NR Description: aspartate transaminase (EC 2
  misc_feature (1)..(237): NCBI GI NO: 100726 NR Description: aspartate transaminase (EC 2
  misc_feature (1)..(237): NCBI GI NO: 2130067 NR Description: aspartate transaminase (EC 2
  misc_feature (1)..(238): NCBI GI NO: 15224592 NR Description: aspartate aminotransferase
  misc_feature (1)..(237): NCBI GI NO: 1362046 NR Description: aspartate transaminase (EC 2
  misc_feature (1)..(238): NCBI GI NO: 6980972 NR Description: glutamate oxaloacetate transaminase 2
  misc_feature (1)..(238): NCBI GI NO: 2690302 NR Description: aspartate aminotransferase precursor
  misc_feature (1)..(238): NCBI GI NO: 6754036 NR Description: glutamate oxaloacetate transaminase 2
  misc_feature (19)..(238): NCBI GI NO: 4504069 NR Description: aspartate aminotransferase 2 precursor
  misc_feature (1)..(237): NCBI GI NO: 445118 NR Description: Asp aminotransferase
MAMLSRAASSAARRPLLPPPRLLAVRAMASSLFGHVEPAPKDPILGVTEAFLADPSSDKVNVGVGAYRDDNGQPVVLSCVREAERRIAGNLNMEYLPMGGSVKMIEESLKLAYGEDSDFIKDKRIAAVQALSGTGACRLFADFQKRFLPDSQIYIPTPTWSNHHNIWRDAQVPQKTFTYYHPESRGLDFSGLMNEIKNAPDGSFFLLHACAHNPTGVDPTEEQWREISHQFKVKKTFSIL

SEQ ID NO: 26501 - protein, 238 aa, Zea mays subsp. mays
  peptide (1)..(238): Ceres Seq. ID no. 12409838
  misc_feature (108)..(235): Pfam Name: Pfam Description:  Aminotransferase class I and II
  misc_feature (1)..(235): NCBI GI NO: 100728 NR Description: aspartate transaminase (EC 2
  misc_feature (1)..(235): NCBI GI NO: 100726 NR Description: aspartate transaminase (EC 2
  misc_feature (1)..(235): NCBI GI NO: 2130067 NR Description: aspartate transaminase (EC 2
  misc_feature (1)..(236): NCBI GI NO: 15224592 NR Description: aspartate aminotransferase
  misc_feature (1)..(235): NCBI GI NO: 1362046 NR Description: aspartate transaminase (EC 2
  misc_feature (1)..(236): NCBI GI NO: 6980972 NR Description: glutamate oxaloacetate transaminase 2
  misc_feature (1)..(236): NCBI GI NO: 2690302 NR Description: aspartate aminotransferase precursor
  misc_feature (1)..(236): NCBI GI NO: 6754036 NR Description: glutamate oxaloacetate transaminase 2
  misc_feature (17)..(236): NCBI GI NO: 4504069 NR Description: aspartate aminotransferase 2 precursor
  misc_feature (1)..(235): NCBI GI NO: 445118 NR Description: Asp aminotransferase
MLSRAASSAARRPLLPPPRLLAVRAMASSLFGHVEPAPKDPILGVTEAFLADPSSDKVNVGVGAYRDDNGQPVVLSCVREAERRIAGNLNMEYLPMGGSVKMIEESLKLAYGEDSDFIKDKRIAAVQALSGTGACRLFADFQKRFLPDSQIYIPTPTWSNHHNIWRDAQVPQKTFTYYHPESRGLDFSGLMNEIKNAPDGSFFLLHACAHNPTGVDPTEEQWREISHQFKVKKTFSIL

SEQ ID NO: 26502 - DNA, 1415 bp, Zea mays subsp. mays
  misc_feature (1)..(1415): Ceres Seq. ID no. 12363295
  misc_feature (812)..(812): n is a, c, t, g, unknown, or other
gtgaatcgtgatcccctgtggttccttccgagcaagggagaaagaatgcagtcgtctcctccgcgtcgccctcctccagtgtagaaaactgcagcccgtatagtgtcatcggcgcaaagggacgaggtcgcagctgccgatgcaggagacggcagcaggcgcctatccctcctacatggagccggagccggagcagacgggtgcatcggcgactgtgggtgtgatgggctgccgctcgcccacgtgcccgccttggctccaagcggccattgcagacatcgatcagcgggtgcgcgcgctggcggtggacgatgccgcgccgcccacggagcactccttcgcggagcgcgccgaggagtactaccagaagcggccgcagctgctggccctcctcgccgacctccaccgccgctacctctgcctggccgaccgctactgccaccaccagcacaagcgagagcagccctcgctgccggcgtctgcctccgactgcggctcgtccgacgtcgacgaccgctgctccgacgccggcagctcgctctccttccaggcccagcacccgccgccggtggccggggtccccgccgaggaaggggaggagctgctggtggcggagctggtggccgcgtgggtggagcgcgacgtgctggcggacgaggcggcgcggcgcgcggcggagtcggcgcgcaggatccagctgcaggggagcctggtggaggtgctggagtcggagcgcctggtgctgctgggcgagaacgcgcgcctggggttccgcgcgacggcggccgaggacgaggccgcggcggcggcgnccgacctgggctacgcgcgccgccgcgccgccgagatggcccgcctcgtgctcaggctccgcgaggaccaccgcgcctgcgtgctggggcgcagggccgaggcgctgcaggcgcgggtgtacgcgctggagctccgcaaccgcgagtgctgcgaggccacggcggcgtgggaggccgaggtccagcggctcagcgcagagaaccgacgcctcgcggaccaagccatgatggcgaggaggaagcgcaagggcggtggtggtgggtggtgggcgagggtcaggatggcagcggccgggtggacgccgtgtgcgcccgcggtcacggtcgccgagcagaccaaggggaaggaggacggcaagtaccaccactacggcggcggatgcttctgtgtctagactaggagatgagacggcggcggcgatctagccctcctttttgttagtagtaattactattataattcaggacttggcaggtgaatgtgaatgctgctgggtcggatgcataattctggagaagacgatgattgtgctccgcaggcactagtaaaacaacatgcaattcgtatgatctgttcaatacattataccatggtgttcccgc

SEQ ID NO: 26503 - protein, 355 aa, Zea mays subsp. mays
  peptide (1)..(355): Ceres Seq. ID no. 12363296
  misc_feature (36)..(355): NCBI GI NO: 24431596 NR Description: Unknown protein
  misc_feature (43)..(262): NCBI GI NO: 9294158 NR Description: contains similarity to unknownprotein~gb|AAD49756
  misc_feature (43)..(262): NCBI GI NO: 30684631 NR Description: expressed protein [Arabidopsis thaliana]
  misc_feature (43)..(303): NCBI GI NO: 22330107 NR Description: hypothetical protein; protein id: At1g48405.1
  misc_feature (225)..(225): Xaa is any aa, unknown or other
MQETAAGAYPSYMEPEPEQTGASATVGVMGCRSPTCPPWLQAAIADIDQRVRALAVDDAAPPTEHSFAERAEEYYQKRPQLLALLADLHRRYLCLADRYCHHQHKREQPSLPASASDCGSSDVDDRCSDAGSSLSFQAQHPPPVAGVPAEEGEELLVAELVAAWVERDVLADEAARRAAESARRIQLQGSLVEVLESERLVLLGENARLGFRATAAEDEAAAAAXDLGYARRRAAEMARLVLRLREDHRACVLGRRAEALQARVYALELRNRECCEATAAWEAEVQRLSAENRRLADQAMMARRKRKGGGGGWWARVRMAAAGWTPCAPAVTVAEQTKGKEDGKYHHYGGGCFCV

SEQ ID NO: 26504 - protein, 343 aa, Zea mays subsp. mays
  peptide (1)..(343): Ceres Seq. ID no. 12363297
  misc_feature (24)..(343): NCBI GI NO: 24431596 NR Description: Unknown protein
  misc_feature (31)..(250): NCBI GI NO: 9294158 NR Description: contains similarity to unknownprotein~gb|AAD49756
  misc_feature (31)..(250): NCBI GI NO: 30684631 NR Description: expressed protein [Arabidopsis thaliana]
  misc_feature (31)..(291): NCBI GI NO: 22330107 NR Description: hypothetical protein; protein id: At1g48405.1
  misc_feature (213)..(213): Xaa is any aa, unknown or other
MEPEPEQTGASATVGVMGCRSPTCPPWLQAAIADIDQRVRALAVDDAAPPTEHSFAERAEEYYQKRPQLLALLADLHRRYLCLADRYCHHQHKREQPSLPASASDCGSSDVDDRCSDAGSSLSFQAQHPPPVAGVPAEEGEELLVAELVAAWVERDVLADEAARRAAESARRIQLQGSLVEVLESERLVLLGENARLGFRATAAEDEAAAAAXDLGYARRRAAEMARLVLRLREDHRACVLGRRAEALQARVYALELRNRECCEATAAWEAEVQRLSAENRRLADQAMMARRKRKGGGGGWWARVRMAAAGWTPCAPAVTVAEQTKGKEDGKYHHYGGGCFCV

SEQ ID NO: 26505 - protein, 327 aa, Zea mays subsp. mays
  peptide (1)..(327): Ceres Seq. ID no. 12363298
  misc_feature (8)..(327): NCBI GI NO: 24431596 NR Description: Unknown protein
  misc_feature (15)..(234): NCBI GI NO: 9294158 NR Description: contains similarity to unknownprotein~gb|AAD49756
  misc_feature (15)..(234): NCBI GI NO: 30684631 NR Description: expressed protein [Arabidopsis thaliana]
  misc_feature (15)..(275): NCBI GI NO: 22330107 NR Description: hypothetical protein; protein id: At1g48405.1
  misc_feature (197)..(197): Xaa is any aa, unknown or other
MGCRSPTCPPWLQAAIADIDQRVRALAVDDAAPPTEHSFAERAEEYYQKRPQLLALLADLHRRYLCLADRYCHHQHKREQPSLPASASDCGSSDVDDRCSDAGSSLSFQAQHPPPVAGVPAEEGEELLVAELVAAWVERDVLADEAARRAAESARRIQLQGSLVEVLESERLVLLGENARLGFRATAAEDEAAAAAXDLGYARRRAAEMARLVLRLREDHRACVLGRRAEALQARVYALELRNRECCEATAAWEAEVQRLSAENRRLADQAMMARRKRKGGGGGWWARVRMAAAGWTPCAPAVTVAEQTKGKEDGKYHHYGGGCFCV

SEQ ID NO: 26506 - DNA, 1826 bp, Zea mays subsp. mays
  misc_feature (1)..(1826): Ceres Seq. ID no. 12367546
aaaagagtaattgcggtcgtggttccggattccccccgccgccgccgcaagaccggagccctaattccaagcggtaaacgatgaggccgcacgcgttgggtatgggtggcggtggcgtggggaggcggaaggcggtggccgccgccgccgcggctagccgggagtggatggtggtgccggcgtcgggcccggcgcgggtggaggaagcagggaagcacgcggtgatggcgcgtacggggcttcccgcgcgcgatctcagggtgctcgacccgttactctcgtacccgtccacgatcctgggccgcgagcgcgccatcgtggtcaacttggagcgcgtcaaagctctgatcacagccgcggaggtgctgcttcctaacaccaaggatcccgccttcgcgcgcttcgttcgcgacctccagacccgcgtcctcgcatcttcgtctgaccagctgaactcactgacatggaaggtgaatcacctattgttgcttcaccatttcctgtaccaagttcatccaaagggcatgaaatggagatgactaagaagactgctgctgttgtgcctgaaatgactagcagcagcagtatgcccaatttagctgttgcaaaagatggaaataccaaggttttgcctttcgaatttcgagctcttgaagtgtgccttgaatcagcctgcagatctttggaagaggaaacttctactctggagctagaggcatatccagcattagatgagctgacatcaaagatcagcacattaaaccttgaacgagttaggcaaatcaagagtcgtctggttgcgatatctggtcgagtacagaaggtgagggatgagcttgagcatttactggatgatgaaatggatatggctgaaatgtacttgacagagaagcttactcaacaagaaatcagtgaggcttcatctagagctgaggttgatgatgcatctcttacagaagacgatagggatgaagattatagaagtgaaccagatggaagcaatggtagtgttataggttataagcccaatattgaagagctagagatgcttctagaggcttactttgtgcaaattgatggcacacttaacaagctatcacatctgagggagtacgtcgatgacacagaagattatatcaatataatgttggacgacaagcagaatcagctgctgcagatgggagttatgctgtcaactgctactgtcgtcatcactgctggagtggctgtagttggtctttttggtatgaatattggcatatcactttacgcagacccaacaaccgaggaggaaactcgagcagcaaataggaaattttgggaaactactttcgggaccgttgctggctgcgtgattttgtacatcatagccatgggttggggaaagagaagtggattactgcaatgatgcggaagcatgactgcatgagtgttctgtacccagtgaatactgggttcacaaaaatctccaaaatgagagattattgtattggctaacatctcctgagtgagcggcgcctaactagacaaagaattagctaacattttctacaatactagtattgtcttgactatttaacttggagaactcaagaacatgatgcttaagagggaatggtgcaaggccatacgtcttaaggtagggcttggaataatcagttgagttttcttttggtgttatgccaaaattatctcataggatttcagtgagtttgtccatggttaatgtagtcttagtttcttcaagttttgacttgtacatattgttccactctatgtcttccagttctatctcatttgcccttctagcactaaagggttgttct

SEQ ID NO: 26507 - protein, 314 aa, Zea mays subsp. mays
  peptide (1)..(314): Ceres Seq. ID no. 12367547
  misc_feature (1)..(314): NCBI GI NO: 20804892 NR Description: P0497A05.17
  misc_feature (35)..(314): NCBI GI NO: 34908640 NR Description: P0677H08.20
  misc_feature (51)..(313): NCBI GI NO: 30698045 NR Description: expressed protein [Arabidopsis thaliana]
  misc_feature (57)..(313): NCBI GI NO: 25360941 NR Description: MRS2-7 [Arabidopsis thaliana]
  misc_feature (57)..(313): NCBI GI NO: 30682808 NR Description: expressed protein [Arabidopsis thaliana]
  misc_feature (49)..(177): NCBI GI NO: 30685422 NR Description: expressed protein [Arabidopsis thaliana]
  misc_feature (51)..(264): NCBI GI NO: 30698047 NR Description: expressed protein [Arabidopsis thaliana]
  misc_feature (119)..(314): NCBI GI NO: 30685422 NR Description: expressed protein [Arabidopsis thaliana]
  misc_feature (57)..(313): NCBI GI NO: 40539050 NR Description: putative  CorA-like Mg2+ transporter protein
  misc_feature (48)..(313): NCBI GI NO: 18411070 NR Description: putative protein; protein id: At3g58970
MEGESPIVASPFPVPSSSKGHEMEMTKKTAAVVPEMTSSSSMPNLAVAKDGNTKVLPFEFRALEVCLESACRSLEEETSTLELEAYPALDELTSKISTLNLERVRQIKSRLVAISGRVQKVRDELEHLLDDEMDMAEMYLTEKLTQQEISEASSRAEVDDASLTEDDRDEDYRSEPDGSNGSVIGYKPNIEELEMLLEAYFVQIDGTLNKLSHLREYVDDTEDYINIMLDDKQNQLLQMGVMLSTATVVITAGVAVVGLFGMNIGISLYADPTTEEETRAANRKFWETTFGTVAGCVILYIIAMGWGKRSGLLQ

SEQ ID NO: 26508 - protein, 292 aa, Zea mays subsp. mays
  peptide (1)..(292): Ceres Seq. ID no. 12367548
  misc_feature (1)..(292): NCBI GI NO: 20804892 NR Description: P0497A05.17
  misc_feature (13)..(292): NCBI GI NO: 34908640 NR Description: P0677H08.20
  misc_feature (29)..(291): NCBI GI NO: 30698045 NR Description: expressed protein [Arabidopsis thaliana]
  misc_feature (35)..(291): NCBI GI NO: 25360941 NR Description: MRS2-7 [Arabidopsis thaliana]
  misc_feature (35)..(291): NCBI GI NO: 30682808 NR Description: expressed protein [Arabidopsis thaliana]
  misc_feature (27)..(155): NCBI GI NO: 30685422 NR Description: expressed protein [Arabidopsis thaliana]
  misc_feature (29)..(242): NCBI GI NO: 30698047 NR Description: expressed protein [Arabidopsis thaliana]
  misc_feature (97)..(292): NCBI GI NO: 30685422 NR Description: expressed protein [Arabidopsis thaliana]
  misc_feature (35)..(291): NCBI GI NO: 40539050 NR Description: putative  CorA-like Mg2+ transporter protein
  misc_feature (26)..(291): NCBI GI NO: 18411070 NR Description: putative protein; protein id: At3g58970
MEMTKKTAAVVPEMTSSSSMPNLAVAKDGNTKVLPFEFRALEVCLESACRSLEEETSTLELEAYPALDELTSKISTLNLERVRQIKSRLVAISGRVQKVRDELEHLLDDEMDMAEMYLTEKLTQQEISEASSRAEVDDASLTEDDRDEDYRSEPDGSNGSVIGYKPNIEELEMLLEAYFVQIDGTLNKLSHLREYVDDTEDYINIMLDDKQNQLLQMGVMLSTATVVITAGVAVVGLFGMNIGISLYADPTTEEETRAANRKFWETTFGTVAGCVILYIIAMGWGKRSGLLQ

SEQ ID NO: 26509 - protein, 290 aa, Zea mays subsp. mays
  peptide (1)..(290): Ceres Seq. ID no. 12367549
  misc_feature (1)..(290): NCBI GI NO: 20804892 NR Description: P0497A05.17
  misc_feature (11)..(290): NCBI GI NO: 34908640 NR Description: P0677H08.20
  misc_feature (27)..(289): NCBI GI NO: 30698045 NR Description: expressed protein [Arabidopsis thaliana]
  misc_feature (33)..(289): NCBI GI NO: 25360941 NR Description: MRS2-7 [Arabidopsis thaliana]
  misc_feature (33)..(289): NCBI GI NO: 30682808 NR Description: expressed protein [Arabidopsis thaliana]
  misc_feature (25)..(153): NCBI GI NO: 30685422 NR Description: expressed protein [Arabidopsis thaliana]
  misc_feature (27)..(240): NCBI GI NO: 30698047 NR Description: expressed protein [Arabidopsis thaliana]
  misc_feature (95)..(290): NCBI GI NO: 30685422 NR Description: expressed protein [Arabidopsis thaliana]
  misc_feature (33)..(289): NCBI GI NO: 40539050 NR Description: putative  CorA-like Mg2+ transporter protein
  misc_feature (24)..(289): NCBI GI NO: 18411070 NR Description: putative protein; protein id: At3g58970
MTKKTAAVVPEMTSSSSMPNLAVAKDGNTKVLPFEFRALEVCLESACRSLEEETSTLELEAYPALDELTSKISTLNLERVRQIKSRLVAISGRVQKVRDELEHLLDDEMDMAEMYLTEKLTQQEISEASSRAEVDDASLTEDDRDEDYRSEPDGSNGSVIGYKPNIEELEMLLEAYFVQIDGTLNKLSHLREYVDDTEDYINIMLDDKQNQLLQMGVMLSTATVVITAGVAVVGLFGMNIGISLYADPTTEEETRAANRKFWETTFGTVAGCVILYIIAMGWGKRSGLLQ

SEQ ID NO: 26510 - DNA, 1248 bp, Zea mays subsp. mays
  misc_feature (1)..(1248): Ceres Seq. ID no. 12344056
gtgctttcatcattccgctccccacacccctgttcgtggcggcctccgcccctccctctcaggctctcaccaccgtctgctggtggttgccgcggcgccgctcctccctcgtggtggcggtggaggactacggtcggggatcgacggcttcttcgtccgttggttggcaggcgaggcgatacatcaaccaaccaaaagaaatgtcagctggcaggcaagcatactggtgttaccagtgccgacagagggtgaggccacggggccgggagatggtttgtccctactgcgattctgggtttgtggctgaaatggatgatgtagatgctctcatgagccacttcgttgggacggatcctgatttccatcgcgacccacggttcgggatcatggaggcgatctccgccgtgatgcggcatggtatggcagggatgaaccgggaggttgatgtcagagggaggccgaacttcttttcagacctggagatggagttcggttcagggccatggctgctcttccgtggccagctccccggccacctcaccgaggacaacggtttcgatgttttcgtcaatggacgacgtggcggcggcggcggcggcggcggcatgaggagggccaacatcgcggactacttcgttggccctggactggatgatcttatcgagcagttgacccagaatgatcgccgaggaccaccacctgctgcacagtcctcgatcgacgctatgcccacagtgaagatcacccagaggcatctcagtggggactcgcactgccctatctgcaaggagaagttcgagatgggatccgaagaagcaagagagatgccatgcaagcacctgtaccactccgactgcatagttccttggttagagcagcacaattcctgccccgtttgccgttacgagctcccgccacagggctctgccaccggtgctagctgctcgcgcgcgagatcaaccgaccagagccagagctcaagtagttcaagcagcagcgggagaaccagtgggcgtcaaaggagaaggaacccgttctcgttcctgtggcctttccgctcatcaagtagttctcgctagattagcctctggtaatctttgctcaggttcgaaatactgtttgtttttttgggtcaaatacgctggtctaatgggctttaatgtggtgggatctcaatctgtactgtatggtttgttaatgatcgccacacgatgcttctccttgcaagtatattattattaccacggt

SEQ ID NO: 26511 - protein, 358 aa, Zea mays subsp. mays
  peptide (1)..(358): Ceres Seq. ID no. 12344057
  misc_feature (258)..(299): Pfam Name: RING finger Pfam Description: Zinc finger, C3HC4 type
  misc_feature (67)..(357): NCBI GI NO: 18405518 NR Description: expressed protein; protein id: At2g40830
  misc_feature (67)..(357): NCBI GI NO: 18410530 NR Description: Expressed protein; protein id: At3g56580
  misc_feature (71)..(353): NCBI GI NO: 34908968 NR Description: P0003D09.21
  misc_feature (196)..(343): NCBI GI NO: 33417148 NR Description: Unknown (protein for MGC:69096) [Xenopus laevis]
  misc_feature (69)..(105): NCBI GI NO: 33417148 NR Description: Unknown (protein for MGC:69096) [Xenopus laevis]
  misc_feature (74)..(357): NCBI GI NO: 11994207 NR Description: gene_id:MPN9.20~unknown protein
  misc_feature (74)..(357): NCBI GI NO: 15231003 NR Description: unknown protein; protein id: At3g19950
  misc_feature (196)..(336): NCBI GI NO: 21362321 NR Description: RIKEN cDNA 2610010O19 [Mus musculus]
  misc_feature (74)..(105): NCBI GI NO: 21362321 NR Description: RIKEN cDNA 2610010O19 [Mus musculus]
  misc_feature (67)..(263): NCBI GI NO: 11358386 NR Description: hypothetical protein T5P19
AFIIPLPTPLFVAASAPPSQALTTVCWWLPRRRSSLVVAVEDYGRGSTASSSVGWQARRYINQPKEMSAGRQAYWCYQCRQRVRPRGREMVCPYCDSGFVAEMDDVDALMSHFVGTDPDFHRDPRFGIMEAISAVMRHGMAGMNREVDVRGRPNFFSDLEMEFGSGPWLLFRGQLPGHLTEDNGFDVFVNGRRGGGGGGGGMRRANIADYFVGPGLDDLIEQLTQNDRRGPPPAAQSSIDAMPTVKITQRHLSGDSHCPICKEKFEMGSEEAREMPCKHLYHSDCIVPWLEQHNSCPVCRYELPPQGSATGASCSRARSTDQSQSSSSSSSSGRTSGRQRRRNPFSFLWPFRSSSSSR

SEQ ID NO: 26512 - protein, 292 aa, Zea mays subsp. mays
  peptide (1)..(292): Ceres Seq. ID no. 12344058
  misc_feature (192)..(233): Pfam Name: RING finger Pfam Description: Zinc finger, C3HC4 type
  misc_feature (1)..(291): NCBI GI NO: 18405518 NR Description: expressed protein; protein id: At2g40830
  misc_feature (1)..(291): NCBI GI NO: 18410530 NR Description: Expressed protein; protein id: At3g56580
  misc_feature (5)..(287): NCBI GI NO: 34908968 NR Description: P0003D09.21
  misc_feature (130)..(277): NCBI GI NO: 33417148 NR Description: Unknown (protein for MGC:69096) [Xenopus laevis]
  misc_feature (3)..(39): NCBI GI NO: 33417148 NR Description: Unknown (protein for MGC:69096) [Xenopus laevis]
  misc_feature (8)..(291): NCBI GI NO: 11994207 NR Description: gene_id:MPN9.20~unknown protein
  misc_feature (8)..(291): NCBI GI NO: 15231003 NR Description: unknown protein; protein id: At3g19950
  misc_feature (130)..(270): NCBI GI NO: 21362321 NR Description: RIKEN cDNA 2610010O19 [Mus musculus]
  misc_feature (8)..(39): NCBI GI NO: 21362321 NR Description: RIKEN cDNA 2610010O19 [Mus musculus]
  misc_feature (1)..(197): NCBI GI NO: 11358386 NR Description: hypothetical protein T5P19
MSAGRQAYWCYQCRQRVRPRGREMVCPYCDSGFVAEMDDVDALMSHFVGTDPDFHRDPRFGIMEAISAVMRHGMAGMNREVDVRGRPNFFSDLEMEFGSGPWLLFRGQLPGHLTEDNGFDVFVNGRRGGGGGGGGMRRANIADYFVGPGLDDLIEQLTQNDRRGPPPAAQSSIDAMPTVKITQRHLSGDSHCPICKEKFEMGSEEAREMPCKHLYHSDCIVPWLEQHNSCPVCRYELPPQGSATGASCSRARSTDQSQSSSSSSSSGRTSGRQRRRNPFSFLWPFRSSSSSR

SEQ ID NO: 26513 - protein, 269 aa, Zea mays subsp. mays
  peptide (1)..(269): Ceres Seq. ID no. 12344059
  misc_feature (169)..(210): Pfam Name: RING finger Pfam Description: Zinc finger, C3HC4 type
  misc_feature (1)..(268): NCBI GI NO: 18405518 NR Description: expressed protein; protein id: At2g40830
  misc_feature (1)..(268): NCBI GI NO: 18410530 NR Description: Expressed protein; protein id: At3g56580
  misc_feature (1)..(264): NCBI GI NO: 34908968 NR Description: P0003D09.21
  misc_feature (107)..(254): NCBI GI NO: 33417148 NR Description: Unknown (protein for MGC:69096) [Xenopus laevis]
  misc_feature (1)..(16): NCBI GI NO: 33417148 NR Description: Unknown (protein for MGC:69096) [Xenopus laevis]
  misc_feature (1)..(268): NCBI GI NO: 11994207 NR Description: gene_id:MPN9.20~unknown protein
  misc_feature (1)..(268): NCBI GI NO: 15231003 NR Description: unknown protein; protein id: At3g19950
  misc_feature (107)..(247): NCBI GI NO: 21362321 NR Description: RIKEN cDNA 2610010O19 [Mus musculus]
  misc_feature (1)..(16): NCBI GI NO: 21362321 NR Description: RIKEN cDNA 2610010O19 [Mus musculus]
  misc_feature (1)..(174): NCBI GI NO: 11358386 NR Description: hypothetical protein T5P19
MVCPYCDSGFVAEMDDVDALMSHFVGTDPDFHRDPRFGIMEAISAVMRHGMAGMNREVDVRGRPNFFSDLEMEFGSGPWLLFRGQLPGHLTEDNGFDVFVNGRRGGGGGGGGMRRANIADYFVGPGLDDLIEQLTQNDRRGPPPAAQSSIDAMPTVKITQRHLSGDSHCPICKEKFEMGSEEAREMPCKHLYHSDCIVPWLEQHNSCPVCRYELPPQGSATGASCSRARSTDQSQSSSSSSSSGRTSGRQRRRNPFSFLWPFRSSSSSR

SEQ ID NO: 26514 - DNA, 921 bp, Zea mays subsp. mays
  misc_feature (1)..(921): Ceres Seq. ID no. 12365504
gcacgagaccattacctagaacatcctaatcgaaaaaaacagccttgtgcattcatcactttcctgactcacctcactcgatcatcctccagtcttgtcgtcgcctgctagcttgaatattacgccagcatctcgccaggaaaatggcgggcactactccgcgccgcttgctcctggtcatcgtccccctcgtcgccgtcgtgccggcgtccgcaaaagactacatggtcggcgactcgtccgggtggaagtccggagtggactacgctgcctgggccaagggcaagccgttcgccatcggcgacacgctctcgttccagtacagctcggcgcactcggtgctggaggtgagcgaggcggaccacggcgcgtgctcggcgagcaacccgctgcggtcgcaccagggccagagcaccaccatcccgctcaccaaggccggcacccgctacttcatctgcggcgcccccggccactgcgcctcgggcatgaaggtcgccatcaccgtctccggcggcggcggcggcggcagcagcagcgccgacaacaccgcgactccgtcgggtccctccgtgcgggcgatgaacacgaagccggcgtccggtctccggtccggtggcgcgacgacgacggacgagtcggactccagcgcggctggcagcggcgcccgcctcgcgatgggcctgctgttcggggccgcgggcctcgctgcaataatgggctgaattgaggacccgctagggaaaaggcagtgcggtttcacgaatttcctatttagtttcctgcgttctctgcttgcgtccccgagtcgcgaggctgagtgttcggccgtgcatatttttcgtatacttttgctgtgtttttttggggctattcgttgttcaatactgttgtttcagaataaaatttcatccttgaccatcc

SEQ ID NO: 26515 - protein, 192 aa, Zea mays subsp. mays
  peptide (1)..(192): Ceres Seq. ID no. 12365505
  misc_feature (35)..(115): Pfam Name: Pfam Description:  Plastocyanin-like domain
  misc_feature (11)..(192): NCBI GI NO: 14140127 NR Description: uclacyanin 3-like protein [Oryza sativa]
  misc_feature (1)..(160): NCBI GI NO: 38346158 NR Description: OSJNBa0079A21.5
  misc_feature (9)..(188): NCBI GI NO: 34395239 NR Description: putative phytocyanin
  misc_feature (11)..(178): NCBI GI NO: 2493318 NR Description: Blue copper protein precursor
  misc_feature (7)..(187): NCBI GI NO: 38636763 NR Description: putative blue copper binding protein
  misc_feature (1)..(187): NCBI GI NO: 38636764 NR Description: putative blue copper binding protein
  misc_feature (8)..(187): NCBI GI NO: 38636761 NR Description: putative blue copper binding protein
  misc_feature (8)..(189): NCBI GI NO: 38636760 NR Description: putative blue copper binding protein
  misc_feature (3)..(173): NCBI GI NO: 15232287 NR Description: stellacyanin
  misc_feature (10)..(181): NCBI GI NO: 4104058 NR Description: blue copper-binding protein homolog
MAGTTPRRLLLVIVPLVAVVPASAKDYMVGDSSGWKSGVDYAAWAKGKPFAIGDTLSFQYSSAHSVLEVSEADHGACSASNPLRSHQGQSTTIPLTKAGTRYFICGAPGHCASGMKVAITVSGGGGGGSSSADNTATPSGPSVRAMNTKPASGLRSGGATTTDESDSSAAGSGARLAMGLLFGAAGLAAIMG

SEQ ID NO: 26516 - protein, 165 aa, Zea mays subsp. mays
  peptide (1)..(165): Ceres Seq. ID no. 12365506
  misc_feature (8)..(88): Pfam Name: Pfam Description:  Plastocyanin-like domain
  misc_feature (1)..(165): NCBI GI NO: 14140127 NR Description: uclacyanin 3-like protein [Oryza sativa]
  misc_feature (1)..(133): NCBI GI NO: 38346158 NR Description: OSJNBa0079A21.5
  misc_feature (1)..(161): NCBI GI NO: 34395239 NR Description: putative phytocyanin
  misc_feature (1)..(151): NCBI GI NO: 2493318 NR Description: Blue copper protein precursor
  misc_feature (1)..(160): NCBI GI NO: 38636763 NR Description: putative blue copper binding protein
  misc_feature (1)..(160): NCBI GI NO: 38636764 NR Description: putative blue copper binding protein
  misc_feature (1)..(160): NCBI GI NO: 38636761 NR Description: putative blue copper binding protein
  misc_feature (1)..(162): NCBI GI NO: 38636760 NR Description: putative blue copper binding protein
  misc_feature (1)..(146): NCBI GI NO: 15232287 NR Description: stellacyanin
  misc_feature (1)..(154): NCBI GI NO: 4104058 NR Description: blue copper-binding protein homolog
MVGDSSGWKSGVDYAAWAKGKPFAIGDTLSFQYSSAHSVLEVSEADHGACSASNPLRSHQGQSTTIPLTKAGTRYFICGAPGHCASGMKVAITVSGGGGGGSSSADNTATPSGPSVRAMNTKPASGLRSGGATTTDESDSSAAGSGARLAMGLLFGAAGLAAIMG

SEQ ID NO: 26517 - DNA, 1215 bp, Zea mays subsp. mays
  misc_feature (1)..(1215): Ceres Seq. ID no. 12407776
acccacccgttttatccacgcacggcgtcgaacaccccgcggtcgctcacgtgaggcgccaccccgcgcacccagtcagcgcccgcctccaccacccacccacacgacaaaaatccgccatggccttcgcgctcaaggccgccgccgcggggtcggcgtcgttctccgccgcggggccgaggcggcgcgccgcggcgactggtagggtctcgttccggagcgccgcgcccgtggtcgccgtcagggccgcggcggcggcggccgccgctgtggcggaggacaagcgcagcatctccggcaccttcgccgagctcaggcagcaggggaagactgccttgattcccttcatcactgctggagaccctgacttggccaccacagcaaaagcactcaggatccttgatgcgtgtggttcagacgtgatcgaactgggtgtgccttactccgatccattggctgacggccctgttattcaggcctccgcgacgcgcgctctggcaaagggcaccacatttgaggatgtcatctccatggtaaagggggtgatacctgatctgtcctgccctgtagcgcttttcacatattacaacccgatcctgaagcgtggtgtccccaacttcatgagtattgttaaagaagctggggtacacggtcttgtggtaccagatgttcctttggaagagacagatgtcttgaggagtgaggctgccaaaaacaacctagagctggtgctattgacaacaccgactacaccaaatgaaagaatggagaaaattgcacaggcttcagaaggatttatttatcttgtaagcactgttggagttactggtacacgtgcaaatgtaagcggcaaggtgcaatctcttcttcaggatatcaagaaggtgacagaaaaacccgtggctgttggctttggtgtgtcgactccagagcatgtccggcagattgcaggatggggcgcagatggtgtgattatcggtagcgcagtgatgaagacgttggaggaagctgcttctccagaagaaggattgaagaagctagaagagttcgccaagaacctgaaggccgcattgccgtgaaccaaccattttcgttagcaaagaaattaagattttttttttcctttcaatcttggctttcagggttgttggttgttgtgtagtgaaaataattgtgtccctatgttgaatgctcaaatgaataaatcaagatccc

SEQ ID NO: 26518 - protein, 358 aa, Zea mays subsp. mays
  peptide (1)..(358): Ceres Seq. ID no. 12407777
  misc_feature (101)..(358): Pfam Name: Pfam Description:  Tryptophan synthase alpha chain
  misc_feature (38)..(358): NCBI GI NO: 34393530 NR Description: putative tryptophan synthase alpha chain
  misc_feature (90)..(358): NCBI GI NO: 34897224 NR Description: putative indole-3-glycerol phosphate lyase
  misc_feature (86)..(358): NCBI GI NO: 11993328 NR Description: putative tryptophan synthase alpha [Zea mays]
  misc_feature (97)..(357): NCBI GI NO: 15235430 NR Description: tryptophan synthase alpha 1-like protein
  misc_feature (68)..(357): NCBI GI NO: 21593559 NR Description: tryptophan synthase alpha chain
  misc_feature (68)..(357): NCBI GI NO: 18410104 NR Description: tryptophan synthase alpha chain
  misc_feature (40)..(358): NCBI GI NO: 34897218 NR Description: putative indole-3-glycerol phosphate lyase
  misc_feature (40)..(358): NCBI GI NO: 33383132 NR Description: Indole synthase [Triticum aestivum]
  misc_feature (60)..(358): NCBI GI NO: 11993325 NR Description: indole-3-glycerol phosphate lyase [Zea mays]
  misc_feature (40)..(358): NCBI GI NO: 34897216 NR Description: putative indole-3-glycerol phosphate lyase
PPVLSTHGVEHPAVAHVRRHPAHPVSARLHHPPTRQKSAMAFALKAAAAGSASFSAAGPRRRAAATGRVSFRSAAPVVAVRAAAAAAAAVAEDKRSISGTFAELRQQGKTALIPFITAGDPDLATTAKALRILDACGSDVIELGVPYSDPLADGPVIQASATRALAKGTTFEDVISMVKGVIPDLSCPVALFTYYNPILKRGVPNFMSIVKEAGVHGLVVPDVPLEETDVLRSEAAKNNLELVLLTTPTTPNERMEKIAQASEGFIYLVSTVGVTGTRANVSGKVQSLLQDIKKVTEKPVAVGFGVSTPEHVRQIAGWGADGVIIGSAVMKTLEEAASPEEGLKKLEEFAKNLKAALP

SEQ ID NO: 26519 - protein, 319 aa, Zea mays subsp. mays
  peptide (1)..(319): Ceres Seq. ID no. 12407778
  misc_feature (62)..(319): Pfam Name: Pfam Description:  Tryptophan synthase alpha chain
  misc_feature (1)..(319): NCBI GI NO: 34393530 NR Description: putative tryptophan synthase alpha chain
  misc_feature (51)..(319): NCBI GI NO: 34897224 NR Description: putative indole-3-glycerol phosphate lyase
  misc_feature (47)..(319): NCBI GI NO: 11993328 NR Description: putative tryptophan synthase alpha [Zea mays]
  misc_feature (58)..(318): NCBI GI NO: 15235430 NR Description: tryptophan synthase alpha 1-like protein
  misc_feature (29)..(318): NCBI GI NO: 21593559 NR Description: tryptophan synthase alpha chain
  misc_feature (29)..(318): NCBI GI NO: 18410104 NR Description: tryptophan synthase alpha chain
  misc_feature (1)..(319): NCBI GI NO: 34897218 NR Description: putative indole-3-glycerol phosphate lyase
  misc_feature (1)..(319): NCBI GI NO: 33383132 NR Description: Indole synthase [Triticum aestivum]
  misc_feature (21)..(319): NCBI GI NO: 11993325 NR Description: indole-3-glycerol phosphate lyase [Zea mays]
  misc_feature (1)..(319): NCBI GI NO: 34897216 NR Description: putative indole-3-glycerol phosphate lyase
MAFALKAAAAGSASFSAAGPRRRAAATGRVSFRSAAPVVAVRAAAAAAAAVAEDKRSISGTFAELRQQGKTALIPFITAGDPDLATTAKALRILDACGSDVIELGVPYSDPLADGPVIQASATRALAKGTTFEDVISMVKGVIPDLSCPVALFTYYNPILKRGVPNFMSIVKEAGVHGLVVPDVPLEETDVLRSEAAKNNLELVLLTTPTTPNERMEKIAQASEGFIYLVSTVGVTGTRANVSGKVQSLLQDIKKVTEKPVAVGFGVSTPEHVRQIAGWGADGVIIGSAVMKTLEEAASPEEGLKKLEEFAKNLKAALP

SEQ ID NO: 26520 - protein, 182 aa, Zea mays subsp. mays
  peptide (1)..(182): Ceres Seq. ID no. 12407779
  misc_feature (1)..(182): Pfam Name: Pfam Description:  Tryptophan synthase alpha chain
  misc_feature (1)..(182): NCBI GI NO: 34393530 NR Description: putative tryptophan synthase alpha chain
  misc_feature (1)..(182): NCBI GI NO: 34897224 NR Description: putative indole-3-glycerol phosphate lyase
  misc_feature (1)..(182): NCBI GI NO: 11993328 NR Description: putative tryptophan synthase alpha [Zea mays]
  misc_feature (1)..(181): NCBI GI NO: 15235430 NR Description: tryptophan synthase alpha 1-like protein
  misc_feature (1)..(181): NCBI GI NO: 21593559 NR Description: tryptophan synthase alpha chain
  misc_feature (1)..(181): NCBI GI NO: 18410104 NR Description: tryptophan synthase alpha chain
  misc_feature (1)..(182): NCBI GI NO: 34897218 NR Description: putative indole-3-glycerol phosphate lyase
  misc_feature (1)..(182): NCBI GI NO: 33383132 NR Description: Indole synthase [Triticum aestivum]
  misc_feature (1)..(182): NCBI GI NO: 11993325 NR Description: indole-3-glycerol phosphate lyase [Zea mays]
  misc_feature (1)..(182): NCBI GI NO: 34897216 NR Description: putative indole-3-glycerol phosphate lyase
MVKGVIPDLSCPVALFTYYNPILKRGVPNFMSIVKEAGVHGLVVPDVPLEETDVLRSEAAKNNLELVLLTTPTTPNERMEKIAQASEGFIYLVSTVGVTGTRANVSGKVQSLLQDIKKVTEKPVAVGFGVSTPEHVRQIAGWGADGVIIGSAVMKTLEEAASPEEGLKKLEEFAKNLKAALP

SEQ ID NO: 26521 - DNA, 1705 bp, Zea mays subsp. mays
  misc_feature (1)..(1705): Ceres Seq. ID no. 12409831
  misc_feature (893)..(893): n is a, c, t, g, unknown, or other
ggctatccaggctccagtcgtccccggattagttgtactgtacattgttcctgcgaagacactgggtcgtccgggtcaatcggcagcttgaacaagccatggcggcgcaccggccgaacgccgcggcgccgctgctcgccaagctcgacgccaccgccacgccgccggcgaagcgcaacaagtaccccttcttctgcgccgtgctcgcatccatgacctccgtgctcatgggctacaacgtcgcggtgacgagcggcgcgcagatcttcatggcggaggacctcgggatgagcgacgcgcagatcgaggtgctctcgggggtcatcaacatatactcgctcgtcggcgcgctgctggcaggctggacctccgaccgtctcggccggcgcctcaccatcgtcctcgccaacgccttcttcctcgtcggcccgctcgccatggcgcttgccggcgggtacaccttgctcatggtgggccgcttcatcgccggcgtcggcgtcgggtacgcgctcgtcatcgcgccagtctacgctgccgagatcgcgccggcgtcatcccgcgggctcctcagctcacttcctgagatttttatcaacactggggtgatgctgagttacgtgtcgaatctcgccttctcggggctgcccgtgcacctgtcgtggcgggtgatgttcgcggcgggcgtggtgcccaccgtgttcatggcggccggggtgttcaccatgccggagtcgccgcggtggctggttatgaagggccgggtcgccgaggccaaggccgtgctcgacaagacgtcggacacgcccgctgaggccgagcagcggctgctcgagatcgaggacgtcgtgatggacagcagcggcgacagcggcgcgtggaaggaggtggcgacnaaggctggcgtccagcgcgtgttggcaaccgtggtgacgctgcagttcttccagcaggcgtcaggcatcgactcggtggtgctgtacggcccgcgcgttctcgccatggctggtgtcacgtccaacagcttgctcctgagcctcaacatcctcttcggcgttgccaaggttggctccatcctcatcgccatggcgctagccgaccgcgtcgggcggcgcccactcctgctggtcagcactagcggcatgacggtggcgctgctcgtcctaggctccctgttcgcggtgtttgcgggagccaaggataacgctgcggtggctgcggtgagtgtggtggccgtcatggcgttcgtgatggccttctccgtcggcttgggccctctggcgtgggtgtacagctccgagatactgccgctccgacttcgcgggcagggtgccggggctcggcaccgccatgaaccggatcatgagcggcgtgatcaccatgaccttcatctcgctctaccagggcatcaccatggccggcgcgttctacctctacgccgccatcgccgccgcgtcgttcgtgttcgtgtacgcctgcctgccggagaccaggggccggagcctcgaggacatggaagagctcttccacaccaagtgatttcgtatgtgctgatccaaccaccatttggttcaattctcgattcagtggcaatgcagattttgccattgttggagctggttttgagcttggtcgttatcatcatgggcacatgcgtatacaattgcaagattatattgaaatcgattgattgagccggttggcgtcg

SEQ ID NO: 26522 - protein, 530 aa, Zea mays subsp. mays
  peptide (1)..(530): Ceres Seq. ID no. 12409832
  misc_feature (33)..(410): Pfam Name: and other Pfam Description: Sugar
  misc_feature (25)..(410): NCBI GI NO: 28316433 NR Description: sorbitol transporter [Prunus cerasus]
  misc_feature (13)..(410): NCBI GI NO: 30025133 NR Description: putative sorbitol transporter [Prunus cerasus]
  misc_feature (19)..(410): NCBI GI NO: 12004316 NR Description: mannitol transporter [Apium graveolens var. dulce]
  misc_feature (22)..(413): NCBI GI NO: 33636088 NR Description: sorbitol-like transporter [Glycine max]
  misc_feature (39)..(410): NCBI GI NO: 29691878 NR Description: sorbitol transporter [Malus x domestica]
  misc_feature (20)..(385): NCBI GI NO: 15230212 NR Description: sugar transport, putative; protein id: At3g18830.1
  misc_feature (53)..(410): NCBI GI NO: 34905902 NR Description: similar to myo-inositol transporter 2
  misc_feature (18)..(361): NCBI GI NO: 15226682 NR Description: putative sugar transporter; protein id: At2g16120
  misc_feature (12)..(389): NCBI GI NO: 34392081 NR Description: polyol transporter [Plantago major]
  misc_feature (1)..(357): NCBI GI NO: 33413752 NR Description: putative mannitol transporter [Orobanche ramosa]
  misc_feature (265)..(265): Xaa is any aa, unknown or other
MAAHRPNAAAPLLAKLDATATPPAKRNKYPFFCAVLASMTSVLMGYNVAVTSGAQIFMAEDLGMSDAQIEVLSGVINIYSLVGALLAGWTSDRLGRRLTIVLANAFFLVGPLAMALAGGYTLLMVGRFIAGVGVGYALVIAPVYAAEIAPASSRGLLSSLPEIFINTGVMLSYVSNLAFSGLPVHLSWRVMFAAGVVPTVFMAAGVFTMPESPRWLVMKGRVAEAKAVLDKTSDTPAEAEQRLLEIEDVVMDSSGDSGAWKEVAXKAGVQRVLATVVTLQFFQQASGIDSVVLYGPRVLAMAGVTSNSLLLSLNILFGVAKVGSILIAMALADRVGRRPLLLVSTSGMTVALLVLGSLFAVFAGAKDNAAVAAVSVVAVMAFVMAFSVGLGPLAWVYSSEILPLRLRGQGAGARHRHEPDHERRDHHDLHLALPGHHHGRRVLPLRRHRRRVVRVRVRLPAGDQGPEPRGHGRALPHQVISYVLIQPPFGSILDSVAMQILPLLELVLSLVVIIMGTCVYNCKIILKSID

SEQ ID NO: 26523 - protein, 492 aa, Zea mays subsp. mays
  peptide (1)..(492): Ceres Seq. ID no. 12409833
  misc_feature (1)..(372): Pfam Name: and other Pfam Description: Sugar
  misc_feature (1)..(372): NCBI GI NO: 28316433 NR Description: sorbitol transporter [Prunus cerasus]
  misc_feature (1)..(372): NCBI GI NO: 30025133 NR Description: putative sorbitol transporter [Prunus cerasus]
  misc_feature (1)..(372): NCBI GI NO: 12004316 NR Description: mannitol transporter [Apium graveolens var. dulce]
  misc_feature (1)..(375): NCBI GI NO: 33636088 NR Description: sorbitol-like transporter [Glycine max]
  misc_feature (1)..(372): NCBI GI NO: 29691878 NR Description: sorbitol transporter [Malus x domestica]
  misc_feature (1)..(347): NCBI GI NO: 15230212 NR Description: sugar transport, putative; protein id: At3g18830.1
  misc_feature (15)..(372): NCBI GI NO: 34905902 NR Description: similar to myo-inositol transporter 2
  misc_feature (1)..(323): NCBI GI NO: 15226682 NR Description: putative sugar transporter; protein id: At2g16120
  misc_feature (1)..(351): NCBI GI NO: 34392081 NR Description: polyol transporter [Plantago major]
  misc_feature (1)..(319): NCBI GI NO: 33413752 NR Description: putative mannitol transporter [Orobanche ramosa]
  misc_feature (227)..(227): Xaa is any aa, unknown or other
MTSVLMGYNVAVTSGAQIFMAEDLGMSDAQIEVLSGVINIYSLVGALLAGWTSDRLGRRLTIVLANAFFLVGPLAMALAGGYTLLMVGRFIAGVGVGYALVIAPVYAAEIAPASSRGLLSSLPEIFINTGVMLSYVSNLAFSGLPVHLSWRVMFAAGVVPTVFMAAGVFTMPESPRWLVMKGRVAEAKAVLDKTSDTPAEAEQRLLEIEDVVMDSSGDSGAWKEVAXKAGVQRVLATVVTLQFFQQASGIDSVVLYGPRVLAMAGVTSNSLLLSLNILFGVAKVGSILIAMALADRVGRRPLLLVSTSGMTVALLVLGSLFAVFAGAKDNAAVAAVSVVAVMAFVMAFSVGLGPLAWVYSSEILPLRLRGQGAGARHRHEPDHERRDHHDLHLALPGHHHGRRVLPLRRHRRRVVRVRVRLPAGDQGPEPRGHGRALPHQVISYVLIQPPFGSILDSVAMQILPLLELVLSLVVIIMGTCVYNCKIILKSID

SEQ ID NO: 26524 - protein, 487 aa, Zea mays subsp. mays
  peptide (1)..(487): Ceres Seq. ID no. 12409834
  misc_feature (1)..(367): Pfam Name: and other Pfam Description: Sugar
  misc_feature (1)..(367): NCBI GI NO: 28316433 NR Description: sorbitol transporter [Prunus cerasus]
  misc_feature (1)..(367): NCBI GI NO: 30025133 NR Description: putative sorbitol transporter [Prunus cerasus]
  misc_feature (1)..(367): NCBI GI NO: 12004316 NR Description: mannitol transporter [Apium graveolens var. dulce]
  misc_feature (1)..(370): NCBI GI NO: 33636088 NR Description: sorbitol-like transporter [Glycine max]
  misc_feature (1)..(367): NCBI GI NO: 29691878 NR Description: sorbitol transporter [Malus x domestica]
  misc_feature (1)..(342): NCBI GI NO: 15230212 NR Description: sugar transport, putative; protein id: At3g18830.1
  misc_feature (10)..(367): NCBI GI NO: 34905902 NR Description: similar to myo-inositol transporter 2
  misc_feature (1)..(318): NCBI GI NO: 15226682 NR Description: putative sugar transporter; protein id: At2g16120
  misc_feature (1)..(346): NCBI GI NO: 34392081 NR Description: polyol transporter [Plantago major]
  misc_feature (1)..(314): NCBI GI NO: 33413752 NR Description: putative mannitol transporter [Orobanche ramosa]
  misc_feature (222)..(222): Xaa is any aa, unknown or other
MGYNVAVTSGAQIFMAEDLGMSDAQIEVLSGVINIYSLVGALLAGWTSDRLGRRLTIVLANAFFLVGPLAMALAGGYTLLMVGRFIAGVGVGYALVIAPVYAAEIAPASSRGLLSSLPEIFINTGVMLSYVSNLAFSGLPVHLSWRVMFAAGVVPTVFMAAGVFTMPESPRWLVMKGRVAEAKAVLDKTSDTPAEAEQRLLEIEDVVMDSSGDSGAWKEVAXKAGVQRVLATVVTLQFFQQASGIDSVVLYGPRVLAMAGVTSNSLLLSLNILFGVAKVGSILIAMALADRVGRRPLLLVSTSGMTVALLVLGSLFAVFAGAKDNAAVAAVSVVAVMAFVMAFSVGLGPLAWVYSSEILPLRLRGQGAGARHRHEPDHERRDHHDLHLALPGHHHGRRVLPLRRHRRRVVRVRVRLPAGDQGPEPRGHGRALPHQVISYVLIQPPFGSILDSVAMQILPLLELVLSLVVIIMGTCVYNCKIILKSID

SEQ ID NO: 26525 - DNA, 752 bp, Zea mays subsp. mays
  misc_feature (1)..(752): Ceres Seq. ID no. 12414114
aggatttcagccattcaggagggccaccgtacgcagcgagaccagccagcaggcggcgatgttcgcgacggcggtgcggtgggcggcgaagaaggggaagcccaagatggcgccgatcgagctgacggcgccgccggagcaggcgcagtccatcacgcgcgccatcttcgacgccgtccgggagcacggcccgctcaccgtctccgacgtctgggaccacgtcaaggatgtcgggcttcgaggtctggcaagcaagaggcagatgaagatcatgctgcggtggatgagggagcgccagaagctaaagctcatctgcgaccacgacggcccgcacaagcagttcctctacaccacctggtttaccaaccccaggaacgcgccgcagaggcccaatccgaagcccaatgtcaaagcggataagctccccaccttcccttccccttcgaagcaactgtgacgaggacttgtttctgtgctctctgcacttgtttctgctgcccccgacataatgttcagcatggaaacaaatgctagatttgttcaggcgaatttaggcttgttatggctatattgttctatgcaaacacctaattgttgtctatgcatatataaaccatattatttgagatgtataacctaaggttgttccctgaggattaaagccagctgtttggacggctacagctgcaattcatagaaacaaaaatattgtagaaacattataaacctgtacggattaaagtcaagcgaat

SEQ ID NO: 26526 - protein, 151 aa, Zea mays subsp. mays
  peptide (1)..(151): Ceres Seq. ID no. 12414115
  misc_feature (20)..(130): NCBI GI NO: 38637563 NR Description: unknown protein
  misc_feature (26)..(130): NCBI GI NO: 15239880 NR Description: putative protein; protein id: At5g49410
  misc_feature (26)..(130): NCBI GI NO: 21594042 NR Description: unknown [Arabidopsis thaliana]
  misc_feature (25)..(137): NCBI GI NO: 18410491 NR Description: expressed protein; protein id: At1g73940
  misc_feature (26)..(119): NCBI GI NO: 27573361 NR Description: unknown protein
GFQPFRRATVRSETSQQAAMFATAVRWAAKKGKPKMAPIELTAPPEQAQSITRAIFDAVREHGPLTVSDVWDHVKDVGLRGLASKRQMKIMLRWMRERQKLKLICDHDGPHKQFLYTTWFTNPRNAPQRPNPKPNVKADKLPTFPSPSKQL

SEQ ID NO: 26527 - protein, 139 aa, Zea mays subsp. mays
  peptide (1)..(139): Ceres Seq. ID no. 12414116
RISAIQEGHRTQRDQPAGGDVRDGGAVGGEEGEAQDGADRADGAAGAGAVHHARHLRRRPGARPAHRLRRLGPRQGCRASRSGKQEADEDHAAVDEGAPEAKAHLRPRRPAQAVPLHHLVYQPQERAAEAQSEAQCQSG

SEQ ID NO: 26528 - protein, 132 aa, Zea mays subsp. mays
  peptide (1)..(132): Ceres Seq. ID no. 12414117
  misc_feature (1)..(111): NCBI GI NO: 38637563 NR Description: unknown protein
  misc_feature (7)..(111): NCBI GI NO: 15239880 NR Description: putative protein; protein id: At5g49410
  misc_feature (7)..(111): NCBI GI NO: 21594042 NR Description: unknown [Arabidopsis thaliana]
  misc_feature (6)..(118): NCBI GI NO: 18410491 NR Description: expressed protein; protein id: At1g73940
  misc_feature (7)..(100): NCBI GI NO: 27573361 NR Description: unknown protein
MFATAVRWAAKKGKPKMAPIELTAPPEQAQSITRAIFDAVREHGPLTVSDVWDHVKDVGLRGLASKRQMKIMLRWMRERQKLKLICDHDGPHKQFLYTTWFTNPRNAPQRPNPKPNVKADKLPTFPSPSKQL

SEQ ID NO: 26529 - DNA, 1600 bp, Zea mays subsp. mays
  misc_feature (1)..(1600): Ceres Seq. ID no. 12362132
gaacctctccttccatctcctccccggccgattcctccagtctccagccaccttcaactgccggccgcaagtggccccgcgtctcacccctaaccccagtgaagaatctaggcgtcgtctatccagccccgtcatcatcaccatggaggagcatgggctgtggtccagcggggccagcgacaagaacaagtccatggttgagcagctgcagaggtacggggtcatcaggtcgaccaaagtcgcggaggtgatggaggccatcgacagggggttgttcgtgccacctgggggctcgccataccacgatagccccatgccgattgggtacaatgccaccatatcagcaccacacatgcatgcggcttgcctggagctactggagaagaatcttcagcctggaatgcgagctctcgatgttgggtcaggcactggatacctaactgcttgctttgcactgatggttggaccagaagggcgagcagttggtgtcgaacatatcccatagttggttgctacttctactgaaaacatcaagaaaagtgcagcagccccacatctaaatgatggatccctcagtatacacgtttctggtaaatattagcttgttttgtgctaccataaaactcagccatgctggagcagcaaatttccaacaggtccgatgttgacttaggtgtacatataacaacttagttgctgtgagctgagttatagttcagatgaatatatcattttaatagcacttatcctttttcttttattgactgaataaaggaacctgattcagctaatgaggttgtccatactgctctactagcagggttttgttatattgcttgtcataccatgtggatctcccccatttgtgaggttcttgtcctcgtatgatgaaatttgctgcagctttagagcctgtttggttcgtggctaactgtgcacactttgcttaagtttagtcgtttaaattgaagaactaaccttagacagaaaagttagacaaagtgtgacaatttatgcagagaaccaaacatacctttagtattccttagtctggcactctggccttatgtgcattcagcattgttggttgttctatatacccttaacacttgatgcaccaagagatgtttaaaatggatgcagatggcagggaaggttggccagaactggcaccctatgaagccatccatgttggagctgcagcaccgcagatcccggaggcgctgatcgagcagctgaagcccggcggcagaatggtgatccctgtcgggacagtcttccaggagctgaaggttgtggacaagaaattggatggcactgtcagcataagagacgaaacgtccgtgcgctatgtgccgctcactagcaaggacgcccagttgcacgcaagctgagtgatctatcatgtcaaaaaaaaaagttatcctcacctgacaaggtgaggcattcaatcgaatcgctacccttgtaaatgtattaatcctactgtctcagtaaatgcgctggcttggaaataatgtaaatgatggaacatcatggaacgtttgtttcccttcagctgccccggtgttcttacttactatgcaacttgtttcttcag

SEQ ID NO: 26530 - protein, 167 aa, Zea mays subsp. mays
  peptide (1)..(167): Ceres Seq. ID no. 12362133
  misc_feature (60)..(167): Pfam Name: D-aspartate Pfam Description: Protein-L-isoaspartate
  misc_feature (54)..(167): NCBI GI NO: 2499570 NR Description: PROTEIN-L-ISOASPARTATE O-METHYLTRANSFERASE
  misc_feature (54)..(167): NCBI GI NO: 38345249 NR Description: OSJNBb0011N17.10
  misc_feature (54)..(167): NCBI GI NO: 1322021 NR Description: L-isoaspartyl methyltransferase
  misc_feature (54)..(167): NCBI GI NO: 22331684 NR Description: similar to protein-L-isoaspartate
  misc_feature (56)..(167): NCBI GI NO: 26451260 NR Description: unknown protein [Arabidopsis thaliana]
  misc_feature (54)..(167): NCBI GI NO: 19070126 NR Description: protein carboxyl-o-methyltransferase
  misc_feature (54)..(167): NCBI GI NO: 18859221 NR Description: l-isoaspartyl protein carboxyl methyltransferase
  misc_feature (54)..(167): NCBI GI NO: 417489 NR Description: PROTEIN-L-ISOASPARTATE
  misc_feature (54)..(167): NCBI GI NO: 29436595 NR Description: protein-L-isoaspartate
  misc_feature (54)..(167): NCBI GI NO: 482365 NR Description: protein-L-isoaspartate
NLSFHLLPGRFLQSPATFNCRPQVAPRLTPNPSEESRRRLSSPVIITMEEHGLWSSGASDKNKSMVEQLQRYGVIRSTKVAEVMEAIDRGLFVPPGGSPYHDSPMPIGYNATISAPHMHAACLELLEKNLQPGMRALDVGSGTGYLTACFALMVGPEGRAVGVEHIP

SEQ ID NO: 26531 - protein, 120 aa, Zea mays subsp. mays
  peptide (1)..(120): Ceres Seq. ID no. 12362134
  misc_feature (13)..(120): Pfam Name: D-aspartate Pfam Description: Protein-L-isoaspartate
  misc_feature (7)..(120): NCBI GI NO: 2499570 NR Description: PROTEIN-L-ISOASPARTATE O-METHYLTRANSFERASE
  misc_feature (7)..(120): NCBI GI NO: 38345249 NR Description: OSJNBb0011N17.10
  misc_feature (7)..(120): NCBI GI NO: 1322021 NR Description: L-isoaspartyl methyltransferase
  misc_feature (7)..(120): NCBI GI NO: 22331684 NR Description: similar to protein-L-isoaspartate
  misc_feature (9)..(120): NCBI GI NO: 26451260 NR Description: unknown protein [Arabidopsis thaliana]
  misc_feature (7)..(120): NCBI GI NO: 19070126 NR Description: protein carboxyl-o-methyltransferase
  misc_feature (7)..(120): NCBI GI NO: 18859221 NR Description: l-isoaspartyl protein carboxyl methyltransferase
  misc_feature (7)..(120): NCBI GI NO: 417489 NR Description: PROTEIN-L-ISOASPARTATE
  misc_feature (7)..(120): NCBI GI NO: 29436595 NR Description: protein-L-isoaspartate
  misc_feature (7)..(120): NCBI GI NO: 482365 NR Description: protein-L-isoaspartate
MEEHGLWSSGASDKNKSMVEQLQRYGVIRSTKVAEVMEAIDRGLFVPPGGSPYHDSPMPIGYNATISAPHMHAACLELLEKNLQPGMRALDVGSGTGYLTACFALMVGPEGRAVGVEHIP

SEQ ID NO: 26532 - protein, 103 aa, Zea mays subsp. mays
  peptide (1)..(103): Ceres Seq. ID no. 12362135
  misc_feature (1)..(103): Pfam Name: D-aspartate Pfam Description: Protein-L-isoaspartate
  misc_feature (1)..(103): NCBI GI NO: 2499570 NR Description: PROTEIN-L-ISOASPARTATE O-METHYLTRANSFERASE
  misc_feature (1)..(103): NCBI GI NO: 38345249 NR Description: OSJNBb0011N17.10
  misc_feature (1)..(103): NCBI GI NO: 1322021 NR Description: L-isoaspartyl methyltransferase
  misc_feature (1)..(103): NCBI GI NO: 22331684 NR Description: similar to protein-L-isoaspartate
  misc_feature (1)..(103): NCBI GI NO: 26451260 NR Description: unknown protein [Arabidopsis thaliana]
  misc_feature (1)..(103): NCBI GI NO: 19070126 NR Description: protein carboxyl-o-methyltransferase
  misc_feature (1)..(103): NCBI GI NO: 18859221 NR Description: l-isoaspartyl protein carboxyl methyltransferase
  misc_feature (1)..(103): NCBI GI NO: 417489 NR Description: PROTEIN-L-ISOASPARTATE
  misc_feature (1)..(103): NCBI GI NO: 29436595 NR Description: protein-L-isoaspartate
  misc_feature (1)..(103): NCBI GI NO: 482365 NR Description: protein-L-isoaspartate
MVEQLQRYGVIRSTKVAEVMEAIDRGLFVPPGGSPYHDSPMPIGYNATISAPHMHAACLELLEKNLQPGMRALDVGSGTGYLTACFALMVGPEGRAVGVEHIP

SEQ ID NO: 26533 - DNA, 1259 bp, Zea mays subsp. mays
  misc_feature (1)..(1259): Ceres Seq. ID no. 12358301
agtgtctcctcccttccctctagtattttacagtattttactcgctgcctgcgttccaaaacctttcgtcttttcccccgccgtctacaaagacttcacactcgcagtcgcagccgcaggctgctccggcagactccttcaccgcgaagacttctcctctcctctctcctctctcccttccactcgcgctctcctggataccgcgcgcggcgacgagatggcgatagatcacgggacccctctcgggctgaagcggagaggcgccatgggcggaggtggcgagtgctgcgacgacggcagcgagacccggcggttgccgccgtggctgaggccgctgctgtccgcgagcttcttcgtccaatgcagggtccacgccgacgcgcacaagagcgagtgcaacatgtactgcctcgactgcatgggcgacgctctctgcgcgctctgcctcgccgcgcgccaccgcgaccaccactccatccagatacggaggtcgtcgtaccacgacgtgatccgggtgtcggagatacagaaggtgctggacatcgccggcgtgcagacgtacatcatcaacagcgcgcgcgtggtgttcctgaacgagcggccgcagccccgcccgggcaagggcgtcaccaacacctacgaggtctgcgagcgcagcctcctcgactgcttccgcttctgctcccttgggtgcaagatagtgggcacggcccgtggctaccgtcctgggaagaagaagcacggcggcggcggcggtaacaagaagagggcggcgccggcgccggcgcttaaggacgtgcggtctgactcggaggactcgtgcaccagcaccagcggcgccagcagcgacaagagcagcgtcgtgcagagctcccctccgccgccgacctctgccagccaccgcccccccgggaacaagcgccggaagggcgtcccgcaccggtcgcccttgggcagcctcatcgtcgagctctaggactcttcgtcagcgccaaggcaaggcaaggcaacgcactctgtactgtacatgacataccccccgaagagaagggaataacaaacagtaagcctctggacgtggagggcgaagggcgacagcggtaagccgtaagatcggacaatccttagttttgcttcttctcaggttttgttttgcttttacagttactaccactctagcagtggtaccatcagtaagataaccgcgactaagttttgcagccttgtacattgtaatattattattactatagaccagg

SEQ ID NO: 26534 - protein, 324 aa, Zea mays subsp. mays
  peptide (1)..(324): Ceres Seq. ID no. 12358302
  misc_feature (106)..(311): Pfam Name: Pfam Description:  Protein of unknown function, DUF597
  misc_feature (86)..(323): NCBI GI NO: 38346725 NR Description: OSJNBa0086O06.23
  misc_feature (73)..(323): NCBI GI NO: 37537092 NR Description: unknown protein
  misc_feature (101)..(323): NCBI GI NO: 6714272 NR Description: F6N18.8 [Arabidopsis thaliana]
  misc_feature (101)..(323): NCBI GI NO: 18398555 NR Description: expressed protein; protein id: At1g32700
  misc_feature (101)..(323): NCBI GI NO: 21554139 NR Description: unknown [Arabidopsis thaliana]
  misc_feature (84)..(318): NCBI GI NO: 15236696 NR Description: putative protein; protein id: At4g17900.1
  misc_feature (106)..(261): NCBI GI NO: 18394936 NR Description: expressed protein; protein id: At1g21000
  misc_feature (106)..(261): NCBI GI NO: 25337907 NR Description: hypothetical protein F9H16
  misc_feature (106)..(261): NCBI GI NO: 21537073 NR Description: unknown [Arabidopsis thaliana]
  misc_feature (106)..(312): NCBI GI NO: 18411153 NR Description: expressed protein; protein id: At1g76590
VSPPFPLVFYSILLAACVPKPFVFSPAVYKDFTLAVAAAGCSGRLLHREDFSSPLSSLPSTRALLDTARGDEMAIDHGTPLGLKRRGAMGGGGECCDDGSETRRLPPWLRPLLSASFFVQCRVHADAHKSECNMYCLDCMGDALCALCLAARHRDHHSIQIRRSSYHDVIRVSEIQKVLDIAGVQTYIINSARVVFLNERPQPRPGKGVTNTYEVCERSLLDCFRFCSLGCKIVGTARGYRPGKKKHGGGGGNKKRAAPAPALKDVRSDSEDSCTSTSGASSDKSSVVQSSPPPPTSASHRPPGNKRRKGVPHRSPLGSLIVEL

SEQ ID NO: 26535 - protein, 252 aa, Zea mays subsp. mays
  peptide (1)..(252): Ceres Seq. ID no. 12358303
  misc_feature (54)..(155): Pfam Name: Pfam Description:  Cupin
SVSSLPSSILQYFTRCLRSKTFRLFPRRLQRLHTRSRSRRLLRQTPSPRRLLLSSLLSPFHSRSPGYRARRRDGDRSRDPSRAEAERRHGRRWRVLRRRQRDPAVAAVAEAAAVRELLRPMQGPRRRAQERVQHVLPRLHGRRSLRALPRRAPPRPPLHPDTEVVVPRRDPGVGDTEGAGHRRRADVHHQQRARGVPERAAAAPPGQGRHQHLRGLRAQPPRLLPLLLPWVQDSGHGPWLPSWEEEARRRRR

SEQ ID NO: 26536 - protein, 252 aa, Zea mays subsp. mays
  peptide (1)..(252): Ceres Seq. ID no. 12358304
  misc_feature (34)..(239): Pfam Name: Pfam Description:  Protein of unknown function, DUF597
  misc_feature (14)..(251): NCBI GI NO: 38346725 NR Description: OSJNBa0086O06.23
  misc_feature (1)..(251): NCBI GI NO: 37537092 NR Description: unknown protein
  misc_feature (29)..(251): NCBI GI NO: 6714272 NR Description: F6N18.8 [Arabidopsis thaliana]
  misc_feature (29)..(251): NCBI GI NO: 18398555 NR Description: expressed protein; protein id: At1g32700
  misc_feature (29)..(251): NCBI GI NO: 21554139 NR Description: unknown [Arabidopsis thaliana]
  misc_feature (12)..(246): NCBI GI NO: 15236696 NR Description: putative protein; protein id: At4g17900.1
  misc_feature (34)..(189): NCBI GI NO: 18394936 NR Description: expressed protein; protein id: At1g21000
  misc_feature (34)..(189): NCBI GI NO: 25337907 NR Description: hypothetical protein F9H16
  misc_feature (34)..(189): NCBI GI NO: 21537073 NR Description: unknown [Arabidopsis thaliana]
  misc_feature (34)..(240): NCBI GI NO: 18411153 NR Description: expressed protein; protein id: At1g76590
MAIDHGTPLGLKRRGAMGGGGECCDDGSETRRLPPWLRPLLSASFFVQCRVHADAHKSECNMYCLDCMGDALCALCLAARHRDHHSIQIRRSSYHDVIRVSEIQKVLDIAGVQTYIINSARVVFLNERPQPRPGKGVTNTYEVCERSLLDCFRFCSLGCKIVGTARGYRPGKKKHGGGGGNKKRAAPAPALKDVRSDSEDSCTSTSGASSDKSSVVQSSPPPPTSASHRPPGNKRRKGVPHRSPLGSLIVEL

SEQ ID NO: 26537 - DNA, 1204 bp, Zea mays subsp. mays
  misc_feature (1)..(1204): Ceres Seq. ID no. 12409816
agtcgccccccagtccatcaccacttctccattcctctttcccagtgcccccagtccatcaccacatccgttcaaatgggccgcaaccgcaagggccgcaaggctagggtttcgcacgacgccgacgccgacgccgacgccgatggcagcgaggatgagagggccaccactgcgggcaggagcctctacgagattctaggagttgagaagaccgcttctcaacaagaaataaagaaggcgtatcacaaattggctctgcgcctccacccagataagaatcctggggatgaggaagccaaagagaagtttcagcagctgcagaaggttatatccattcttggagatgtagagaaaagagctttatatgatgagactggcatcactgatgatgatgcactggtgggagaagctgcaaacaatcttcaggagtacttcagaacaatgtacaagaaagtcacggaggctgacattgaagaatttgaagctaaatatagagggtcagattctgagaaaacggacttgaaggaactctacacaaaatataagggcaacatgaacaggctttctgcgcaatgatttgctcagaaccaaagcttgattctcaccgcttcaaggatataattgacgaggcgattggtgaaggtgagctgaagtcaactaaggtgtatgagaaatgggctaaaaagatctcagggatggagccaccaacaaatccgctagagaggagagtgaagaagaggaagaacagtgaggagaatgatctgatactggctatctcacagcgcagggctgagcggaaaaaaacagttcaactccatcctctcgaacatcatgtccaagtgtgactccaaggcgagcagctcggagcccacggaagaagagtttgagcaggcgcaacagaggctggagagcagaagggccaagaggcgcaagtgatgctgctgccagccttcttgccctatgctgaacattgtctgaagcttttggtgtgacctgattttaccagcatgcaagtgatgtttctaagacccagctcagtttgagcgtgtcagggtggggtgtgtgtcatatctcttgtcctctcacgatacactatgtcgtatggttatcggcttatcaccttgccgagagggaagctctatctgaacttttaattccgtagcatttggcaagtactagtagattgcaatgtaatgtttattcc

SEQ ID NO: 26538 - protein, 191 aa, Zea mays subsp. mays
  peptide (1)..(191): Ceres Seq. ID no. 12409817
  misc_feature (61)..(126): Pfam Name: Pfam Description:  DnaJ domain
  misc_feature (26)..(188): NCBI GI NO: 15240212 NR Description: DnaJ homologue (gb|AAB91418
  misc_feature (26)..(188): NCBI GI NO: 2689720 NR Description: DnaJ homologue [Arabidopsis thaliana]
  misc_feature (60)..(191): NCBI GI NO: 15230424 NR Description: DnaJ protein, putative; protein id: At3g12170.1
  misc_feature (60)..(191): NCBI GI NO: 12322012 NR Description: DnaJ protein, putative, 3' partial; 1110-1
  misc_feature (62)..(188): NCBI GI NO: 27597059 NR Description: DnaJ homolog, subfamily C, member 9
  misc_feature (62)..(186): NCBI GI NO: 39794528 NR Description: Unknown (protein for MGC:76175)
  misc_feature (62)..(188): NCBI GI NO: 9971117 NR Description: dJ1099D15.1 (putative DNAJ protein) [Homo sapiens]
  misc_feature (62)..(188): NCBI GI NO: 23956266 NR Description: similar to DnaJ protein SB73
  misc_feature (62)..(188): NCBI GI NO: 26335859 NR Description: unnamed protein product [Mus musculus]
  misc_feature (62)..(188): NCBI GI NO: 25513803 NR Description: J domain of DnaJ-like-protein 1 - rat
SRPPVHHHFSIPLSQCPQSITTSVQMGRNRKGRKARVSHDADADADADGSEDERATTAGRSLYEILGVEKTASQQEIKKAYHKLALRLHPDKNPGDEEAKEKFQQLQKVISILGDVEKRALYDETGITDDDALVGEAANNLQEYFRTMYKKVTEADIEEFEAKYRGSDSEKTDLKELYTKYKGNMNRLSAQ

SEQ ID NO: 26539 - protein, 166 aa, Zea mays subsp. mays
  peptide (1)..(166): Ceres Seq. ID no. 12409818
  misc_feature (36)..(101): Pfam Name: Pfam Description:  DnaJ domain
  misc_feature (1)..(163): NCBI GI NO: 15240212 NR Description: DnaJ homologue (gb|AAB91418
  misc_feature (1)..(163): NCBI GI NO: 2689720 NR Description: DnaJ homologue [Arabidopsis thaliana]
  misc_feature (35)..(166): NCBI GI NO: 15230424 NR Description: DnaJ protein, putative; protein id: At3g12170.1
  misc_feature (35)..(166): NCBI GI NO: 12322012 NR Description: DnaJ protein, putative, 3' partial; 1110-1
  misc_feature (37)..(163): NCBI GI NO: 27597059 NR Description: DnaJ homolog, subfamily C, member 9
  misc_feature (37)..(161): NCBI GI NO: 39794528 NR Description: Unknown (protein for MGC:76175)
  misc_feature (37)..(163): NCBI GI NO: 9971117 NR Description: dJ1099D15.1 (putative DNAJ protein) [Homo sapiens]
  misc_feature (37)..(163): NCBI GI NO: 23956266 NR Description: similar to DnaJ protein SB73
  misc_feature (37)..(163): NCBI GI NO: 26335859 NR Description: unnamed protein product [Mus musculus]
  misc_feature (37)..(163): NCBI GI NO: 25513803 NR Description: J domain of DnaJ-like-protein 1 - rat
MGRNRKGRKARVSHDADADADADGSEDERATTAGRSLYEILGVEKTASQQEIKKAYHKLALRLHPDKNPGDEEAKEKFQQLQKVISILGDVEKRALYDETGITDDDALVGEAANNLQEYFRTMYKKVTEADIEEFEAKYRGSDSEKTDLKELYTKYKGNMNRLSAQ

SEQ ID NO: 26540 - DNA, 1636 bp, Zea mays subsp. mays
  misc_feature (1)..(1636): Ceres Seq. ID no. 12376468
  misc_feature (195)..(195): n is a, c, t, g, unknown, or other
gctagctgctaccagccgacgacgacggccgcgcgcgtttgttgtgtgtgtgtgtgtgtgtgtgtgtgtgtgtgtgtgtgtgtgttataagcgcgagggtttctggcgaggttgctaaagcgttagcgggggcgcccatggagcttgacgaggagacgttcttggacgagctcatgtcgctgcggcgggaggcgncggcggcggcgtccgggcagtggcaagcagctgccgcctacacgggcggcggcggagacgaaggcatgatgatgggcgacctcctcttctacggcggggcgacggaggccgccgcgactgccaccagcggcggcggcatggaccagctctcgccgttccaccagcacgcgccgctgcaggtgcaggtgcaggcgcccgcggcggccccgcaccctcactcgcacgaggagttcaacttcgactgcctcagcgaggtttgcaacccgtacaggggggccggcgtcgccgtaataacgggggccgaggccgccgcggtgcctggaagggcgctcgccgctctccacgacgccatggtggaggacgagacgagcggtcacctgccgcaggggcagcaacatggagccggcgggtccccgacgttcgtgttcggcggtgccgccggcgagagctccgagcagatgcccgtcgtcgtcaggggtgccggcggcggcccccaccacaggagcaaggtccacggcggcgcgccgtccaagaatctcatggccgagaggcggcggcggaagcgcctcaacgaccgtctctccatgctccgctccattgttcccaagatcagcaagatggacaggacatccattctcggggacaccattgactacgtgaaggagctgacggagcggatcaaagtcctggaagaggagatcggcgcctctgcggaggacctggacctcctcaacaccttgaaagcttcttcgtccagcggcagcaacgagatgatggtgaggaactccacaaagttcgacgtcgagaggcggggcaacgggagcacgaggatcgagatctgctgcgccacaaaccccgaggtgctgctgtccacggtaagcgcgctggaggtgctgggcctggagatcgagcagtgcgtggtgagctgcttcagcgactttggcatgcaggcctcttgctcacaagaggaggaggacggtaataataagaggcaagttctaagcaccgacgagataaaacaggccttgtttcggagtgctggctacggagggaggtgcctctaatatagctagcttagctaccatgcaagcagctccgatccaaacccaggccatcgatcccggcaaatactgtataaagctagctagtaagttgcatgcatctatgattgttattgctgtgtgtttgatgctttagttttcatcaatatatatatcccgtacgttaattggttttctccatgagttcatagcgctaataagtgtgcgtagtagtagtagcagcaagaggtatgtatgtatatatatctgaatcccagcaccaaattgaagatttgttgctcaggtattgtaagttgatcatttcttacggtctgtatcattgggtcatggtatgtatgcggattgatatattccaataataagcagattgttcctttcgc

SEQ ID NO: 26541 - protein, 373 aa, Zea mays subsp. mays
  peptide (1)..(373): Ceres Seq. ID no. 12376469
  misc_feature (195)..(243): Pfam Name: Pfam Description:  Helix-loop-helix DNA-binding domain
  misc_feature (1)..(371): NCBI GI NO: 22758263 NR Description: Putative bHLH transcription protein
  misc_feature (1)..(341): NCBI GI NO: 37536566 NR Description: hypothetical protein
  misc_feature (146)..(373): NCBI GI NO: 21537346 NR Description: unknown [Arabidopsis thaliana]
  misc_feature (168)..(373): NCBI GI NO: 18424973 NR Description: bHLH protein; protein id: At5g65640
  misc_feature (193)..(373): NCBI GI NO: 15238199 NR Description: bHLH protein; protein id: At5g10570
  misc_feature (193)..(373): NCBI GI NO: 20127062 NR Description: putative bHLH transcription factor
  misc_feature (193)..(370): NCBI GI NO: 25513489 NR Description: F13K23.12 protein - Arabidopsis thaliana
  misc_feature (166)..(370): NCBI GI NO: 22331357 NR Description: bHLH protein; protein id: At3g26744
  misc_feature (193)..(370): NCBI GI NO: 15222101 NR Description: bHLH protein; protein id: At1g12860.1
  misc_feature (164)..(269): NCBI GI NO: 34907076 NR Description: OSJNBa0093F16.27
  misc_feature (20)..(20): Xaa is any aa, unknown or other
MELDEETFLDELMSLRREAXAAASGQWQAAAAYTGGGGDEGMMMGDLLFYGGATEAAATATSGGGMDQLSPFHQHAPLQVQVQAPAAAPHPHSHEEFNFDCLSEVCNPYRGAGVAVITGAEAAAVPGRALAALHDAMVEDETSGHLPQGQQHGAGGSPTFVFGGAAGESSEQMPVVVRGAGGGPHHRSKVHGGAPSKNLMAERRRRKRLNDRLSMLRSIVPKISKMDRTSILGDTIDYVKELTERIKVLEEEIGASAEDLDLLNTLKASSSSGSNEMMVRNSTKFDVERRGNGSTRIEICCATNPEVLLSTVSALEVLGLEIEQCVVSCFSDFGMQASCSQEEEDGNNKRQVLSTDEIKQALFRSAGYGGRCL

SEQ ID NO: 26542 - protein, 361 aa, Zea mays subsp. mays
  peptide (1)..(361): Ceres Seq. ID no. 12376470
  misc_feature (183)..(231): Pfam Name: Pfam Description:  Helix-loop-helix DNA-binding domain
  misc_feature (1)..(359): NCBI GI NO: 22758263 NR Description: Putative bHLH transcription protein
  misc_feature (1)..(329): NCBI GI NO: 37536566 NR Description: hypothetical protein
  misc_feature (134)..(361): NCBI GI NO: 21537346 NR Description: unknown [Arabidopsis thaliana]
  misc_feature (156)..(361): NCBI GI NO: 18424973 NR Description: bHLH protein; protein id: At5g65640
  misc_feature (181)..(361): NCBI GI NO: 15238199 NR Description: bHLH protein; protein id: At5g10570
  misc_feature (181)..(361): NCBI GI NO: 20127062 NR Description: putative bHLH transcription factor
  misc_feature (181)..(358): NCBI GI NO: 25513489 NR Description: F13K23.12 protein - Arabidopsis thaliana
  misc_feature (154)..(358): NCBI GI NO: 22331357 NR Description: bHLH protein; protein id: At3g26744
  misc_feature (181)..(358): NCBI GI NO: 15222101 NR Description: bHLH protein; protein id: At1g12860.1
  misc_feature (152)..(257): NCBI GI NO: 34907076 NR Description: OSJNBa0093F16.27
  misc_feature (8)..(8): Xaa is any aa, unknown or other
MSLRREAXAAASGQWQAAAAYTGGGGDEGMMMGDLLFYGGATEAAATATSGGGMDQLSPFHQHAPLQVQVQAPAAAPHPHSHEEFNFDCLSEVCNPYRGAGVAVITGAEAAAVPGRALAALHDAMVEDETSGHLPQGQQHGAGGSPTFVFGGAAGESSEQMPVVVRGAGGGPHHRSKVHGGAPSKNLMAERRRRKRLNDRLSMLRSIVPKISKMDRTSILGDTIDYVKELTERIKVLEEEIGASAEDLDLLNTLKASSSSGSNEMMVRNSTKFDVERRGNGSTRIEICCATNPEVLLSTVSALEVLGLEIEQCVVSCFSDFGMQASCSQEEEDGNNKRQVLSTDEIKQALFRSAGYGGRCL

SEQ ID NO: 26543 - protein, 332 aa, Zea mays subsp. mays
  peptide (1)..(332): Ceres Seq. ID no. 12376471
  misc_feature (154)..(202): Pfam Name: Pfam Description:  Helix-loop-helix DNA-binding domain
  misc_feature (1)..(330): NCBI GI NO: 22758263 NR Description: Putative bHLH transcription protein
  misc_feature (1)..(300): NCBI GI NO: 37536566 NR Description: hypothetical protein
  misc_feature (105)..(332): NCBI GI NO: 21537346 NR Description: unknown [Arabidopsis thaliana]
  misc_feature (127)..(332): NCBI GI NO: 18424973 NR Description: bHLH protein; protein id: At5g65640
  misc_feature (152)..(332): NCBI GI NO: 15238199 NR Description: bHLH protein; protein id: At5g10570
  misc_feature (152)..(332): NCBI GI NO: 20127062 NR Description: putative bHLH transcription factor
  misc_feature (152)..(329): NCBI GI NO: 25513489 NR Description: F13K23.12 protein - Arabidopsis thaliana
  misc_feature (125)..(329): NCBI GI NO: 22331357 NR Description: bHLH protein; protein id: At3g26744
  misc_feature (152)..(329): NCBI GI NO: 15222101 NR Description: bHLH protein; protein id: At1g12860.1
  misc_feature (123)..(228): NCBI GI NO: 34907076 NR Description: OSJNBa0093F16.27
MMMGDLLFYGGATEAAATATSGGGMDQLSPFHQHAPLQVQVQAPAAAPHPHSHEEFNFDCLSEVCNPYRGAGVAVITGAEAAAVPGRALAALHDAMVEDETSGHLPQGQQHGAGGSPTFVFGGAAGESSEQMPVVVRGAGGGPHHRSKVHGGAPSKNLMAERRRRKRLNDRLSMLRSIVPKISKMDRTSILGDTIDYVKELTERIKVLEEEIGASAEDLDLLNTLKASSSSGSNEMMVRNSTKFDVERRGNGSTRIEICCATNPEVLLSTVSALEVLGLEIEQCVVSCFSDFGMQASCSQEEEDGNNKRQVLSTDEIKQALFRSAGYGGRCL

SEQ ID NO: 26544 - DNA, 1433 bp, Zea mays subsp. mays
  misc_feature (1)..(1433): Ceres Seq. ID no. 13492071
aagaaaaaaaaacgttttctttccttcgtttatgtatgcagggcctgcggttctatttaaagcttgttatcgcaggtagtagaggcacatcccagttggaagggcagccaataaggtaaggggtgacgaaaatggctccaacgaccgccaccaaggacgacagtggctacggcgacgagcgccggcgcgagctgcaggcgttcgacgacacgaagctgggggtgaaaggtctggtggactccggcgtcaagtccatcccgtccatcttccaccacccgccggaagccctgagcgacataatttctccggcgcctctgccgtcgtcgccaccctccggcgccgccatcccggtggtggacctctcggtgacgcggcgcgaggacctagtcgagcaggtgaggcacgcggccgggacggtgggcttcttctggctggtgaaccacggcgtggcggaggagctgatgggcggcatgctccgcggggtgcgccagttcaacgagggccccgtggaggcgaagcaggcgctctactccagggacctggctcgcaacctgcgcttcgcctccaacttcgacctcttcaaggccgctgcggccgactggcgcgacacgctcttctgcgaggtggctccgaacccgccgccgcgggaggagctgccggagccactgaggaacgtgatgctggagtacggcgcggcggtgacgaagctggcgcggttcgtgttcgagctgctgtccgagtccctcggcatgcccagcgaccacctgtacgagatggagtgcatgcagaacctgaacgtggtgtgccagtactacccgccgtgcccggagccgcaccgcaccgtgggcgtcaagaggcacacggaccctggcttcttcaccatcctcctgcaggacggcatgggcggcctgcaggtgcgcctcggcaacaacgggcagagcggcggctgctgggtggacatcgctccccggcctggggcgctcatggtcaacatcggtgatcttctgcagctcgtgaccaatgaccggttcaggagcgtggagcaccgggtgccagccaacaagagcagcgacacggcgagggtctccgtggcgtccttcttcaacacggacgtgaggaggtccgagaggatgtacggccccattccagaccccagcaagcccccgctgtacaggagcgtcagggcccgagacttcatcgcaaagttcaacaccataggactcgatggccgcgcgctcgaccacttcaggctctagctacctggctacgtttcagattcgtcctttcatttgctttggtctctaattaataattccaaataataagcccgcggatggacctctgtctgtctgtctgtaatttagtttccaagtttagtttgttgtggtaattcctgtatcaattatgtcataaataaaagctagggaaccttg

SEQ ID NO: 26545 - protein, 374 aa, Zea mays subsp. mays
  peptide (1)..(374): Ceres Seq. ID no. 13492072
  misc_feature (223)..(325): Pfam Name: II Pfam Description: 2OG-Fe
  misc_feature (1)..(374): NCBI GI NO: 29123084 NR Description: 2-oxoglutarate-dependent oxygenase [Zea mays]
  misc_feature (14)..(374): NCBI GI NO: 40253423 NR Description: putative 2-oxoglutarate-dependent oxygenase
  misc_feature (14)..(374): NCBI GI NO: 40253419 NR Description: putative 2-oxoglutarate-dependent oxygenase
  misc_feature (16)..(374): NCBI GI NO: 13878119 NR Description: putative oxidoreductase [Arabidopsis thaliana]
  misc_feature (16)..(374): NCBI GI NO: 15221545 NR Description: 2-oxoglutarate-dependent dioxygenase, putative
  misc_feature (16)..(374): NCBI GI NO: 15221544 NR Description: 2-oxoglutarate-dependent dioxygenase, putative
  misc_feature (14)..(374): NCBI GI NO: 40253431 NR Description: putative 2-oxoglutarate-dependent oxygenase
  misc_feature (16)..(300): NCBI GI NO: 25406927 NR Description: protein F12K11.6 [imported] - Arabidopsis thaliana
  misc_feature (291)..(374): NCBI GI NO: 25406927 NR Description: protein F12K11.6 [imported] - Arabidopsis thaliana
  misc_feature (16)..(305): NCBI GI NO: 25406927 NR Description: protein F12K11.6 [imported] - Arabidopsis thaliana
MAPTTATKDDSGYGDERRRELQAFDDTKLGVKGLVDSGVKSIPSIFHHPPEALSDIISPAPLPSSPPSGAAIPVVDLSVTRREDLVEQVRHAAGTVGFFWLVNHGVAEELMGGMLRGVRQFNEGPVEAKQALYSRDLARNLRFASNFDLFKAAAADWRDTLFCEVAPNPPPREELPEPLRNVMLEYGAAVTKLARFVFELLSESLGMPSDHLYEMECMQNLNVVCQYYPPCPEPHRTVGVKRHTDPGFFTILLQDGMGGLQVRLGNNGQSGGCWVDIAPRPGALMVNIGDLLQLVTNDRFRSVEHRVPANKSSDTARVSVASFFNTDVRRSERMYGPIPDPSKPPLYRSVRARDFIAKFNTIGLDGRALDHFRL

SEQ ID NO: 26546 - protein, 264 aa, Zea mays subsp. mays
  peptide (1)..(264): Ceres Seq. ID no. 13492073
  misc_feature (113)..(215): Pfam Name: II Pfam Description: 2OG-Fe
  misc_feature (1)..(264): NCBI GI NO: 29123084 NR Description: 2-oxoglutarate-dependent oxygenase [Zea mays]
  misc_feature (1)..(264): NCBI GI NO: 40253423 NR Description: putative 2-oxoglutarate-dependent oxygenase
  misc_feature (1)..(264): NCBI GI NO: 40253419 NR Description: putative 2-oxoglutarate-dependent oxygenase
  misc_feature (1)..(264): NCBI GI NO: 13878119 NR Description: putative oxidoreductase [Arabidopsis thaliana]
  misc_feature (1)..(264): NCBI GI NO: 15221545 NR Description: 2-oxoglutarate-dependent dioxygenase, putative
  misc_feature (1)..(264): NCBI GI NO: 15221544 NR Description: 2-oxoglutarate-dependent dioxygenase, putative
  misc_feature (1)..(264): NCBI GI NO: 40253431 NR Description: putative 2-oxoglutarate-dependent oxygenase
  misc_feature (1)..(190): NCBI GI NO: 25406927 NR Description: protein F12K11.6 [imported] - Arabidopsis thaliana
  misc_feature (181)..(264): NCBI GI NO: 25406927 NR Description: protein F12K11.6 [imported] - Arabidopsis thaliana
  misc_feature (1)..(195): NCBI GI NO: 25406927 NR Description: protein F12K11.6 [imported] - Arabidopsis thaliana
MGGMLRGVRQFNEGPVEAKQALYSRDLARNLRFASNFDLFKAAAADWRDTLFCEVAPNPPPREELPEPLRNVMLEYGAAVTKLARFVFELLSESLGMPSDHLYEMECMQNLNVVCQYYPPCPEPHRTVGVKRHTDPGFFTILLQDGMGGLQVRLGNNGQSGGCWVDIAPRPGALMVNIGDLLQLVTNDRFRSVEHRVPANKSSDTARVSVASFFNTDVRRSERMYGPIPDPSKPPLYRSVRARDFIAKFNTIGLDGRALDHFRL

SEQ ID NO: 26547 - protein, 261 aa, Zea mays subsp. mays
  peptide (1)..(261): Ceres Seq. ID no. 13492074
  misc_feature (110)..(212): Pfam Name: II Pfam Description: 2OG-Fe
  misc_feature (1)..(261): NCBI GI NO: 29123084 NR Description: 2-oxoglutarate-dependent oxygenase [Zea mays]
  misc_feature (1)..(261): NCBI GI NO: 40253423 NR Description: putative 2-oxoglutarate-dependent oxygenase
  misc_feature (1)..(261): NCBI GI NO: 40253419 NR Description: putative 2-oxoglutarate-dependent oxygenase
  misc_feature (1)..(261): NCBI GI NO: 13878119 NR Description: putative oxidoreductase [Arabidopsis thaliana]
  misc_feature (1)..(261): NCBI GI NO: 15221545 NR Description: 2-oxoglutarate-dependent dioxygenase, putative
  misc_feature (1)..(261): NCBI GI NO: 15221544 NR Description: 2-oxoglutarate-dependent dioxygenase, putative
  misc_feature (1)..(261): NCBI GI NO: 40253431 NR Description: putative 2-oxoglutarate-dependent oxygenase
  misc_feature (1)..(187): NCBI GI NO: 25406927 NR Description: protein F12K11.6 [imported] - Arabidopsis thaliana
  misc_feature (178)..(261): NCBI GI NO: 25406927 NR Description: protein F12K11.6 [imported] - Arabidopsis thaliana
  misc_feature (1)..(192): NCBI GI NO: 25406927 NR Description: protein F12K11.6 [imported] - Arabidopsis thaliana
MLRGVRQFNEGPVEAKQALYSRDLARNLRFASNFDLFKAAAADWRDTLFCEVAPNPPPREELPEPLRNVMLEYGAAVTKLARFVFELLSESLGMPSDHLYEMECMQNLNVVCQYYPPCPEPHRTVGVKRHTDPGFFTILLQDGMGGLQVRLGNNGQSGGCWVDIAPRPGALMVNIGDLLQLVTNDRFRSVEHRVPANKSSDTARVSVASFFNTDVRRSERMYGPIPDPSKPPLYRSVRARDFIAKFNTIGLDGRALDHFRL

SEQ ID NO: 26548 - DNA, 1309 bp, Zea mays subsp. mays
  misc_feature (1)..(1309): Ceres Seq. ID no. 12352316
cgaaaaatataataagcagagagggtatgcgctggtggtggtggcgactggcgacggccgcgatcgaccatggctacgacggcgccgctcgttctcctcttccccctcgtgctgctgctgcaggcgaggtggtcgtcgcagcagcagcagcagcaggctgtgacggcggtgatcgtgttcggcgactccatcgtggacccggggaacaacaatggtttgcacacgctgatcaaggccaaccatccgccctacggcatggacatgttgaaccacgaggccaccggacgctactccaacggcctcataccaacagacctcattgcccagcagctcggcgtcaagcagctgcttccgccctacctgggcgtggacctgagccccgatgaccttctcaccggcgtcagcttcgcgtccggcgccaccggattcgacccgctcacgcccgtcgtggtcagcgtcatctcgctggaccagcagctcgcctacttcgacgggtaccgggggaggctggtggacatcgccggcgaggccgagacggcgcggatcatcgacggcgcgctgttcctggtgtgcgccggcaccgacgacgtggccaacacctacttcaccacgccgttccgcagcgccgagtacgacatcccgggctacgtggacctgctggtgggccatgccgaggagttcctccgcgagctggtcgtcagctccaggggcgccaggaggatcggcttcgtggggatgccgccggtaggctgcgtgccgtcgcagcgcacgctcgggggcggcctcgccaccagggcctgcgagcccaagcgaaacgaggcggcgctgctgtacaacgccagggcccaggagatgatcgccgccttcaacaacaacaacgccgacgccgatgtgctggtcgtgttcctcgacatctaccgcatcctggacgacctcatggagcgcggggaggagtacggcttctccgagaccaccaggggatgctgcggcaccggcaccatcgaggtcacggggctatgtgactcccgcttcgtctccgtctgcgacgacgtctcgcagcacgtcttcttcgacagctaccacccaacagagagagcctacaggatcatcgtcaacgacatctttctaaactacgcacacgtgctcttctcatgactatatatcacgtactctctgtctctgtctctgtctctgtctctgtctctgtctctggtagctggcccaatcgacccaacagcatccaaatataattaaatgagctagcccatcctccaaataccgcagcccattgttacactactactttcct

SEQ ID NO: 26549 - protein, 361 aa, Zea mays subsp. mays
  peptide (1)..(361): Ceres Seq. ID no. 12352317
  misc_feature (34)..(349): Pfam Name: Pfam Description:  GDSL-like Lipase/Acylhydrolase
  misc_feature (22)..(361): NCBI GI NO: 30102970 NR Description: putative lipase/acylhydrolase
  misc_feature (1)..(355): NCBI GI NO: 37534726 NR Description: putative anter-specific proline-rich protein
  misc_feature (8)..(354): NCBI GI NO: 15222901 NR Description: family II extracellular lipase 3
  misc_feature (8)..(354): NCBI GI NO: 26449364 NR Description: putative family II lipase EXL3
  misc_feature (8)..(345): NCBI GI NO: 25404994 NR Description: protein T4O12.13 [imported] - Arabidopsis thaliana
  misc_feature (10)..(360): NCBI GI NO: 28393626 NR Description: putative family II extracellular lipase 1 (EXL1)
  misc_feature (10)..(360): NCBI GI NO: 18410954 NR Description: family II extracellular lipase 1
  misc_feature (8)..(355): NCBI GI NO: 18406327 NR Description: proline-rich protein, putative
  misc_feature (33)..(347): NCBI GI NO: 21592372 NR Description: anter-specific proline-rich protein APG precursor
  misc_feature (33)..(347): NCBI GI NO: 18394825 NR Description: anter-specific proline-rich protein APG precursor
MATTAPLVLLFPLVLLLQARWSSQQQQQQAVTAVIVFGDSIVDPGNNNGLHTLIKANHPPYGMDMLNHEATGRYSNGLIPTDLIAQQLGVKQLLPPYLGVDLSPDDLLTGVSFASGATGFDPLTPVVVSVISLDQQLAYFDGYRGRLVDIAGEAETARIIDGALFLVCAGTDDVANTYFTTPFRSAEYDIPGYVDLLVGHAEEFLRELVVSSRGARRIGFVGMPPVGCVPSQRTLGGGLATRACEPKRNEAALLYNARAQEMIAAFNNNNADADVLVVFLDIYRILDDLMERGEEYGFSETTRGCCGTGTIEVTGLCDSRFVSVCDDVSQHVFFDSYHPTERAYRIIVNDIFLNYAHVLFS

SEQ ID NO: 26550 - protein, 299 aa, Zea mays subsp. mays
  peptide (1)..(299): Ceres Seq. ID no. 12352318
  misc_feature (1)..(287): Pfam Name: Pfam Description:  GDSL-like Lipase/Acylhydrolase
  misc_feature (1)..(299): NCBI GI NO: 30102970 NR Description: putative lipase/acylhydrolase
  misc_feature (1)..(293): NCBI GI NO: 37534726 NR Description: putative anter-specific proline-rich protein
  misc_feature (1)..(292): NCBI GI NO: 15222901 NR Description: family II extracellular lipase 3
  misc_feature (1)..(292): NCBI GI NO: 26449364 NR Description: putative family II lipase EXL3
  misc_feature (1)..(283): NCBI GI NO: 25404994 NR Description: protein T4O12.13 [imported] - Arabidopsis thaliana
  misc_feature (1)..(298): NCBI GI NO: 28393626 NR Description: putative family II extracellular lipase 1 (EXL1)
  misc_feature (1)..(298): NCBI GI NO: 18410954 NR Description: family II extracellular lipase 1
  misc_feature (1)..(293): NCBI GI NO: 18406327 NR Description: proline-rich protein, putative
  misc_feature (1)..(285): NCBI GI NO: 21592372 NR Description: anter-specific proline-rich protein APG precursor
  misc_feature (1)..(285): NCBI GI NO: 18394825 NR Description: anter-specific proline-rich protein APG precursor
MDMLNHEATGRYSNGLIPTDLIAQQLGVKQLLPPYLGVDLSPDDLLTGVSFASGATGFDPLTPVVVSVISLDQQLAYFDGYRGRLVDIAGEAETARIIDGALFLVCAGTDDVANTYFTTPFRSAEYDIPGYVDLLVGHAEEFLRELVVSSRGARRIGFVGMPPVGCVPSQRTLGGGLATRACEPKRNEAALLYNARAQEMIAAFNNNNADADVLVVFLDIYRILDDLMERGEEYGFSETTRGCCGTGTIEVTGLCDSRFVSVCDDVSQHVFFDSYHPTERAYRIIVNDIFLNYAHVLFS

SEQ ID NO: 26551 - protein, 297 aa, Zea mays subsp. mays
  peptide (1)..(297): Ceres Seq. ID no. 12352319
  misc_feature (1)..(285): Pfam Name: Pfam Description:  GDSL-like Lipase/Acylhydrolase
  misc_feature (1)..(297): NCBI GI NO: 30102970 NR Description: putative lipase/acylhydrolase
  misc_feature (1)..(291): NCBI GI NO: 37534726 NR Description: putative anter-specific proline-rich protein
  misc_feature (1)..(290): NCBI GI NO: 15222901 NR Description: family II extracellular lipase 3
  misc_feature (1)..(290): NCBI GI NO: 26449364 NR Description: putative family II lipase EXL3
  misc_feature (1)..(281): NCBI GI NO: 25404994 NR Description: protein T4O12.13 [imported] - Arabidopsis thaliana
  misc_feature (1)..(296): NCBI GI NO: 28393626 NR Description: putative family II extracellular lipase 1 (EXL1)
  misc_feature (1)..(296): NCBI GI NO: 18410954 NR Description: family II extracellular lipase 1
  misc_feature (1)..(291): NCBI GI NO: 18406327 NR Description: proline-rich protein, putative
  misc_feature (1)..(283): NCBI GI NO: 21592372 NR Description: anter-specific proline-rich protein APG precursor
  misc_feature (1)..(283): NCBI GI NO: 18394825 NR Description: anter-specific proline-rich protein APG precursor
MLNHEATGRYSNGLIPTDLIAQQLGVKQLLPPYLGVDLSPDDLLTGVSFASGATGFDPLTPVVVSVISLDQQLAYFDGYRGRLVDIAGEAETARIIDGALFLVCAGTDDVANTYFTTPFRSAEYDIPGYVDLLVGHAEEFLRELVVSSRGARRIGFVGMPPVGCVPSQRTLGGGLATRACEPKRNEAALLYNARAQEMIAAFNNNNADADVLVVFLDIYRILDDLMERGEEYGFSETTRGCCGTGTIEVTGLCDSRFVSVCDDVSQHVFFDSYHPTERAYRIIVNDIFLNYAHVLFS

SEQ ID NO: 26552 - DNA, 1301 bp, Zea mays subsp. mays
  misc_feature (1)..(1301): Ceres Seq. ID no. 12435108
  misc_feature (1196)..(1196): n is a, c, t, g, unknown, or other
gcacgagaccattacctagaacatcctaatcgaaaaactgcgcgtgtgcgccactacaccaaccgtttggtccgccgttcggggattccttccgcactactacatagtagcacccgtgtggccgtgtccgagctacccacgcccccaacgccaagaacgtcgacgggcgcgacggcatggcggcggcggacccggacaccgaggtgcaggcagagttcccacccctcgtccgccagtacaaaagcggccgcgtcgagcggttcttcaacctggccccgctcccggccggcaccgacccggccacgggcgtcgtgtccaaggacgtcgtcgtcgacccggccaccggcctctgggcgcgcctcttcctccccgccggcagccacgggaagaagctccccgtcgtcgtctactaccatggcggcgcctacgtgatcggctcggcggccgacccgatgacgcacggctacctcaacgcgctcgtcgccaaggccggcgtcctcgcggtcgcgctcgagtaccgcctcgcgccggagcacccgctcccggccgcctacgaggactcatgggagggactcaagtgggtggccacccacgcctccgcctccgccgccgcgggaggaggaccggccgccgagccgtggctaaccgagcacggcgacttctcccgcgtgttcctggccggggccagcgcgggggccaccatcgctcacttcgtagcagtccgtgccggtgagcagcacaagagcggcggcctcgggatgcggatcagggggctgctgatagtgcacccctacttcagcggcgcggcggacatcggcgacgaggggacgacggggaaggcgcgcaaggcgcgggccgacgcgttctggcggttcctgtgccctggcacccccgggctcgacgaccctctctccaacccgttctcggaggcctccggcgggagcgcggcgcgcgtcgccgccgagcgcgtgctcgtctgcgtcgccgagaaggacgacctcagggacaggggcgtctggtactacgagagcctcaaggccagcggctaccctggcgaggtggagctgctcgagtccatgggcgagggccacgtcttctactgcatgaacccgcgctgcgacagggcgcgggagatggaggagcgcgtcctcggcttcctgcgcaagtgagcgagcgacggagcgcgcgccttgctncgcgattgagatggaataatttcaccgtttccagatgtggaggcgtttgagcatgaggccatgagggtcttatttgtttgcttaagatcaattgattgaagtttc

SEQ ID NO: 26553 - protein, 330 aa, Zea mays subsp. mays
  peptide (1)..(330): Ceres Seq. ID no. 12435109
  misc_feature (70)..(118): Pfam Name: Pfam Description:  Carboxylesterase
  misc_feature (7)..(329): NCBI GI NO: 15228425 NR Description: putative protein; protein id: At3g48690
  misc_feature (7)..(329): NCBI GI NO: 18086341 NR Description: AT3g48690/T8P19_200 [Arabidopsis thaliana]
  misc_feature (7)..(330): NCBI GI NO: 15227669 NR Description: putative esterase; protein id: At2g03550.1
  misc_feature (16)..(330): NCBI GI NO: 28393060 NR Description: putative esterase [Arabidopsis thaliana]
  misc_feature (7)..(329): NCBI GI NO: 15228426 NR Description: putative protein; protein id: At3g48700.1
  misc_feature (7)..(328): NCBI GI NO: 15222795 NR Description: unknown protein; protein id: At1g49660.1
  misc_feature (8)..(328): NCBI GI NO: 21537287 NR Description: putative esterase [Arabidopsis thaliana]
  misc_feature (8)..(328): NCBI GI NO: 18402731 NR Description: expressed protein; protein id: At1g49650
  misc_feature (1)..(330): NCBI GI NO: 34393904 NR Description: putative cell death associated protein
  misc_feature (7)..(330): NCBI GI NO: 15221975 NR Description: hypothetical protein; protein id: At1g19190.1
MAAADPDTEVQAEFPPLVRQYKSGRVERFFNLAPLPAGTDPATGVVSKDVVVDPATGLWARLFLPAGSHGKKLPVVVYYHGGAYVIGSAADPMTHGYLNALVAKAGVLAVALEYRLAPEHPLPAAYEDSWEGLKWVATHASASAAAGGGPAAEPWLTEHGDFSRVFLAGASAGATIAHFVAVRAGEQHKSGGLGMRIRGLLIVHPYFSGAADIGDEGTTGKARKARADAFWRFLCPGTPGLDDPLSNPFSEASGGSAARVAAERVLVCVAEKDDLRDRGVWYYESLKASGYPGEVELLESMGEGHVFYCMNPRCDRAREMEERVLGFLRK

SEQ ID NO: 26554 - protein, 238 aa, Zea mays subsp. mays
  peptide (1)..(238): Ceres Seq. ID no. 12435110
  misc_feature (1)..(237): NCBI GI NO: 15228425 NR Description: putative protein; protein id: At3g48690
  misc_feature (1)..(237): NCBI GI NO: 18086341 NR Description: AT3g48690/T8P19_200 [Arabidopsis thaliana]
  misc_feature (1)..(238): NCBI GI NO: 15227669 NR Description: putative esterase; protein id: At2g03550.1
  misc_feature (1)..(238): NCBI GI NO: 28393060 NR Description: putative esterase [Arabidopsis thaliana]
  misc_feature (1)..(237): NCBI GI NO: 15228426 NR Description: putative protein; protein id: At3g48700.1
  misc_feature (1)..(236): NCBI GI NO: 15222795 NR Description: unknown protein; protein id: At1g49660.1
  misc_feature (1)..(236): NCBI GI NO: 21537287 NR Description: putative esterase [Arabidopsis thaliana]
  misc_feature (1)..(236): NCBI GI NO: 18402731 NR Description: expressed protein; protein id: At1g49650
  misc_feature (1)..(238): NCBI GI NO: 34393904 NR Description: putative cell death associated protein
  misc_feature (1)..(238): NCBI GI NO: 15221975 NR Description: hypothetical protein; protein id: At1g19190.1
MTHGYLNALVAKAGVLAVALEYRLAPEHPLPAAYEDSWEGLKWVATHASASAAAGGGPAAEPWLTEHGDFSRVFLAGASAGATIAHFVAVRAGEQHKSGGLGMRIRGLLIVHPYFSGAADIGDEGTTGKARKARADAFWRFLCPGTPGLDDPLSNPFSEASGGSAARVAAERVLVCVAEKDDLRDRGVWYYESLKASGYPGEVELLESMGEGHVFYCMNPRCDRAREMEERVLGFLRK

SEQ ID NO: 26555 - DNA, 1229 bp, Zea mays subsp. mays
  misc_feature (1)..(1229): Ceres Seq. ID no. 12434883
atacccaaacccaccgaccgccgcctaggcttccacctctcccgctcaaactccggccactgaggtcgaacccgagcacgcgccgcagcggcacgatggtgaacgacgccgcggcgatggccgtcgtgagggcggcgcgcccagccctccgtggcgcccacgatggcgtcgccttcgccgcccacgccgccttcctcgccgatgggtactcgctctgcgccgtcggccctgccgcgctcgccgacccctcgaccttaggtgatgaggaggtggggattgatggttggaacatcatggaggattgttacgcctttttgtatagcaaggaggagaagggcaagaagaaaagggtactagtgaaatgtctggtgatcggtgaagtacttgcaattgatgtcttggatcttgaggcacaagataaggcgccttataatatccagattaatgtgaaagacttctttgttgaagagcagccaaagaattatggggatatgtacaagaattttacaagtctcattgatactgtgaactcaaatgtgttgtgcaaattgcatggagacggttctggtgctgaggctgctaagagcactgccgtcgctgctgccaagaactctgatgggagaagttcaccaatacagagctctggagatccaggtcctagaactgctgacccttccggcctaatttatcctccaatagcaccgattggttctgatgatctctaccctggacctggtgcaggcttctaccctcacagtggcattgggagcggtggcagcatgcatgttggtcctaatgatccgcgcttctttccttctaatcccttctctgccccatttggtgggcttgggagtgttccaccaggtggtcgctatgatccaattggcccacctgacgtcccagggtttgagccatctagctttgttaggcgtccaaggcggcctccaggcgggagcacccacccagacctcgagttcttccagcaaggcccagacttctgagagtcgcgcatcgcgcagaggccggccggagcctcgccctaccctcacgaaataacttcaaaatgctgagccctcgagctagatatcccgcttgttgtgattgcaactgctgtatcgagtatagtcctagtgcgctttggctgtaaagatggatgtgaacatcgtcctagtgtatttactcttaattccaaaccatcgtctgtcatagcctaatatactcttttgtgt

SEQ ID NO: 26556 - protein, 332 aa, Zea mays subsp. mays
  peptide (1)..(332): Ceres Seq. ID no. 12434884
  misc_feature (32)..(296): NCBI GI NO: 34898580 NR Description: P0534A03.16
  misc_feature (32)..(332): NCBI GI NO: 15232382 NR Description: putative protein; protein id: At3g53970
  misc_feature (227)..(330): NCBI GI NO: 34898580 NR Description: P0534A03.16
  misc_feature (268)..(332): NCBI GI NO: 7489377 NR Description: hypothetical protein - barley (fragment)
  misc_feature (32)..(196): NCBI GI NO: 15221211 NR Description: hypothetical protein; protein id: At1g48530.1
TQTHRPPPRLPPLPLKLRPLRSNPSTRRSGTMVNDAAAMAVVRAARPALRGAHDGVAFAAHAAFLADGYSLCAVGPAALADPSTLGDEEVGIDGWNIMEDCYAFLYSKEEKGKKKRVLVKCLVIGEVLAIDVLDLEAQDKAPYNIQINVKDFFVEEQPKNYGDMYKNFTSLIDTVNSNVLCKLHGDGSGAEAAKSTAVAAAKNSDGRSSPIQSSGDPGPRTADPSGLIYPPIAPIGSDDLYPGPGAGFYPHSGIGSGGSMHVGPNDPRFFPSNPFSAPFGGLGSVPPGGRYDPIGPPDVPGFEPSSFVRRPRRPPGGSTHPDLEFFQQGPDF

SEQ ID NO: 26557 - protein, 301 aa, Zea mays subsp. mays
  peptide (1)..(301): Ceres Seq. ID no. 12434885
  misc_feature (1)..(265): NCBI GI NO: 34898580 NR Description: P0534A03.16
  misc_feature (1)..(301): NCBI GI NO: 15232382 NR Description: putative protein; protein id: At3g53970
  misc_feature (196)..(299): NCBI GI NO: 34898580 NR Description: P0534A03.16
  misc_feature (237)..(301): NCBI GI NO: 7489377 NR Description: hypothetical protein - barley (fragment)
  misc_feature (1)..(165): NCBI GI NO: 15221211 NR Description: hypothetical protein; protein id: At1g48530.1
MVNDAAAMAVVRAARPALRGAHDGVAFAAHAAFLADGYSLCAVGPAALADPSTLGDEEVGIDGWNIMEDCYAFLYSKEEKGKKKRVLVKCLVIGEVLAIDVLDLEAQDKAPYNIQINVKDFFVEEQPKNYGDMYKNFTSLIDTVNSNVLCKLHGDGSGAEAAKSTAVAAAKNSDGRSSPIQSSGDPGPRTADPSGLIYPPIAPIGSDDLYPGPGAGFYPHSGIGSGGSMHVGPNDPRFFPSNPFSAPFGGLGSVPPGGRYDPIGPPDVPGFEPSSFVRRPRRPPGGSTHPDLEFFQQGPDF

SEQ ID NO: 26558 - protein, 294 aa, Zea mays subsp. mays
  peptide (1)..(294): Ceres Seq. ID no. 12434886
  misc_feature (1)..(258): NCBI GI NO: 34898580 NR Description: P0534A03.16
  misc_feature (1)..(294): NCBI GI NO: 15232382 NR Description: putative protein; protein id: At3g53970
  misc_feature (189)..(292): NCBI GI NO: 34898580 NR Description: P0534A03.16
  misc_feature (230)..(294): NCBI GI NO: 7489377 NR Description: hypothetical protein - barley (fragment)
  misc_feature (1)..(158): NCBI GI NO: 15221211 NR Description: hypothetical protein; protein id: At1g48530.1
MAVVRAARPALRGAHDGVAFAAHAAFLADGYSLCAVGPAALADPSTLGDEEVGIDGWNIMEDCYAFLYSKEEKGKKKRVLVKCLVIGEVLAIDVLDLEAQDKAPYNIQINVKDFFVEEQPKNYGDMYKNFTSLIDTVNSNVLCKLHGDGSGAEAAKSTAVAAAKNSDGRSSPIQSSGDPGPRTADPSGLIYPPIAPIGSDDLYPGPGAGFYPHSGIGSGGSMHVGPNDPRFFPSNPFSAPFGGLGSVPPGGRYDPIGPPDVPGFEPSSFVRRPRRPPGGSTHPDLEFFQQGPDF

SEQ ID NO: 26559 - DNA, 1535 bp, Zea mays subsp. mays
  misc_feature (1)..(1535): Ceres Seq. ID no. 12347934
agctcctctgttccctgcccccgggctggcttcctccccttcctggtctgcttctcctcaccgttgacgaatcacgaggcctgcctgcctgcctgctttctctgtgctccgttcgaatggacgggcagaggagtcgatgagcggccgtgggctttgatttcccctggggtctgctcttcttggtcagcaaggagacctgaacacgaattgatctctgcgccgctgcaaccccggcccgtcgaagccatggggtccggggactggttcaagacgatcatcagcaagaaaaaatcgaagcggggaaagtcaaagcacgcaaagctctctggtcaagtaacaaatggaggcaaccagacaaatcagaagttagatggcccttcttccagtagtgaggaccacgaagacaatgcagcactagaggaatgggctgctactcgcattcagaatgcgtttcggaaatacaaggcaaggaagaccctgcgttgtctcaagggagtcaaaagattgcgcgttgtcggtcaggcgaatccggttaagaagcagactgctgccacgctgagttacatacagtcttggaacaagttgcagtcggagataagaaaccgacgtgctttcatggtcaccgaaggacgcaacaggaagaagaagcaggagaaccaaatgaaacttgaggcaaaactgcataatttgcagattgaatggaatggaggctcggatactatggatgaaattcttgctaggatacaacaacgggaagaagcagcagtaaagcgtgagcgagccatggcgtacgcgttcaaccatcagtggagagcaaggtctgccacaagtctaggaaacttcagctatgaagtcggtaagggtggctggggctggagctggatggaccgctggatcgcagcacgaccatgggagccgcgatccatggtccaccctgagaacccgaagaaagcacaggcaaagaaagagaacaccacaaacccatcagctctcaagctgcaaggctccattaccctaagcaacaatatcaatgaccggaaaaccctgaaaaagaagccattgccttcagcttctcctgctgatcagaagaagccatcaccgtcgccttcttccgatcagaagaaaccagtaccgaaggagcagagagcaaaggcagctggcactcctccaaaaccaaaggccaaagatatgaaggggagtcaagagaaaaagccacaaccacaacagaaagtgcctcctccggttagcgcatgaagcttgctgctgcgaaaatggttactgatcatgtaagatacatcttgtgaagttctctcatgttcaacactcatgcttgtatgttttcgttttttgttttatggtgttatgggacgaggggtgcccaatctagaatgtgcttggtttgagcgattgcgcacgcacaacatatctgatgagaattgtttttggttaggattaggatctctgttattcattgttgtggtgttgtaataagacttgccttgcctggctatatgcttgaatggaaggtcttgttg

SEQ ID NO: 26560 - protein, 417 aa, Zea mays subsp. mays
  peptide (1)..(417): Ceres Seq. ID no. 12347935
  misc_feature (83)..(326): NCBI GI NO: 15232474 NR Description: hypothetical protein; protein id: At3g15050.1
  misc_feature (83)..(319): NCBI GI NO: 15226186 NR Description: putative SF16 protein {Helianthus annuus}
  misc_feature (88)..(400): NCBI GI NO: 15225258 NR Description: putative SF16 protein {Helianthus annuus}
  misc_feature (135)..(409): NCBI GI NO: 15233296 NR Description: unknown protein; protein id: At3g22190.1
  misc_feature (135)..(417): NCBI GI NO: 11994738 NR Description: contains similarity to SF16protein~gene_id:MKA23
  misc_feature (85)..(400): NCBI GI NO: 15232741 NR Description: putative SF16 protein; protein id: At3g09710.1
  misc_feature (140)..(385): NCBI GI NO: 15225299 NR Description: putative SF16 protein {Helianthus annuus}
  misc_feature (141)..(369): NCBI GI NO: 15218562 NR Description: hypothetical protein; protein id: At1g72670.1
  misc_feature (138)..(412): NCBI GI NO: 15231175 NR Description: unknown protein; protein id: At3g52290.1
  misc_feature (137)..(359): NCBI GI NO: 34903518 NR Description: P0001B06.11
SSSVPCPRAGFLPFLVCFSSPLTNHEACLPACFLCAPFEWTGRGVDERPWALISPGVCSSWSARRPEHELISAPLQPRPVEAMGSGDWFKTIISKKKSKRGKSKHAKLSGQVTNGGNQTNQKLDGPSSSSEDHEDNAALEEWAATRIQNAFRKYKARKTLRCLKGVKRLRVVGQANPVKKQTAATLSYIQSWNKLQSEIRNRRAFMVTEGRNRKKKQENQMKLEAKLHNLQIEWNGGSDTMDEILARIQQREEAAVKRERAMAYAFNHQWRARSATSLGNFSYEVGKGGWGWSWMDRWIAARPWEPRSMVHPENPKKAQAKKENTTNPSALKLQGSITLSNNINDRKTLKKKPLPSASPADQKKPSPSPSSDQKKPVPKEQRAKAAGTPPKPKAKDMKGSQEKKPQPQQKVPPPVSA

SEQ ID NO: 26561 - protein, 335 aa, Zea mays subsp. mays
  peptide (1)..(335): Ceres Seq. ID no. 12347936
  misc_feature (1)..(244): NCBI GI NO: 15232474 NR Description: hypothetical protein; protein id: At3g15050.1
  misc_feature (1)..(237): NCBI GI NO: 15226186 NR Description: putative SF16 protein {Helianthus annuus}
  misc_feature (6)..(318): NCBI GI NO: 15225258 NR Description: putative SF16 protein {Helianthus annuus}
  misc_feature (53)..(327): NCBI GI NO: 15233296 NR Description: unknown protein; protein id: At3g22190.1
  misc_feature (53)..(335): NCBI GI NO: 11994738 NR Description: contains similarity to SF16protein~gene_id:MKA23
  misc_feature (3)..(318): NCBI GI NO: 15232741 NR Description: putative SF16 protein; protein id: At3g09710.1
  misc_feature (58)..(303): NCBI GI NO: 15225299 NR Description: putative SF16 protein {Helianthus annuus}
  misc_feature (59)..(287): NCBI GI NO: 15218562 NR Description: hypothetical protein; protein id: At1g72670.1
  misc_feature (56)..(330): NCBI GI NO: 15231175 NR Description: unknown protein; protein id: At3g52290.1
  misc_feature (55)..(277): NCBI GI NO: 34903518 NR Description: P0001B06.11
MGSGDWFKTIISKKKSKRGKSKHAKLSGQVTNGGNQTNQKLDGPSSSSEDHEDNAALEEWAATRIQNAFRKYKARKTLRCLKGVKRLRVVGQANPVKKQTAATLSYIQSWNKLQSEIRNRRAFMVTEGRNRKKKQENQMKLEAKLHNLQIEWNGGSDTMDEILARIQQREEAAVKRERAMAYAFNHQWRARSATSLGNFSYEVGKGGWGWSWMDRWIAARPWEPRSMVHPENPKKAQAKKENTTNPSALKLQGSITLSNNINDRKTLKKKPLPSASPADQKKPSPSPSSDQKKPVPKEQRAKAAGTPPKPKAKDMKGSQEKKPQPQQKVPPPVSA

SEQ ID NO: 26562 - protein, 212 aa, Zea mays subsp. mays
  peptide (1)..(212): Ceres Seq. ID no. 12347937
  misc_feature (1)..(121): NCBI GI NO: 15232474 NR Description: hypothetical protein; protein id: At3g15050.1
  misc_feature (1)..(114): NCBI GI NO: 15226186 NR Description: putative SF16 protein {Helianthus annuus}
  misc_feature (1)..(195): NCBI GI NO: 15225258 NR Description: putative SF16 protein {Helianthus annuus}
  misc_feature (1)..(204): NCBI GI NO: 15233296 NR Description: unknown protein; protein id: At3g22190.1
  misc_feature (1)..(212): NCBI GI NO: 11994738 NR Description: contains similarity to SF16protein~gene_id:MKA23
  misc_feature (1)..(195): NCBI GI NO: 15232741 NR Description: putative SF16 protein; protein id: At3g09710.1
  misc_feature (1)..(180): NCBI GI NO: 15225299 NR Description: putative SF16 protein {Helianthus annuus}
  misc_feature (1)..(164): NCBI GI NO: 15218562 NR Description: hypothetical protein; protein id: At1g72670.1
  misc_feature (1)..(207): NCBI GI NO: 15231175 NR Description: unknown protein; protein id: At3g52290.1
  misc_feature (1)..(154): NCBI GI NO: 34903518 NR Description: P0001B06.11
MVTEGRNRKKKQENQMKLEAKLHNLQIEWNGGSDTMDEILARIQQREEAAVKRERAMAYAFNHQWRARSATSLGNFSYEVGKGGWGWSWMDRWIAARPWEPRSMVHPENPKKAQAKKENTTNPSALKLQGSITLSNNINDRKTLKKKPLPSASPADQKKPSPSPSSDQKKPVPKEQRAKAAGTPPKPKAKDMKGSQEKKPQPQQKVPPPVSA

SEQ ID NO: 26563 - DNA, 1445 bp, Zea mays subsp. mays
  misc_feature (1)..(1445): Ceres Seq. ID no. 12373700
aaggtatttctttttacttttgcgtttgcacaggccactccaccggttctcctattcttcctagcacaaaggggaggaagtaaagccttcccctcgccggagatgctgccgtcggcgaccgggtacactgccggcgacgtccactcggcacgcgagatgttccatcccttctacctctgacttcttgcgcacgcggcctctagtagatagtaattggacacttcatacttggattggatctctagatagcctagaaggtgagcggggcgtggaaggagaaatccgggaagcgatgagctttagcgccgcaagagtctcggagcatggcggcgagttcgaggaggcaagggggatgccggcagaggtgagctgggagatgctcgacaagtcgcggttttttgtactcgtcgccgcgctcttctctggcgtctccgcggcgctatatccggccgtcgtcctcaagacgcacctccaggttgctgcccccgcacaggccgcggcctcggcggcagcggcggcgattctccggcgcgacggtccccgagggttctaccgtggcttcggtgcgtccctcgcgggcacggtgcccgcgcgcgctctctatatggcggcgctcgaggccaccaagagcgtcgtgggctccgccgccctccgcctcggcgtcgcggaaccggccgcctcggctgccgcctcggccgcgggcggcgtctccgctgccgtagccgcgcaggtcgtctggaccccggtggacgtcgtcagccagcgtctcatgcttcagacggcgcccctcgctgccgcccgctaccgcggcggtaccgacgcgttccggaagatcctactcgcggacggcgtgcgcggcctgtaccgcggcttcggcatctcggtgctgacctacgcgccctccagtgccgcgtggtgggcctcctacgtgaccgcgcagcggctcctctggcgcgccgtcggccccgcggcgcacgacagccgcggcgccgcgatagccctgcagggtgcgagcgcggccgcggcgggaagcgcggcggcgctggtgacgatgccgctggacaccgtgaagacgcggctgcaggttatggacgctggggcgcaggcgccgacgctcgcggccgcggcgcgcgcgctagttcgggagggaggttggtctgcttgctaccgcgggttcgggccgcggtgggcgtccatgtcgctgtcttcggccaccatggtcaccgtctacgagttcttgaagcggctctcggccaaggaaggctccctctaagctctggatcaaagtgtatccatggatgatccttgtaagcatccatgtccaaatgcgaatatcctgcactgatctcttgatgggatgttaggaagcaagatttctgctgggtttgtctgttgatgacgatgatgatgaattttgtaaaataaagatttgtgtatatacttcg

SEQ ID NO: 26564 - protein, 326 aa, Zea mays subsp. mays
  peptide (1)..(326): Ceres Seq. ID no. 12373701
  misc_feature (4)..(326): NCBI GI NO: 37534064 NR Description: putative Tricarboxylate transport protein
  misc_feature (21)..(224): NCBI GI NO: 18410193 NR Description: mitochondrial carrier protein family
  misc_feature (229)..(322): NCBI GI NO: 18410193 NR Description: mitochondrial carrier protein family
  misc_feature (21)..(323): NCBI GI NO: 21594326 NR Description: mitochondrial carrier-like protein
  misc_feature (21)..(323): NCBI GI NO: 7486721 NR Description: hypothetical protein F9D12
  misc_feature (21)..(323): NCBI GI NO: 15239622 NR Description: mitochondrial carrier protein family
  misc_feature (24)..(323): NCBI GI NO: 18417739 NR Description: mitochondrial carrier protein family
  misc_feature (24)..(221): NCBI GI NO: 11358653 NR Description: probable mitochondrial carrier protein -Arabidopsis thaliana
  misc_feature (227)..(323): NCBI GI NO: 11358653 NR Description: probable mitochondrial carrier protein -Arabidopsis thaliana
  misc_feature (24)..(323): NCBI GI NO: 21553961 NR Description: putative mitochondrial carrier protein
MSFSAARVSEHGGEFEEARGMPAEVSWEMLDKSRFFVLVAALFSGVSAALYPAVVLKTHLQVAAPAQAAASAAAAAILRRDGPRGFYRGFGASLAGTVPARALYMAALEATKSVVGSAALRLGVAEPAASAAASAAGGVSAAVAAQVVWTPVDVVSQRLMLQTAPLAAARYRGGTDAFRKILLADGVRGLYRGFGISVLTYAPSSAAWWASYVTAQRLLWRAVGPAAHDSRGAAIALQGASAAAAGSAAALVTMPLDTVKTRLQVMDAGAQAPTLAAAARALVREGGWSACYRGFGPRWASMSLSSATMVTVYEFLKRLSAKEGSL

SEQ ID NO: 26565 - protein, 306 aa, Zea mays subsp. mays
  peptide (1)..(306): Ceres Seq. ID no. 12373702
  misc_feature (1)..(306): NCBI GI NO: 37534064 NR Description: putative Tricarboxylate transport protein
  misc_feature (1)..(204): NCBI GI NO: 18410193 NR Description: mitochondrial carrier protein family
  misc_feature (209)..(302): NCBI GI NO: 18410193 NR Description: mitochondrial carrier protein family
  misc_feature (1)..(303): NCBI GI NO: 21594326 NR Description: mitochondrial carrier-like protein
  misc_feature (1)..(303): NCBI GI NO: 7486721 NR Description: hypothetical protein F9D12
  misc_feature (1)..(303): NCBI GI NO: 15239622 NR Description: mitochondrial carrier protein family
  misc_feature (4)..(303): NCBI GI NO: 18417739 NR Description: mitochondrial carrier protein family
  misc_feature (4)..(201): NCBI GI NO: 11358653 NR Description: probable mitochondrial carrier protein -Arabidopsis thaliana
  misc_feature (207)..(303): NCBI GI NO: 11358653 NR Description: probable mitochondrial carrier protein -Arabidopsis thaliana
  misc_feature (4)..(303): NCBI GI NO: 21553961 NR Description: putative mitochondrial carrier protein
MPAEVSWEMLDKSRFFVLVAALFSGVSAALYPAVVLKTHLQVAAPAQAAASAAAAAILRRDGPRGFYRGFGASLAGTVPARALYMAALEATKSVVGSAALRLGVAEPAASAAASAAGGVSAAVAAQVVWTPVDVVSQRLMLQTAPLAAARYRGGTDAFRKILLADGVRGLYRGFGISVLTYAPSSAAWWASYVTAQRLLWRAVGPAAHDSRGAAIALQGASAAAAGSAAALVTMPLDTVKTRLQVMDAGAQAPTLAAAARALVREGGWSACYRGFGPRWASMSLSSATMVTVYEFLKRLSAKEGSL

SEQ ID NO: 26566 - protein, 298 aa, Zea mays subsp. mays
  peptide (1)..(298): Ceres Seq. ID no. 12373703
  misc_feature (1)..(298): NCBI GI NO: 37534064 NR Description: putative Tricarboxylate transport protein
  misc_feature (1)..(196): NCBI GI NO: 18410193 NR Description: mitochondrial carrier protein family
  misc_feature (201)..(294): NCBI GI NO: 18410193 NR Description: mitochondrial carrier protein family
  misc_feature (1)..(295): NCBI GI NO: 21594326 NR Description: mitochondrial carrier-like protein
  misc_feature (1)..(295): NCBI GI NO: 7486721 NR Description: hypothetical protein F9D12
  misc_feature (1)..(295): NCBI GI NO: 15239622 NR Description: mitochondrial carrier protein family
  misc_feature (1)..(295): NCBI GI NO: 18417739 NR Description: mitochondrial carrier protein family
  misc_feature (1)..(193): NCBI GI NO: 11358653 NR Description: probable mitochondrial carrier protein -Arabidopsis thaliana
  misc_feature (199)..(295): NCBI GI NO: 11358653 NR Description: probable mitochondrial carrier protein -Arabidopsis thaliana
  misc_feature (1)..(295): NCBI GI NO: 21553961 NR Description: putative mitochondrial carrier protein
MLDKSRFFVLVAALFSGVSAALYPAVVLKTHLQVAAPAQAAASAAAAAILRRDGPRGFYRGFGASLAGTVPARALYMAALEATKSVVGSAALRLGVAEPAASAAASAAGGVSAAVAAQVVWTPVDVVSQRLMLQTAPLAAARYRGGTDAFRKILLADGVRGLYRGFGISVLTYAPSSAAWWASYVTAQRLLWRAVGPAAHDSRGAAIALQGASAAAAGSAAALVTMPLDTVKTRLQVMDAGAQAPTLAAAARALVREGGWSACYRGFGPRWASMSLSSATMVTVYEFLKRLSAKEGSL

SEQ ID NO: 26567 - DNA, 968 bp, Zea mays subsp. mays
  misc_feature (1)..(968): Ceres Seq. ID no. 12368885
acataacccgccattcccactcccctcgccgcctgcgtccacctccgccccccgccctccccgcgtcccccctctcctacgcagatcgtccaggtaagatgtcgtccgaggcggtgaaggtggcggtgccggagtcggtactccgcaagcggaagcgcgaggagcagtgggccgccgagaagaaggagaagtccctggccgagaggaagaagtccatcgagaaccggaagctcatcttcacccgcgccaagcagtacgccgaggagtacgatgcccaggagaaggaactggtacagcttaagcgtgaggcccgtttgaagggtggtttctatgtcagtcctgaggcaaagctgctatttgtgatccgcatccgtggtatcaatgccatgcatcctaagaccaggaagatattgcagcttctgcgtttgaggcagatattcaatggcgtgttcctgaaagtcaacaaggctaccattaacatgcttcgcagggttgagccttatgttgcatatgggtacccgaacttgaagagtgtcagggagttgatctacaagaggggctacggaaaactgaacaagcagaggatccctctgtctaacaaccaagtcatcgaggagggcttgggcaagcacaacatcatttgcattgaggatcttgttcatgagatcatgactgtcggcccacacttcaaggaggcgaacaacttcctttggccatttaagctgaaggcaccgctgggaggtctgaagaagaagaggaaccactatgtggagggtggtgatgccggtaaccgtgagaattacatcaacgagctcatcaaaaggatgaattaggttcacgatcaagctctattgtgttctaagaaactttctgtgctctcccaattttacattattaggaagcggatgaatatgcatgcagttttgttgtttggaactagatgtgtatggaagaaacatgatcttttc

SEQ ID NO: 26568 - protein, 276 aa, Zea mays subsp. mays
  peptide (1)..(276): Ceres Seq. ID no. 12368886
  misc_feature (116)..(168): Pfam Name: Pfam Description:  Ribosomal protein L30p/L7e
  misc_feature (33)..(276): NCBI GI NO: 38637548 NR Description: putative 60S ribosomal protein L7
  misc_feature (33)..(276): NCBI GI NO: 38346542 NR Description: OSJNBa0035M09.3
  misc_feature (39)..(276): NCBI GI NO: 15226212 NR Description: putative ribosomal protein L7
  misc_feature (40)..(276): NCBI GI NO: 445613 NR Description: ribosomal protein L7
  misc_feature (31)..(276): NCBI GI NO: 30689623 NR Description: 60S ribosomal protein L7 (RPL7C)
  misc_feature (33)..(276): NCBI GI NO: 15231288 NR Description: ribosomal protein, putative; protein id:At3g13580
  misc_feature (39)..(276): NCBI GI NO: 30689617 NR Description: 60S ribosomal protein L7 (RPL7C)
  misc_feature (39)..(276): NCBI GI NO: 27311547 NR Description: Unknown protein [Arabidopsis thaliana]
  misc_feature (42)..(275): NCBI GI NO: 28630259 NR Description: ribosomal protein L7 [Branchiostoma lanceolatum]
  misc_feature (29)..(275): NCBI GI NO: 18253049 NR Description: ribosomal protein L7 [Spodoptera frugiperda]
ITRHSHSPRRLRPPPPPALPASPLSYADRPGKMSSEAVKVAVPESVLRKRKREEQWAAEKKEKSLAERKKSIENRKLIFTRAKQYAEEYDAQEKELVQLKREARLKGGFYVSPEAKLLFVIRIRGINAMHPKTRKILQLLRLRQIFNGVFLKVNKATINMLRRVEPYVAYGYPNLKSVRELIYKRGYGKLNKQRIPLSNNQVIEEGLGKHNIICIEDLVHEIMTVGPHFKEANNFLWPFKLKAPLGGLKKKRNHYVEGGDAGNRENYINELIKRMN

SEQ ID NO: 26569 - protein, 244 aa, Zea mays subsp. mays
  peptide (1)..(244): Ceres Seq. ID no. 12368887
  misc_feature (84)..(136): Pfam Name: Pfam Description:  Ribosomal protein L30p/L7e
  misc_feature (1)..(244): NCBI GI NO: 38637548 NR Description: putative 60S ribosomal protein L7
  misc_feature (1)..(244): NCBI GI NO: 38346542 NR Description: OSJNBa0035M09.3
  misc_feature (7)..(244): NCBI GI NO: 15226212 NR Description: putative ribosomal protein L7
  misc_feature (8)..(244): NCBI GI NO: 445613 NR Description: ribosomal protein L7
  misc_feature (1)..(244): NCBI GI NO: 30689623 NR Description: 60S ribosomal protein L7 (RPL7C)
  misc_feature (1)..(244): NCBI GI NO: 15231288 NR Description: ribosomal protein, putative; protein id:At3g13580
  misc_feature (7)..(244): NCBI GI NO: 30689617 NR Description: 60S ribosomal protein L7 (RPL7C)
  misc_feature (7)..(244): NCBI GI NO: 27311547 NR Description: Unknown protein [Arabidopsis thaliana]
  misc_feature (10)..(243): NCBI GI NO: 28630259 NR Description: ribosomal protein L7 [Branchiostoma lanceolatum]
  misc_feature (1)..(243): NCBI GI NO: 18253049 NR Description: ribosomal protein L7 [Spodoptera frugiperda]
MSSEAVKVAVPESVLRKRKREEQWAAEKKEKSLAERKKSIENRKLIFTRAKQYAEEYDAQEKELVQLKREARLKGGFYVSPEAKLLFVIRIRGINAMHPKTRKILQLLRLRQIFNGVFLKVNKATINMLRRVEPYVAYGYPNLKSVRELIYKRGYGKLNKQRIPLSNNQVIEEGLGKHNIICIEDLVHEIMTVGPHFKEANNFLWPFKLKAPLGGLKKKRNHYVEGGDAGNRENYINELIKRMN

SEQ ID NO: 26570 - protein, 148 aa, Zea mays subsp. mays
  peptide (1)..(148): Ceres Seq. ID no. 12368888
  misc_feature (1)..(40): Pfam Name: Pfam Description:  Ribosomal protein L30p/L7e
  misc_feature (1)..(148): NCBI GI NO: 38637548 NR Description: putative 60S ribosomal protein L7
  misc_feature (1)..(148): NCBI GI NO: 38346542 NR Description: OSJNBa0035M09.3
  misc_feature (1)..(148): NCBI GI NO: 15226212 NR Description: putative ribosomal protein L7
  misc_feature (1)..(148): NCBI GI NO: 445613 NR Description: ribosomal protein L7
  misc_feature (1)..(148): NCBI GI NO: 30689623 NR Description: 60S ribosomal protein L7 (RPL7C)
  misc_feature (1)..(148): NCBI GI NO: 15231288 NR Description: ribosomal protein, putative; protein id:At3g13580
  misc_feature (1)..(148): NCBI GI NO: 30689617 NR Description: 60S ribosomal protein L7 (RPL7C)
  misc_feature (1)..(148): NCBI GI NO: 27311547 NR Description: Unknown protein [Arabidopsis thaliana]
  misc_feature (1)..(147): NCBI GI NO: 28630259 NR Description: ribosomal protein L7 [Branchiostoma lanceolatum]
  misc_feature (1)..(147): NCBI GI NO: 18253049 NR Description: ribosomal protein L7 [Spodoptera frugiperda]
MHPKTRKILQLLRLRQIFNGVFLKVNKATINMLRRVEPYVAYGYPNLKSVRELIYKRGYGKLNKQRIPLSNNQVIEEGLGKHNIICIEDLVHEIMTVGPHFKEANNFLWPFKLKAPLGGLKKKRNHYVEGGDAGNRENYINELIKRMN

SEQ ID NO: 26571 - DNA, 1231 bp, Zea mays subsp. mays
  misc_feature (1)..(1231): Ceres Seq. ID no. 12363179
gcacgagaccattacctagaacatcctaatcgaaaaaaaggaaaaccacacaccggccaaaccacgactgcaggaggcgggtagtagcaagagaaaggaaacgctctcccagccccaaagaaaaaggcagcacaccaactcaccaagaaagtgtggaactgctcctgcctgcagcctcctgctcatcgaccctttcgccccacaagctcgattcctcgctcggccatggctgcacccgcggaggagacgcttgccgccgaggatacggcgtcaccaccgccgccggcgaggtctgcggggttctggttccttggcgaggataagtctgtccacaaggctctcggcgggggtaaaactgctgatgtacttttgtggaaagacaagaagacctctgctgcggtagttggtggtgcaactgtcctatgggttctgttcgaaattgtagaataccatctcctgaccctggtttctcatgtgctgatcgctgcactgaccatcttgttcctgtggtccaatgcgactgtctttatcaaaaagagtcctcctgatgttcctgaagtgcagatatctgaagaccttgctgtaaacattgcgctagcattgcgtgctgacatcaacaaggcacttgccctgcttcgggagattgctctgggccataacctgatgaagttcctaggcgtggtcgtcgccctttggattctttcagagatcggggagctatgtgatctcctgagattgatgtacattgtggtcttgatcctccacacagtgccgatactgtaccacaagtatcaggaccaggtggacaatttcgctgcaaaggcgcacagggagctctgcaagcaatacgcggtcctggatgccaaagttctgagcaagattccaagagctccaccaaaagataagaaacagaactagaacgtggaggatgacaagcgccttgttttcggcttgggcgacgagagtttgtagccaatggtctgatgtggttcgtgggctttgtgtaggtgcacagtttcacgtatatgttctggtcgtgtaatctatatgtttatataaacctgtaggggtgttgatgaccatcgaaagtgtcgtaaatattcagtagtatatgtagcttagggcttaagcggttgtgtttataaggtcattgtcgttgtcgatgggaagtattatcatgttattttcaggactcaggagtataaaatgaaataaaatgtgaattcatctg

SEQ ID NO: 26572 - protein, 230 aa, Zea mays subsp. mays
  peptide (1)..(230): Ceres Seq. ID no. 12363180
  misc_feature (1)..(228): NCBI GI NO: 34904202 NR Description: P0492F05.25
  misc_feature (1)..(230): NCBI GI NO: 15237093 NR Description: putative protein; protein id: At4g11220
  misc_feature (1)..(228): NCBI GI NO: 34909318 NR Description: OSJNBb0021A09.5
  misc_feature (1)..(230): NCBI GI NO: 15236556 NR Description: putative protein; protein id: At4g23630
  misc_feature (18)..(227): NCBI GI NO: 18406991 NR Description: expressed protein; protein id: At2g46170
  misc_feature (30)..(225): NCBI GI NO: 15222616 NR Description: hypothetical protein; protein id: At1g64090
  misc_feature (12)..(228): NCBI GI NO: 15238125 NR Description: putative protein; protein id: At5g41600
  misc_feature (30)..(228): NCBI GI NO: 34897094 NR Description: unknown protein
  misc_feature (33)..(220): NCBI GI NO: 18398810 NR Description: expressed protein; protein id: At3g10260
  misc_feature (33)..(220): NCBI GI NO: 30681227 NR Description: expressed protein [Arabidopsis thaliana]
MAAPAEETLAAEDTASPPPPARSAGFWFLGEDKSVHKALGGGKTADVLLWKDKKTSAAVVGGATVLWVLFEIVEYHLLTLVSHVLIAALTILFLWSNATVFIKKSPPDVPEVQISEDLAVNIALALRADINKALALLREIALGHNLMKFLGVVVALWILSEIGELCDLLRLMYIVVLILHTVPILYHKYQDQVDNFAAKAHRELCKQYAVLDAKVLSKIPRAPPKDKKQN

SEQ ID NO: 26573 - DNA, 1485 bp, Zea mays subsp. mays
  misc_feature (1)..(1485): Ceres Seq. ID no. 12352324
  misc_feature (386)..(386): n is a, c, t, g, unknown, or other
ctaccgtctgcgtctgcccgtcttcctctctctctctctctctcctctccctcattctggatccaccgccgcagccttagctgggtccgtcgctgtcgctccgcctcccgctcgcttgccgggcccgacacgcccgccaccgcctccgctttgtctctccggcgatccgacgccccacccggcgtctgtgcagagcagtcgtgaggagttctctgttgtgggctgcccggcgatggaccggggcgagcgtctcggccgcgcgctggacgccttcgggggcaacctgtgggcgctggttgacgcagcgctggacgcggccgctcgcgaccgccccgacgagcttcgcgcgcgccgcgatagcatcgtcgagcgcctctacgctgccnccgcgggctgtagcaactgcgccgggcgtccgccgtctgttgccgctttagcggccgcggggctggaggaagaggacggcgaggaggcggctccggcttctccgtgggcggaggctgacgcgcaagccggtggcgcggaggcacagaccgaggtgctcggcgccggcgagcctgatctcgagagcaagatcgtggccatcagggacttcttggaggaccctaatcagcccgagaacgagctggtgagcttgctgcagaacctggcagacatggatgttacctacaacgcactccaggagactgacatcgggcggcaggttaatggtctgcgcaagcatccttcggccgaggtcaggcggctggtgaagcagctcatcaggaagtggaaggagatagtggacgactgggtgcgcctggacaattccggcggtgacggcagtgcctctgttatgacagctgatggtgactccccacataaaatccaaggcagaagccaccaaagccctcgggtttcggggtttcagtattctccaagcccacagaggtttaatggttcaacttcagagatggctaacaatgggtttgagtcaacaatggatgcgaagcgtagggccagccctgtaccagcacatcataactccaggcagatgaacaacaatcatcattctactactattaccaccagcacgtcatctgctccagctaaagtgacaagggagcaaaagcagagtcttgtggaccttgacaggcttgattctgccaggaagaggctccaggagaattaccaagaagcacaaaatgccaaaaagcagaggacaatccaagtgatggacatcaatgacataccaaagccgaagagcagaaacgctttcatccgcaagagcggcagcggtgggctcccggcgaggcaccgatagcctaacctcctccgtcggctggatatctgcgacacttgcgaagttgtgcctagaaccgcaacgggaaagaaaaagaagcaaacggtttcttgttctttttttccctgtaccttgactgcctaggtttacctccagtgtaatattgtcaggtacataagggtgaaatgatatgatgtttcccg

SEQ ID NO: 26574 - protein, 433 aa, Zea mays subsp. mays
  peptide (1)..(433): Ceres Seq. ID no. 12352325
  misc_feature (88)..(427): NCBI GI NO: 18416107 NR Description: putative protein; protein id: At5g09850
  misc_feature (88)..(427): NCBI GI NO: 9758963 NR Description: gb|AAF19567
  misc_feature (151)..(427): NCBI GI NO: 16648730 NR Description: AT5g09850/MYH9_6 [Arabidopsis thaliana]
  misc_feature (76)..(265): NCBI GI NO: 34904746 NR Description: contains ESTsAU092606
  misc_feature (330)..(417): NCBI GI NO: 34904746 NR Description: contains ESTsAU092606
  misc_feature (94)..(315): NCBI GI NO: 15228385 NR Description: hypothetical protein; protein id: At3g10820.1
  misc_feature (356)..(422): NCBI GI NO: 15228385 NR Description: hypothetical protein; protein id: At3g10820.1
  misc_feature (195)..(249): NCBI GI NO: 38567964 NR Description: OSJNBa0093F12.5
  misc_feature (330)..(422): NCBI GI NO: 37531730 NR Description: putative transcription elongation factor
  misc_feature (206)..(287): NCBI GI NO: 37531730 NR Description: putative transcription elongation factor
  misc_feature (129)..(129): Xaa is any aa, unknown or other
YRLRLPVFLSLSLSPLPHSGSTAAALAGSVAVAPPPARLPGPTRPPPPPLCLSGDPTPHPASVQSSREEFSVVGCPAMDRGERLGRALDAFGGNLWALVDAALDAAARDRPDELRARRDSIVERLYAAXAGCSNCAGRPPSVAALAAAGLEEEDGEEAAPASPWAEADAQAGGAEAQTEVLGAGEPDLESKIVAIRDFLEDPNQPENELVSLLQNLADMDVTYNALQETDIGRQVNGLRKHPSAEVRRLVKQLIRKWKEIVDDWVRLDNSGGDGSASVMTADGDSPHKIQGRSHQSPRVSGFQYSPSPQRFNGSTSEMANNGFESTMDAKRRASPVPAHHNSRQMNNNHHSTTITTSTSSAPAKVTREQKQSLVDLDRLDSARKRLQENYQEAQNAKKQRTIQVMDINDIPKPKSRNAFIRKSGSGGLPARHR

SEQ ID NO: 26575 - protein, 356 aa, Zea mays subsp. mays
  peptide (1)..(356): Ceres Seq. ID no. 12352326
  misc_feature (11)..(350): NCBI GI NO: 18416107 NR Description: putative protein; protein id: At5g09850
  misc_feature (11)..(350): NCBI GI NO: 9758963 NR Description: gb|AAF19567
  misc_feature (74)..(350): NCBI GI NO: 16648730 NR Description: AT5g09850/MYH9_6 [Arabidopsis thaliana]
  misc_feature (1)..(188): NCBI GI NO: 34904746 NR Description: contains ESTsAU092606
  misc_feature (253)..(340): NCBI GI NO: 34904746 NR Description: contains ESTsAU092606
  misc_feature (17)..(238): NCBI GI NO: 15228385 NR Description: hypothetical protein; protein id: At3g10820.1
  misc_feature (279)..(345): NCBI GI NO: 15228385 NR Description: hypothetical protein; protein id: At3g10820.1
  misc_feature (118)..(172): NCBI GI NO: 38567964 NR Description: OSJNBa0093F12.5
  misc_feature (253)..(345): NCBI GI NO: 37531730 NR Description: putative transcription elongation factor
  misc_feature (129)..(210): NCBI GI NO: 37531730 NR Description: putative transcription elongation factor
  misc_feature (52)..(52): Xaa is any aa, unknown or other
MDRGERLGRALDAFGGNLWALVDAALDAAARDRPDELRARRDSIVERLYAAXAGCSNCAGRPPSVAALAAAGLEEEDGEEAAPASPWAEADAQAGGAEAQTEVLGAGEPDLESKIVAIRDFLEDPNQPENELVSLLQNLADMDVTYNALQETDIGRQVNGLRKHPSAEVRRLVKQLIRKWKEIVDDWVRLDNSGGDGSASVMTADGDSPHKIQGRSHQSPRVSGFQYSPSPQRFNGSTSEMANNGFESTMDAKRRASPVPAHHNSRQMNNNHHSTTITTSTSSAPAKVTREQKQSLVDLDRLDSARKRLQENYQEAQNAKKQRTIQVMDINDIPKPKSRNAFIRKSGSGGLPARHR

SEQ ID NO: 26576 - DNA, 1407 bp, Zea mays subsp. mays
  misc_feature (1)..(1407): Ceres Seq. ID no. 12409806
atccatcccgagcaagcaagtaatatggcttggtcttgtgctcgtccgatgagcatcgccctcgctgccgtcctcctgctgtgcggcggcgcgtggctgcagcaggcggcggaggcgcgcccccaccacatggacgacgacagcagcatcgacatggaccgcggcagcgacgacttcttctccatcgtggggtactcgccggaggacctgacgcagcacgaccggctcgtcaggctgttcgaggagtgggtggccaagtaccgcaaggcgtacggcagcttcgaggagaagctgcgccggttcgaggtgttcaaggacaacctgcaccacatcgacgaggccaacaggaaggaggtcaccagctactggctggggcctcaacgccttcgccgacctcacgcacgacgagttcaaggccacctacctgggcctcctgcccgaagaggaccagcggtggccggttcaggtacggcggcgtgggcgacggcggcgacgaggtgcccgcgtccgtggactggcggaagaagggcgccgtgacggaggtcaagaaccaggggcagtgcggcagctgctgggccttctccacggtggcggccgtggaagggatcaaccagatcgtgacgggcaacctcacgtcgctgtcggagcagcagctggtcgactgcagcaccgacgggaacaacgggtgcagcggcggcgtcatggacaacgccttctcgttcatcgccaccggcgccgggctccgctccgaggaggcgtacccgtacctcatggaggaaggggactgcgacgacagggcccgcgacggcgaggtgctcgtcactatatccgggtacgaggacgtgccggccaacgacgagcaggcgctcgtcaaggccctcgcccaccagcccgtcagcgtcgccatcgaggcgtccgggaggcacttccagttctacagcgggggcgtgttcgatggaccgtgcgggtcggagctggaccacggcgtggcggcggtgggctacggcagcagcaaggggcaggactacatcatcgtcaagaactcgtggggcacccactggggcgagaagggctacatccgcatgaagaggggcaccggcaagccggagggcctctgcggcatcaacaagatggcatcctacccgaccaaggaccattgatggatcatggacgacggagatcatatctatcttcccttccctttcatccgactctttcgatttccatcgtttgcccccttttcctgaatgtgtgtgttttttttatatattactgtgtcaagtaatttctcgatggatcgatcgaggaagaacgacaaacatgcactcaagcacgagcgcagcaatgtcatctttctcttcatttggtgcgttgaaatgacgaatatcaaataaagtggtttatttc

SEQ ID NO: 26577 - protein, 178 aa, Zea mays subsp. mays
  peptide (1)..(178): Ceres Seq. ID no. 12409807
  misc_feature (60)..(125): NCBI GI NO: 14719319 NR Description: putative cysteine proteinase [Oryza sativa]
  misc_feature (61)..(125): NCBI GI NO: 34905996 NR Description: putative cysteine proteinase
  misc_feature (60)..(125): NCBI GI NO: 18418684 NR Description: cysteine protease XCP1; protein id: At4g35350
  misc_feature (60)..(125): NCBI GI NO: 37780039 NR Description: cysteine protease 14 [Trifolium repens]
  misc_feature (60)..(125): NCBI GI NO: 37780041 NR Description: cysteine protease 14 [Trifolium repens]
  misc_feature (60)..(125): NCBI GI NO: 22759715 NR Description: cysteine proteinase [Zinnia elegans]
  misc_feature (60)..(125): NCBI GI NO: 30141025 NR Description: cysteine protease-4 [Helianthus annuus]
  misc_feature (48)..(125): NCBI GI NO: 18394919 NR Description: cysteine proteinase XCP2; protein id: At1g20850
  misc_feature (60)..(125): NCBI GI NO: 7435773 NR Description: cysteine proteinase (EC 3
  misc_feature (60)..(125): NCBI GI NO: 2118132 NR Description: cysteine proteinase (EC 3.4.22.-) - Douglas fir
IHPEQASNMAWSCARPMSIALAAVLLLCGGAWLQQAAEARPHHMDDDSSIDMDRGSDDFFSIVGYSPEDLTQHDRLVRLFEEWVAKYRKAYGSFEEKLRRFEVFKDNLHHIDEANRKEVTSYWLGPQRLRRPHARRVQGHLPGPPARRGPAVAGSGTAAWATAATRCPRPWTGGRRAP

SEQ ID NO: 26578 - protein, 170 aa, Zea mays subsp. mays
  peptide (1)..(170): Ceres Seq. ID no. 12409808
  misc_feature (52)..(117): NCBI GI NO: 14719319 NR Description: putative cysteine proteinase [Oryza sativa]
  misc_feature (53)..(117): NCBI GI NO: 34905996 NR Description: putative cysteine proteinase
  misc_feature (52)..(117): NCBI GI NO: 18418684 NR Description: cysteine protease XCP1; protein id: At4g35350
  misc_feature (52)..(117): NCBI GI NO: 37780039 NR Description: cysteine protease 14 [Trifolium repens]
  misc_feature (52)..(117): NCBI GI NO: 37780041 NR Description: cysteine protease 14 [Trifolium repens]
  misc_feature (52)..(117): NCBI GI NO: 22759715 NR Description: cysteine proteinase [Zinnia elegans]
  misc_feature (52)..(117): NCBI GI NO: 30141025 NR Description: cysteine protease-4 [Helianthus annuus]
  misc_feature (40)..(117): NCBI GI NO: 18394919 NR Description: cysteine proteinase XCP2; protein id: At1g20850
  misc_feature (52)..(117): NCBI GI NO: 7435773 NR Description: cysteine proteinase (EC 3
  misc_feature (52)..(117): NCBI GI NO: 2118132 NR Description: cysteine proteinase (EC 3.4.22.-) - Douglas fir
MAWSCARPMSIALAAVLLLCGGAWLQQAAEARPHHMDDDSSIDMDRGSDDFFSIVGYSPEDLTQHDRLVRLFEEWVAKYRKAYGSFEEKLRRFEVFKDNLHHIDEANRKEVTSYWLGPQRLRRPHARRVQGHLPGPPARRGPAVAGSGTAAWATAATRCPRPWTGGRRAP

SEQ ID NO: 26579 - protein, 162 aa, Zea mays subsp. mays
  peptide (1)..(162): Ceres Seq. ID no. 12409809
  misc_feature (44)..(109): NCBI GI NO: 14719319 NR Description: putative cysteine proteinase [Oryza sativa]
  misc_feature (45)..(109): NCBI GI NO: 34905996 NR Description: putative cysteine proteinase
  misc_feature (44)..(109): NCBI GI NO: 18418684 NR Description: cysteine protease XCP1; protein id: At4g35350
  misc_feature (44)..(109): NCBI GI NO: 37780039 NR Description: cysteine protease 14 [Trifolium repens]
  misc_feature (44)..(109): NCBI GI NO: 37780041 NR Description: cysteine protease 14 [Trifolium repens]
  misc_feature (44)..(109): NCBI GI NO: 22759715 NR Description: cysteine proteinase [Zinnia elegans]
  misc_feature (44)..(109): NCBI GI NO: 30141025 NR Description: cysteine protease-4 [Helianthus annuus]
  misc_feature (32)..(109): NCBI GI NO: 18394919 NR Description: cysteine proteinase XCP2; protein id: At1g20850
  misc_feature (44)..(109): NCBI GI NO: 7435773 NR Description: cysteine proteinase (EC 3
  misc_feature (44)..(109): NCBI GI NO: 2118132 NR Description: cysteine proteinase (EC 3.4.22.-) - Douglas fir
MSIALAAVLLLCGGAWLQQAAEARPHHMDDDSSIDMDRGSDDFFSIVGYSPEDLTQHDRLVRLFEEWVAKYRKAYGSFEEKLRRFEVFKDNLHHIDEANRKEVTSYWLGPQRLRRPHARRVQGHLPGPPARRGPAVAGSGTAAWATAATRCPRPWTGGRRAP

SEQ ID NO: 26580 - DNA, 1024 bp, Zea mays subsp. mays
  misc_feature (1)..(1024): Ceres Seq. ID no. 12407960
gtccatccatccatccaggtagtccgagccagcgaaccaactattcgtttgcttttcgtcttcgtcctctctttgcccagttgtcggtcgcccgcgccgtcgtctccgctccgccggccggcctgcgaaaccctagcgaggcgagcgagagagaaactagcggccatgttcggctacaggaaggctgacccggacctcgaggccggcgggtcctcgctgctgtacccgggaatgacggagaagccccgagcttcggtgggcgttcgtccgcaaggatctacgtcatcctagccgtccagctcgccatgacggccgcggtctccgccttcgtcgtcaaggtgcccgccgtctccaacttcttcgtctcctccaacgccggggtcgcactctacatcttcctcatcatcctgcctttcctcgtgctgtgccctctgcgctactaccaccagaagcatccggtcaatctgctgctgctcggcctcttcaccgtcgccatcagctttgccgtcggcatgacatgcgctttcactagcggaaaaatcattttggaggctgccattcttacagcagtggtggtgatcagcttaactgcgtacactttctgggctgcaaagaggggccatgacttcaacttcctcggtcccttcctatttgctgctatcatggtgctcatggtgttttcactaatccagatctttttcccgctgggtaagatatctgtgatgatatacggtgggttggcatcacttatcttctgtggatacatcatctatgacacggacaatgtcatcaagcgctacacctacgatgaatatatatgggctgctgtttcactctacctcgacgtcatcaacctgttcctgtctctgctgcagctgctgagggcagccgatagctgagctcgtcaagctttcacttggatcttgttctcacatacatttgtgtatatcacaaactctgtaatggtcatggatactccaatttataactatactttgtcggtggctcggtgttaccttggtcc

SEQ ID NO: 26581 - protein, 197 aa, Zea mays subsp. mays
  peptide (1)..(197): Ceres Seq. ID no. 12407961
  misc_feature (1)..(196): Pfam Name: Pfam Description:  Uncharacterised protein family UPF0005
  misc_feature (1)..(196): NCBI GI NO: 34393841 NR Description: putative z-protein
  misc_feature (1)..(197): NCBI GI NO: 14626300 NR Description: putative receptor-associated protein
  misc_feature (1)..(197): NCBI GI NO: 15229411 NR Description: putative protein; protein id: At3g63310.1
  misc_feature (1)..(196): NCBI GI NO: 15218701 NR Description: putative glutamate/aspartate-binding peptide
  misc_feature (1)..(194): NCBI GI NO: 15235466 NR Description: putative glutamate-/aspartate-binding peptide
  misc_feature (1)..(197): NCBI GI NO: 18414455 NR Description: Expressed protein; protein id: At4g15470
  misc_feature (1)..(197): NCBI GI NO: 34393840 NR Description: putative z-protein
  misc_feature (1)..(157): NCBI GI NO: 15810201 NR Description: AT4g15470/dl3775w [Arabidopsis thaliana]
  misc_feature (1)..(77): NCBI GI NO: 7485070 NR Description: hypothetical protein - Arabidopsis thaliana
  misc_feature (77)..(148): NCBI GI NO: 7485070 NR Description: hypothetical protein - Arabidopsis thaliana
MTAAVSAFVVKVPAVSNFFVSSNAGVALYIFLIILPFLVLCPLRYYHQKHPVNLLLLGLFTVAISFAVGMTCAFTSGKIILEAAILTAVVVISLTAYTFWAAKRGHDFNFLGPFLFAAIMVLMVFSLIQIFFPLGKISVMIYGGLASLIFCGYIIYDTDNVIKRYTYDEYIWAAVSLYLDVINLFLSLLQLLRAADS

SEQ ID NO: 26582 - protein, 128 aa, Zea mays subsp. mays
  peptide (1)..(128): Ceres Seq. ID no. 12407962
  misc_feature (1)..(127): Pfam Name: Pfam Description:  Uncharacterised protein family UPF0005
  misc_feature (1)..(127): NCBI GI NO: 34393841 NR Description: putative z-protein
  misc_feature (1)..(128): NCBI GI NO: 14626300 NR Description: putative receptor-associated protein
  misc_feature (1)..(128): NCBI GI NO: 15229411 NR Description: putative protein; protein id: At3g63310.1
  misc_feature (1)..(127): NCBI GI NO: 15218701 NR Description: putative glutamate/aspartate-binding peptide
  misc_feature (1)..(125): NCBI GI NO: 15235466 NR Description: putative glutamate-/aspartate-binding peptide
  misc_feature (1)..(128): NCBI GI NO: 18414455 NR Description: Expressed protein; protein id: At4g15470
  misc_feature (1)..(128): NCBI GI NO: 34393840 NR Description: putative z-protein
  misc_feature (1)..(88): NCBI GI NO: 15810201 NR Description: AT4g15470/dl3775w [Arabidopsis thaliana]
  misc_feature (8)..(79): NCBI GI NO: 7485070 NR Description: hypothetical protein - Arabidopsis thaliana
  misc_feature (1)..(127): NCBI GI NO: 40018604 NR Description: Unknown (protein for MGC:73002)
MTCAFTSGKIILEAAILTAVVVISLTAYTFWAAKRGHDFNFLGPFLFAAIMVLMVFSLIQIFFPLGKISVMIYGGLASLIFCGYIIYDTDNVIKRYTYDEYIWAAVSLYLDVINLFLSLLQLLRAADS

SEQ ID NO: 26583 - DNA, 1474 bp, Zea mays subsp. mays
  misc_feature (1)..(1474): Ceres Seq. ID no. 12352327
agaaatcctccttcaagatggtcgttttgggccaacaacgtacgactcctcccacaggggggctgctgccggagaaatccgtgcaggagcagaactcagtctcatcatcttcctccacccgacagatgattggaggaggtatccagtggtggagcaggtccctgtgggtcaagtccagggcgtggatccggaaccccatgaacatggccctgtccgtctggatcctggccgtcggcgtctcgggcgccatcctcttcatggtgatgacggggatgctcaaccgcgtgctgccaagcaagccgcggagggacacgtggttcgaggtgaacaaccagatcctgaacgcgctcttcaccctcatgtgcctgtaccagcacccgaggaggttctaccacctggccctcgtgtgccgctggaaggccggcgacatgcaccagctccgccaagcgtactgcaaggacggggcctgcaagcccaacgagaggaagcacatgacggctgtcatcctgctgctccacctcaactgctttgctcagtacgcgctctgtggcctcaaccttggctaccggaggccccggcgtccggtggtcggtgtcgccctcaccgtagcggtcgccatctgcgcgccggccgtcgctgggatgtacaacaacctcagtcctctcgggagagactacgaggcgccggcgccggcggaggggatgataataagtgaggaagagtcgcagctccagcgcaaaacgcccgacaccgagaggcgctactcgttggtgccacggcaaggacaaggagaagaaccgcagtgggtcggcgggctgtgggaggacctgtgggacgacatgtcgctggcgtacctgtcgctgttctgcagctgctgcgtgttcgggtggaacgcgagcaggctcggcttgggcaacatgtacgtccacgtcgccaccttcgtgctcctgtgcctggcgcccttcttcatcttggacctggcggccatcaacgtggacgacgaggcggtcagggacgcgctggggctggccggcatcttcctctgcgtgttcggcctgctctacggcggattctggaggatccagatgcgcaggcggttcggcctccccgagaaccgcgcctgctgcggcaagccggacctcaccgactgcctactgtggctctgctgctacccgtgctcgctagcgcaggaggtccgtacggcagacgcctacgaggtggtggtgctgctggacacgccgatgcatcgccatccgactctgcaggaagagctggccacgatgcaggagccaccagatgaagaagaaggaggcggtgtcatccccccttcgacagtgtcagctacacgctcataagcagtacccaacatgtacaggatgagcagtttcaatttcaacatcaggtggtcatttcaatgtatccatgcagccgctgaatatcatcattaaaaaaagcagcaaaaacagccttctct

SEQ ID NO: 26584 - protein, 450 aa, Zea mays subsp. mays
  peptide (1)..(450): Ceres Seq. ID no. 12352328
  misc_feature (265)..(402): Pfam Name: Pfam Description:  Protein of unknown function, DUF614
  misc_feature (31)..(407): NCBI GI NO: 17064778 NR Description: Unknown protein [Arabidopsis thaliana]
  misc_feature (22)..(407): NCBI GI NO: 15239077 NR Description: putative protein; protein id: At5g05350.1
  misc_feature (50)..(406): NCBI GI NO: 34907898 NR Description: P0439E11.13
  misc_feature (22)..(278): NCBI GI NO: 10176747 NR Description: gb|AAF01523
  misc_feature (31)..(268): NCBI GI NO: 15228414 NR Description: unknown protein; protein id: At3g10980.1
KSSFKMVVLGQQRTTPPTGGLLPEKSVQEQNSVSSSSSTRQMIGGGIQWWSRSLWVKSRAWIRNPMNMALSVWILAVGVSGAILFMVMTGMLNRVLPSKPRRDTWFEVNNQILNALFTLMCLYQHPRRFYHLALVCRWKAGDMHQLRQAYCKDGACKPNERKHMTAVILLLHLNCFAQYALCGLNLGYRRPRRPVVGVALTVAVAICAPAVAGMYNNLSPLGRDYEAPAPAEGMIISEEESQLQRKTPDTERRYSLVPRQGQGEEPQWVGGLWEDLWDDMSLAYLSLFCSCCVFGWNASRLGLGNMYVHVATFVLLCLAPFFILDLAAINVDDEAVRDALGLAGIFLCVFGLLYGGFWRIQMRRRFGLPENRACCGKPDLTDCLLWLCCYPCSLAQEVRTADAYEVVVLLDTPMHRHPTLQEELATMQEPPDEEEGGGVIPPSTVSATRS

SEQ ID NO: 26585 - protein, 445 aa, Zea mays subsp. mays
  peptide (1)..(445): Ceres Seq. ID no. 12352329
  misc_feature (260)..(397): Pfam Name: Pfam Description:  Protein of unknown function, DUF614
  misc_feature (26)..(402): NCBI GI NO: 17064778 NR Description: Unknown protein [Arabidopsis thaliana]
  misc_feature (17)..(402): NCBI GI NO: 15239077 NR Description: putative protein; protein id: At5g05350.1
  misc_feature (45)..(401): NCBI GI NO: 34907898 NR Description: P0439E11.13
  misc_feature (17)..(273): NCBI GI NO: 10176747 NR Description: gb|AAF01523
  misc_feature (26)..(263): NCBI GI NO: 15228414 NR Description: unknown protein; protein id: At3g10980.1
MVVLGQQRTTPPTGGLLPEKSVQEQNSVSSSSSTRQMIGGGIQWWSRSLWVKSRAWIRNPMNMALSVWILAVGVSGAILFMVMTGMLNRVLPSKPRRDTWFEVNNQILNALFTLMCLYQHPRRFYHLALVCRWKAGDMHQLRQAYCKDGACKPNERKHMTAVILLLHLNCFAQYALCGLNLGYRRPRRPVVGVALTVAVAICAPAVAGMYNNLSPLGRDYEAPAPAEGMIISEEESQLQRKTPDTERRYSLVPRQGQGEEPQWVGGLWEDLWDDMSLAYLSLFCSCCVFGWNASRLGLGNMYVHVATFVLLCLAPFFILDLAAINVDDEAVRDALGLAGIFLCVFGLLYGGFWRIQMRRRFGLPENRACCGKPDLTDCLLWLCCYPCSLAQEVRTADAYEVVVLLDTPMHRHPTLQEELATMQEPPDEEEGGGVIPPSTVSATRS

SEQ ID NO: 26586 - protein, 409 aa, Zea mays subsp. mays
  peptide (1)..(409): Ceres Seq. ID no. 12352330
  misc_feature (224)..(361): Pfam Name: Pfam Description:  Protein of unknown function, DUF614
  misc_feature (1)..(366): NCBI GI NO: 17064778 NR Description: Unknown protein [Arabidopsis thaliana]
  misc_feature (1)..(366): NCBI GI NO: 15239077 NR Description: putative protein; protein id: At5g05350.1
  misc_feature (9)..(365): NCBI GI NO: 34907898 NR Description: P0439E11.13
  misc_feature (1)..(237): NCBI GI NO: 10176747 NR Description: gb|AAF01523
  misc_feature (1)..(227): NCBI GI NO: 15228414 NR Description: unknown protein; protein id: At3g10980.1
MIGGGIQWWSRSLWVKSRAWIRNPMNMALSVWILAVGVSGAILFMVMTGMLNRVLPSKPRRDTWFEVNNQILNALFTLMCLYQHPRRFYHLALVCRWKAGDMHQLRQAYCKDGACKPNERKHMTAVILLLHLNCFAQYALCGLNLGYRRPRRPVVGVALTVAVAICAPAVAGMYNNLSPLGRDYEAPAPAEGMIISEEESQLQRKTPDTERRYSLVPRQGQGEEPQWVGGLWEDLWDDMSLAYLSLFCSCCVFGWNASRLGLGNMYVHVATFVLLCLAPFFILDLAAINVDDEAVRDALGLAGIFLCVFGLLYGGFWRIQMRRRFGLPENRACCGKPDLTDCLLWLCCYPCSLAQEVRTADAYEVVVLLDTPMHRHPTLQEELATMQEPPDEEEGGGVIPPSTVSATRS

SEQ ID NO: 26587 - DNA, 1531 bp, Zea mays subsp. mays
  misc_feature (1)..(1531): Ceres Seq. ID no. 13498310
  misc_feature (627)..(627): n is a, c, t, g, unknown, or other
  misc_feature (621)..(621): n is a, c, t, g, unknown, or other
  misc_feature (703)..(703): n is a, c, t, g, unknown, or other
  misc_feature (626)..(626): n is a, c, t, g, unknown, or other
  misc_feature (110)..(110): n is a, c, t, g, unknown, or other
  misc_feature (111)..(111): n is a, c, t, g, unknown, or other
  misc_feature (622)..(622): n is a, c, t, g, unknown, or other
  misc_feature (604)..(604): n is a, c, t, g, unknown, or other
  misc_feature (112)..(112): n is a, c, t, g, unknown, or other
  misc_feature (699)..(699): n is a, c, t, g, unknown, or other
  misc_feature (623)..(623): n is a, c, t, g, unknown, or other
  misc_feature (624)..(624): n is a, c, t, g, unknown, or other
  misc_feature (698)..(698): n is a, c, t, g, unknown, or other
  misc_feature (113)..(113): n is a, c, t, g, unknown, or other
ctctcaactctcgtttcgccggagtatttagcttgcttcagggagcacgtggcggtggaagcttccctaggggtggcggaggcggtggtggtgcttggttgatgtcgatnnnncgcaggtctgctgtgactcggccgtagcggcgacggcggcaccggtggttggtgcggaggcggaggccagggccagggcgcgcgccgagaggcggagccgggccggagagtctggggcgtggaagcacgcggtggccgctggcacggccgatgctacgaggaagcggagtctcggggcaggggagctgctggtggcgcggaagcacggggcggcgtcggtggccggccgcaggagggagatggaggatgccgtgtccgtgcgcgacgcgttctgcgcggagggcacggccgacggcgggaggcgcgacttctacggagtgttcgacggccacggctgctcgcacgtggccgaggcgtgccgggaccggatgcacgagctggtcgccgaggagctcgccgccaccgccgccgacagctcagtctccgcggcggcggcctggaccgtggcgatggaacgcagcttcgcgcggatggacgccgaggtgacgtcngccggcgggcgcgccgnnnncnncagaagcagcacctgccgctgcgacgcgcacaggtgcgaccacgtgggctccacggccgtggtggccgtcnnggangagcacagcgtcattgtggccaactgcggcgacagccgcgccgtgctctgccgtggggacggcgcgccgccgctgccgctgtcgtcggaccacaagcccgaccgccccgacgagctggagcgcatcgagtccgccggcgggcgcgtcatcttctgggagggcgcgcgcgttctgggcgtcctcgccatgtcccgcgccgtcggggacggatacctgaagccgtacgtgtcgtccgttcccgaggtgacggtgaccgaccggtccgacggcgacgagtgcctcatcctgggcagcgacgggctctgggacgtggtgagcaacgaggccgcgtgcgaggtggcgcgcgcctgcctccgcaggggccgggccaagtggtgtgccgaggccgccgcgttgctcaccaagctggccctcgcgaggagaagctccgacaacgtctcggtggtcgtcatcgatctccggaggaggaatcactagttctgtgcagttgtcagctagtactagtactccctccgaaggatggctggtcgcacaagggatttcgcgggggtgcctaattgggttttttttcttccattttcattcaaaaagtttttttttttttttgctgtactctccctgaatcaaaaagttcagaggagcccttagattaattattgtggtagagccggaatttggtccggataccattcggagaggtggtcgcgtagaaaaaactcagaggagagacggtctcacaagaaaatcagtctgtgtattgtatcatctagacatctaatgaaatagcaaccgaaacaaacaccacctccggtgtctggatgttctcgc

SEQ ID NO: 26588 - protein, 275 aa, Zea mays subsp. mays
  peptide (1)..(275): Ceres Seq. ID no. 13498311
  misc_feature (1)..(234): Pfam Name: Pfam Description:  Protein phosphatase 2C
  misc_feature (1)..(239): NCBI GI NO: 34902050 NR Description: putative Serine/threonine phosphatases
  misc_feature (241)..(273): NCBI GI NO: 34902050 NR Description: putative Serine/threonine phosphatases
  misc_feature (1)..(234): NCBI GI NO: 34908256 NR Description: putative protein phosphatase 2C
  misc_feature (224)..(272): NCBI GI NO: 34908256 NR Description: putative protein phosphatase 2C
  misc_feature (1)..(272): NCBI GI NO: 15227078 NR Description: protein phosphatase 2C (PP2C), putative
  misc_feature (1)..(241): NCBI GI NO: 15222398 NR Description: protein phosphatase 2C (PP2C), putative
  misc_feature (236)..(273): NCBI GI NO: 15222398 NR Description: protein phosphatase 2C (PP2C), putative
  misc_feature (1)..(236): NCBI GI NO: 10432446 NR Description: protein phosphatase 2C [Nicotiana tabacum]
  misc_feature (243)..(272): NCBI GI NO: 10432446 NR Description: protein phosphatase 2C [Nicotiana tabacum]
  misc_feature (1)..(236): NCBI GI NO: 7768151 NR Description: protein phpsphatase 2C (PP2C) [Fagus sylvatica]
  misc_feature (84)..(84): Xaa is any aa, unknown or other
  misc_feature (90)..(90): Xaa is any aa, unknown or other
  misc_feature (91)..(91): Xaa is any aa, unknown or other
  misc_feature (92)..(92): Xaa is any aa, unknown or other
  misc_feature (116)..(116): Xaa is any aa, unknown or other
  misc_feature (117)..(117): Xaa is any aa, unknown or other
MEDAVSVRDAFCAEGTADGGRRDFYGVFDGHGCSHVAEACRDRMHELVAEELAATAADSSVSAAAAWTVAMERSFARMDAEVTXAGGRAXXXRSSTCRCDAHRCDHVGSTAVVAVXXEHSVIVANCGDSRAVLCRGDGAPPLPLSSDHKPDRPDELERIESAGGRVIFWEGARVLGVLAMSRAVGDGYLKPYVSSVPEVTVTDRSDGDECLILGSDGLWDVVSNEAACEVARACLRRGRAKWCAEAAALLTKLALARRSSDNVSVVVIDLRRRNH

SEQ ID NO: 26589 - protein, 232 aa, Zea mays subsp. mays
  peptide (1)..(232): Ceres Seq. ID no. 13498312
  misc_feature (1)..(191): Pfam Name: Pfam Description:  Protein phosphatase 2C
  misc_feature (1)..(196): NCBI GI NO: 34902050 NR Description: putative Serine/threonine phosphatases
  misc_feature (198)..(230): NCBI GI NO: 34902050 NR Description: putative Serine/threonine phosphatases
  misc_feature (1)..(191): NCBI GI NO: 34908256 NR Description: putative protein phosphatase 2C
  misc_feature (181)..(229): NCBI GI NO: 34908256 NR Description: putative protein phosphatase 2C
  misc_feature (1)..(229): NCBI GI NO: 15227078 NR Description: protein phosphatase 2C (PP2C), putative
  misc_feature (1)..(198): NCBI GI NO: 15222398 NR Description: protein phosphatase 2C (PP2C), putative
  misc_feature (193)..(230): NCBI GI NO: 15222398 NR Description: protein phosphatase 2C (PP2C), putative
  misc_feature (1)..(193): NCBI GI NO: 10432446 NR Description: protein phosphatase 2C [Nicotiana tabacum]
  misc_feature (200)..(229): NCBI GI NO: 10432446 NR Description: protein phosphatase 2C [Nicotiana tabacum]
  misc_feature (1)..(193): NCBI GI NO: 7768151 NR Description: protein phpsphatase 2C (PP2C) [Fagus sylvatica]
  misc_feature (41)..(41): Xaa is any aa, unknown or other
  misc_feature (47)..(47): Xaa is any aa, unknown or other
  misc_feature (48)..(48): Xaa is any aa, unknown or other
  misc_feature (49)..(49): Xaa is any aa, unknown or other
  misc_feature (73)..(73): Xaa is any aa, unknown or other
  misc_feature (74)..(74): Xaa is any aa, unknown or other
MHELVAEELAATAADSSVSAAAAWTVAMERSFARMDAEVTXAGGRAXXXRSSTCRCDAHRCDHVGSTAVVAVXXEHSVIVANCGDSRAVLCRGDGAPPLPLSSDHKPDRPDELERIESAGGRVIFWEGARVLGVLAMSRAVGDGYLKPYVSSVPEVTVTDRSDGDECLILGSDGLWDVVSNEAACEVARACLRRGRAKWCAEAAALLTKLALARRSSDNVSVVVIDLRRRNH

SEQ ID NO: 26590 - protein, 205 aa, Zea mays subsp. mays
  peptide (1)..(205): Ceres Seq. ID no. 13498313
  misc_feature (1)..(164): Pfam Name: Pfam Description:  Protein phosphatase 2C
  misc_feature (1)..(169): NCBI GI NO: 34902050 NR Description: putative Serine/threonine phosphatases
  misc_feature (171)..(203): NCBI GI NO: 34902050 NR Description: putative Serine/threonine phosphatases
  misc_feature (1)..(164): NCBI GI NO: 34908256 NR Description: putative protein phosphatase 2C
  misc_feature (154)..(202): NCBI GI NO: 34908256 NR Description: putative protein phosphatase 2C
  misc_feature (1)..(202): NCBI GI NO: 15227078 NR Description: protein phosphatase 2C (PP2C), putative
  misc_feature (1)..(171): NCBI GI NO: 15222398 NR Description: protein phosphatase 2C (PP2C), putative
  misc_feature (166)..(203): NCBI GI NO: 15222398 NR Description: protein phosphatase 2C (PP2C), putative
  misc_feature (1)..(166): NCBI GI NO: 10432446 NR Description: protein phosphatase 2C [Nicotiana tabacum]
  misc_feature (173)..(202): NCBI GI NO: 10432446 NR Description: protein phosphatase 2C [Nicotiana tabacum]
  misc_feature (1)..(166): NCBI GI NO: 7768151 NR Description: protein phpsphatase 2C (PP2C) [Fagus sylvatica]
  misc_feature (14)..(14): Xaa is any aa, unknown or other
  misc_feature (20)..(20): Xaa is any aa, unknown or other
  misc_feature (21)..(21): Xaa is any aa, unknown or other
  misc_feature (22)..(22): Xaa is any aa, unknown or other
  misc_feature (46)..(46): Xaa is any aa, unknown or other
  misc_feature (47)..(47): Xaa is any aa, unknown or other
MERSFARMDAEVTXAGGRAXXXRSSTCRCDAHRCDHVGSTAVVAVXXEHSVIVANCGDSRAVLCRGDGAPPLPLSSDHKPDRPDELERIESAGGRVIFWEGARVLGVLAMSRAVGDGYLKPYVSSVPEVTVTDRSDGDECLILGSDGLWDVVSNEAACEVARACLRRGRAKWCAEAAALLTKLALARRSSDNVSVVVIDLRRRNH

SEQ ID NO: 26591 - DNA, 1203 bp, Zea mays subsp. mays
  misc_feature (1)..(1203): Ceres Seq. ID no. 12409796
agcttgattctctctggctggtacgcggtagcctcgctctctctcctacctacacggctacacttaaacggcagcaggcacctgcaggcagggagagctgctaacggaccgatcggggagctgctggccatggagcctggtccggatgcgcccgctggtggtggtggcggaggaggaaccagtattagtgagccagcagaggccgggccgtcgccgtcgtcgtcctcggccgccgcagcagcctcgtcgtcgagccggcagcaggcagagcaggaagcacagcagcaacaaggagcacagcagagggaacagccagcagtaagggcccaggcgcagccgcagccgcagccgcatcagcagcagcctccggcggggctcagccggtacgagtcgcagaagcgccgggactggaacacgttcctgcagtacctgcggaaccacaagccgccgctgacgctggcacgctgcagcggcgcacacgtcatcgagttcctccgctacctggaccagttcggcaagacgaaggtgcacgctgagggctgcgcctacttcgggcagccgaacccgccggcgccctgcacgtgcccgctgcgccaggcctggggtagcctcgacgcgctcatcggccgcctccgcgccgcgtacgaggagtccggcggccgccccgagtccaacccgttcgcggccaaggccgtgcgcatctacctccgcgacgtgcgggaggcgcaggccaaggcccgcggcatcccgtacgagaagaagaagcggaagcgcgggagcgccgccgcgcctccggtcgcgccgcctcctgttgtgactgcagaggccgccgggacgtcgtcaggggccggcggtggtgatgacgaggacgacgacgaaccaccgccatctgcagatgaaccacgacgacagcagaccgccgcgccgactcctcctcctcctgcaagtatgatttccagcactagtgcaagcagtagcagtgtcgccccagtcacgacgacgacgacgacaagcaaggagaaagaaggatccgcgccaagctcgtgataagtttgtagatcatctactagccttctgattcaattctatcatcgccggcctccaaattataatcccaaccgcctccatcttaaatttttagttgctcactattactatatattgttattgtttactggcatatataagagagaggtctaaggg

SEQ ID NO: 26592 - protein, 348 aa, Zea mays subsp. mays
  peptide (1)..(348): Ceres Seq. ID no. 12409797
  misc_feature (121)..(242): Pfam Name: DUF640 Pfam Description: Protein of unknown function
  misc_feature (121)..(286): NCBI GI NO: 34907938 NR Description: B1088C09.17
  misc_feature (122)..(287): NCBI GI NO: 18390725 NR Description: expressed protein; protein id: At1g07090
  misc_feature (127)..(267): NCBI GI NO: 15237680 NR Description: putative protein; protein id: At5g58500.1
  misc_feature (124)..(296): NCBI GI NO: 37535384 NR Description: hypothetical protein
  misc_feature (114)..(258): NCBI GI NO: 18402578 NR Description: expressed protein; protein id: At2g31160
  misc_feature (112)..(269): NCBI GI NO: 15241821 NR Description: putative protein; protein id: At5g28490.1
  misc_feature (123)..(258): NCBI GI NO: 38344650 NR Description: OSJNBb0072M01.12
  misc_feature (121)..(258): NCBI GI NO: 18406012 NR Description: expressed protein; protein id: At2g42610
  misc_feature (122)..(271): NCBI GI NO: 15229310 NR Description: unknown protein; protein id: At3g04510.1
  misc_feature (110)..(258): NCBI GI NO: 18412120 NR Description: Expressed protein; protein id: At1g78815
SLILSGWYAVASLSLLPTRLHLNGSRHLQAGRAANGPIGELLAMEPGPDAPAGGGGGGGTSISEPAEAGPSPSSSSAAAAASSSSRQQAEQEAQQQQGAQQREQPAVRAQAQPQPQPHQQQPPAGLSRYESQKRRDWNTFLQYLRNHKPPLTLARCSGAHVIEFLRYLDQFGKTKVHAEGCAYFGQPNPPAPCTCPLRQAWGSLDALIGRLRAAYEESGGRPESNPFAAKAVRIYLRDVREAQAKARGIPYEKKKRKRGSAAAPPVAPPPVVTAEAAGTSSGAGGGDDEDDDEPPPSADEPRRQQTAAPTPPPPASMISSTSASSSSVAPVTTTTTTSKEKEGSAPSS

SEQ ID NO: 26593 - protein, 305 aa, Zea mays subsp. mays
  peptide (1)..(305): Ceres Seq. ID no. 12409798
  misc_feature (78)..(199): Pfam Name: DUF640 Pfam Description: Protein of unknown function
  misc_feature (78)..(243): NCBI GI NO: 34907938 NR Description: B1088C09.17
  misc_feature (79)..(244): NCBI GI NO: 18390725 NR Description: expressed protein; protein id: At1g07090
  misc_feature (84)..(224): NCBI GI NO: 15237680 NR Description: putative protein; protein id: At5g58500.1
  misc_feature (81)..(253): NCBI GI NO: 37535384 NR Description: hypothetical protein
  misc_feature (71)..(215): NCBI GI NO: 18402578 NR Description: expressed protein; protein id: At2g31160
  misc_feature (69)..(226): NCBI GI NO: 15241821 NR Description: putative protein; protein id: At5g28490.1
  misc_feature (80)..(215): NCBI GI NO: 38344650 NR Description: OSJNBb0072M01.12
  misc_feature (78)..(215): NCBI GI NO: 18406012 NR Description: expressed protein; protein id: At2g42610
  misc_feature (79)..(228): NCBI GI NO: 15229310 NR Description: unknown protein; protein id: At3g04510.1
  misc_feature (67)..(215): NCBI GI NO: 18412120 NR Description: Expressed protein; protein id: At1g78815
MEPGPDAPAGGGGGGGTSISEPAEAGPSPSSSSAAAAASSSSRQQAEQEAQQQQGAQQREQPAVRAQAQPQPQPHQQQPPAGLSRYESQKRRDWNTFLQYLRNHKPPLTLARCSGAHVIEFLRYLDQFGKTKVHAEGCAYFGQPNPPAPCTCPLRQAWGSLDALIGRLRAAYEESGGRPESNPFAAKAVRIYLRDVREAQAKARGIPYEKKKRKRGSAAAPPVAPPPVVTAEAAGTSSGAGGGDDEDDDEPPPSADEPRRQQTAAPTPPPPASMISSTSASSSSVAPVTTTTTTSKEKEGSAPSS

SEQ ID NO: 26594 - DNA, 1508 bp, Zea mays subsp. mays
  misc_feature (1)..(1508): Ceres Seq. ID no. 12366608
gtttttgcccctttggtccctctccctcccccgtccgccctgcactctccagctcaacaaggaagaagagggggccttcaccacaccactcgattcctctttagagcacgacttacgaagagtgcccaggccgtcgccgccgaccagcaaaagggctggaaagcccccctcttttgtgctgtgcgtgcaactcggctcctgccctgccatcttgctttccaagacccctgcgcccccagtcccataattagttaggattaggatcaccaccatttccaaatccttgcagagctgccgaagcgcggatcacagatgaagaggcaatccaagaggcccaccgccagccgcgaatccccagaaacaggggagaagcagaagctggcgttcgcggaggaagaggccccgccggcgcggaaggtggagcccgacgacgaggccgagatggacgaggacgaggacgagctgggcccgggcctgggcggcgggcgcgcggcgcggtcgccgtgcgggctcggggagaagaagcggcgcctggcgctggagcaggtgcgcgcgctggagcgctgcttcgagacggacaacaagctggacccggaccgcaaggcccgcatcgcgcgcgacctcgcgctgcagccccgccaggtcgccgtctggttccagaaccgccgcgcccgctggaagaccaagacgctcgagcgcgacttcgcggcgctgcgcgcgcgccacgacgcgctccgcgccgactgcgacgcgctccgccgcgacaaggacgccctcgccgccgagataagggagttgaggcagaagctgctgcccaagccggaagccacggtgaagctggaggcgacgacgggcaatgacacggcggaggagcgccgccaggcgacggccggcgcgccgcccgcgggggcctgcaaggacggctcctcggacagcgactccagcgtggtcttcagcgacgtcgaggcgtcgccgtactccggcggcgcggggttcgagccgccggccttggccgggctcggcgcgccgttcctggacacgtcggtggcgccgacgggctgctcgtctccccccgttttcgtcgagaccaagtggcagcacgggccgacacagtacccgttcccattcgactcgtacaaggcctgcgccggctatggcttcacggaggaatggcccgcgagctcggacctcatcggcagcgacggcggcgcggcggggttcttctccgaggatcacgcctccagcctcaacttcaactggtgcccgagtggcatccagggctgggagtgaagaggggtttttgatctgcacggctagtgtaaaaaaaccgatgttacggtggcatttgtacatgcatggaactggagtctagtgacctggcctggcgagtgtggtgtggccaaagctagaggacatccagcgcaaaaggcgggaacaggagcagtagtagcctgtaacaataacggaataacttgagccaggctagtaaaaaaagaggatgtaaatgc

SEQ ID NO: 26595 - protein, 325 aa, Zea mays subsp. mays
  peptide (1)..(325): Ceres Seq. ID no. 12366609
  misc_feature (70)..(124): Pfam Name: Pfam Description:  Homeobox domain
  misc_feature (36)..(325): NCBI GI NO: 34902432 NR Description: Unknown protein
  misc_feature (41)..(324): NCBI GI NO: 33943626 NR Description: homeodomain leucine-zipper protein Hox8
  misc_feature (41)..(324): NCBI GI NO: 37533686 NR Description: putative homeodomain leucine zipper protein
  misc_feature (41)..(239): NCBI GI NO: 5006853 NR Description: homeodomain leucine zipper protein [Oryza sativa]
  misc_feature (44)..(218): NCBI GI NO: 11231065 NR Description: homeobox-leucine zipper protein [Zinnia elegans]
  misc_feature (69)..(317): NCBI GI NO: 15148916 NR Description: homeodomain leucine zipper protein HDZ1
  misc_feature (22)..(216): NCBI GI NO: 6723679 NR Description: homeodomain protein [Lycopersicon esculentum]
  misc_feature (46)..(166): NCBI GI NO: 15238405 NR Description: homeobox-leucine zipper protein ATHB-5
  misc_feature (62)..(166): NCBI GI NO: 5305602 NR Description: homeobox protein ATHB6 [Arabidopsis thaliana]
  misc_feature (62)..(166): NCBI GI NO: 18399966 NR Description: homeodomain transcription factor
MKRQSKRPTASRESPETGEKQKLAFAEEEAPPARKVEPDDEAEMDEDEDELGPGLGGGRAARSPCGLGEKKRRLALEQVRALERCFETDNKLDPDRKARIARDLALQPRQVAVWFQNRRARWKTKTLERDFAALRARHDALRADCDALRRDKDALAAEIRELRQKLLPKPEATVKLEATTGNDTAEERRQATAGAPPAGACKDGSSDSDSSVVFSDVEASPYSGGAGFEPPALAGLGAPFLDTSVAPTGCSSPPVFVETKWQHGPTQYPFPFDSYKACAGYGFTEEWPASSDLIGSDGGAAGFFSEDHASSLNFNWCPSGIQGWE

SEQ ID NO: 26596 - protein, 282 aa, Zea mays subsp. mays
  peptide (1)..(282): Ceres Seq. ID no. 12366610
  misc_feature (27)..(81): Pfam Name: Pfam Description:  Homeobox domain
  misc_feature (1)..(282): NCBI GI NO: 34902432 NR Description: Unknown protein
  misc_feature (1)..(281): NCBI GI NO: 33943626 NR Description: homeodomain leucine-zipper protein Hox8
  misc_feature (1)..(281): NCBI GI NO: 37533686 NR Description: putative homeodomain leucine zipper protein
  misc_feature (1)..(196): NCBI GI NO: 5006853 NR Description: homeodomain leucine zipper protein [Oryza sativa]
  misc_feature (1)..(175): NCBI GI NO: 11231065 NR Description: homeobox-leucine zipper protein [Zinnia elegans]
  misc_feature (26)..(274): NCBI GI NO: 15148916 NR Description: homeodomain leucine zipper protein HDZ1
  misc_feature (1)..(173): NCBI GI NO: 6723679 NR Description: homeodomain protein [Lycopersicon esculentum]
  misc_feature (3)..(123): NCBI GI NO: 15238405 NR Description: homeobox-leucine zipper protein ATHB-5
  misc_feature (19)..(123): NCBI GI NO: 5305602 NR Description: homeobox protein ATHB6 [Arabidopsis thaliana]
  misc_feature (19)..(123): NCBI GI NO: 25386231 NR Description: homeodomain transcription factor (ATHB-6)
MDEDEDELGPGLGGGRAARSPCGLGEKKRRLALEQVRALERCFETDNKLDPDRKARIARDLALQPRQVAVWFQNRRARWKTKTLERDFAALRARHDALRADCDALRRDKDALAAEIRELRQKLLPKPEATVKLEATTGNDTAEERRQATAGAPPAGACKDGSSDSDSSVVFSDVEASPYSGGAGFEPPALAGLGAPFLDTSVAPTGCSSPPVFVETKWQHGPTQYPFPFDSYKACAGYGFTEEWPASSDLIGSDGGAAGFFSEDHASSLNFNWCPSGIQGWE

SEQ ID NO: 26597 - protein, 171 aa, Zea mays subsp. mays
  peptide (1)..(171): Ceres Seq. ID no. 12366611
  misc_feature (1)..(146): NCBI GI NO: 5821145 NR Description: RNA binding protein [Homo sapiens]
  misc_feature (1)..(144): NCBI GI NO: 30424862 NR Description: RIKEN cDNA 5033413A03 [Mus musculus]
  misc_feature (1)..(146): NCBI GI NO: 5821143 NR Description: RNA binding protein [Homo sapiens]
  misc_feature (1)..(146): NCBI GI NO: 30424862 NR Description: RIKEN cDNA 5033413A03 [Mus musculus]
  misc_feature (1)..(133): NCBI GI NO: 34868816 NR Description: similar to splicing coactivator subunit SRm300
  misc_feature (1)..(133): NCBI GI NO: 30424862 NR Description: RIKEN cDNA 5033413A03 [Mus musculus]
  misc_feature (1)..(130): NCBI GI NO: 34868816 NR Description: similar to splicing coactivator subunit SRm300
  misc_feature (1)..(130): NCBI GI NO: 30424862 NR Description: RIKEN cDNA 5033413A03 [Mus musculus]
  misc_feature (1)..(143): NCBI GI NO: 30424862 NR Description: RIKEN cDNA 5033413A03 [Mus musculus]
  misc_feature (1)..(143): NCBI GI NO: 34868816 NR Description: similar to splicing coactivator subunit SRm300
MTRRRSAARRRPARRPRGPARTAPRTATPAWSSATSRRRRTPAARGSSRRPWPGSARRSWTRRWRRRAARLPPFSSRPSGSTGRHSTRSHSTRTRPAPAMASRRNGPRARTSSAATAARRGSSPRITPPASTSTGARVASRAGSEEGFLICTASVKKPMLRWHLYMHGTGV

SEQ ID NO: 26598 - DNA, 1715 bp, Zea mays subsp. mays
  misc_feature (1)..(1715): Ceres Seq. ID no. 12406967
accgaggagagagagaccgatacagagagagagaccaagaggacacgggagagaggacgttcatttccgcgtcgtctccgcccgcagccggcagccccaccacccaccacatggccgccatgccgggtggggcccacggcgccggcgccgcggacccgatgcaggtggaccagccgctcccccctgccgccgcaggcacagcacacgcccccgccgacgccaagcatgctggttctatgattgaagggagtgatccggtcacaggccatataatctcgacaaccattggagggaagaatggagagcctaaaaggactatcagctacatggcagagagagttgtgggaactggatcatttggaatcgtcttccaggcaaaatgtctggagactggtgagactgttgcgattaagaaggttttgcaggacaagcgctacaagaacagggagctacaaatcatgcgatccatggatcactgcaatgttgtttccttgaagcattgcttcttctctaccacaagcagagatgaacttttccttaacttagtgatggagtttgttcccgagtcattatatcgggtgttgaaacattacagcaatatgaaccagaggatgccactcatttatgtcaaattatatacctaccagatatttcgaggcttagcctatattcacacagtacctggagtttgccacagggatgtgaaaccacaaaatcttttggttgatccactgactcaccaagtgaagatatgtgattttgggagtgccaaaatgttggtcaaaggtgaagcaaacatatcatatatatgttcacgttattaccgtgctccagagctcatatttggggcaactgagtacacaacatcaattgatatttggtcagctggatgtgttcttgctgagctgcttcttggccagcctctcttccctggtgaaagtgctgtggatcagcttgttgagataataaaggttcttggtaccccaacgcgcgaggaaatccgatgtatgaatccaaactacaccgagtttagatttcctcagatcaaagctcacccatggcacaagattttccacaagcggatgcctccagaagctatagatctcgcttcacgcttgctccagtattcaccaaatctaagatgcactgctcttgaagcgtgtgcacatccattctttgacgatttgcgagaaccacatgcgaggttgccaaatggacggccatttcctccactgttcaactttaaacaggaactagcaaatgcctccccagagctcatcaacaggttgatcccagaccatgctaggcggcatcttgggctcacattattgcccgctactggaccataggcgaaggctctatggtggtgcttcgttgtgcggaaggcaacctgcattcaaggtgtagaatctgacaattattggaaggtcaaacatgagctggcgcgtaaggagaggtggtatgttctcgtgcagccagccttaatttgtcgcatgtcttaatgcaaaaatctgatttttgcccaagtagtgagaggagggaagggggtggtcggtgtattgttaagctattgaaggaattcgatccctgctattgtgttactttctccaacgtttaaacgttgtagtgcgcctgtaagtgttccatatatcccctgttgtcagtcagtgtaattctgtaaatgttattaatgggaaattatttcgtgcttttcc

SEQ ID NO: 26599 - protein, 448 aa, Zea mays subsp. mays
  peptide (1)..(448): Ceres Seq. ID no. 12406968
  misc_feature (108)..(392): Pfam Name: Pfam Description:  Protein kinase domain
  misc_feature (37)..(439): NCBI GI NO: 7434281 NR Description: probable shaggy-like protein kinase etha (EC2
  misc_feature (72)..(447): NCBI GI NO: 15233984 NR Description: shaggy-like protein kinase etha (EC 2
  misc_feature (37)..(442): NCBI GI NO: 15221476 NR Description: shaggy-like kinase, putative; protein id:At1g06390
  misc_feature (72)..(447): NCBI GI NO: 12643751 NR Description: Shaggy-related protein kinase eta (ASK-eta)
  misc_feature (72)..(447): NCBI GI NO: 18700188 NR Description: AT4g18710/F28A21_120 [Arabidopsis thaliana]
  misc_feature (72)..(438): NCBI GI NO: 15224593 NR Description: putative shaggy-like protein kinase dzeta
  misc_feature (72)..(438): NCBI GI NO: 21593135 NR Description: putative shaggy-like protein kinase dzeta
  misc_feature (72)..(438): NCBI GI NO: 12643750 NR Description: Shaggy-related protein kinase delta
  misc_feature (72)..(443): NCBI GI NO: 22326813 NR Description: protein kinase MSK-3 - like; protein id:At5g14640
  misc_feature (78)..(435): NCBI GI NO: 15236918 NR Description: Shaggy related protein kinase tetha
RGERDRYRERDQEDTGERTFISASSPPAAGSPTTHHMAAMPGGAHGAGAADPMQVDQPLPPAAAGTAHAPADAKHAGSMIEGSDPVTGHIISTTIGGKNGEPKRTISYMAERVVGTGSFGIVFQAKCLETGETVAIKKVLQDKRYKNRELQIMRSMDHCNVVSLKHCFFSTTSRDELFLNLVMEFVPESLYRVLKHYSNMNQRMPLIYVKLYTYQIFRGLAYIHTVPGVCHRDVKPQNLLVDPLTHQVKICDFGSAKMLVKGEANISYICSRYYRAPELIFGATEYTTSIDIWSAGCVLAELLLGQPLFPGESAVDQLVEIIKVLGTPTREEIRCMNPNYTEFRFPQIKAHPWHKIFHKRMPPEAIDLASRLLQYSPNLRCTALEACAHPFFDDLREPHARLPNGRPFPPLFNFKQELANASPELINRLIPDHARRHLGLTLLPATGP

SEQ ID NO: 26600 - protein, 412 aa, Zea mays subsp. mays
  peptide (1)..(412): Ceres Seq. ID no. 12406969
  misc_feature (72)..(356): Pfam Name: Pfam Description:  Protein kinase domain
  misc_feature (1)..(403): NCBI GI NO: 7434281 NR Description: probable shaggy-like protein kinase etha (EC2
  misc_feature (36)..(411): NCBI GI NO: 15233984 NR Description: shaggy-like protein kinase etha (EC 2
  misc_feature (1)..(406): NCBI GI NO: 15221476 NR Description: shaggy-like kinase, putative; protein id:At1g06390
  misc_feature (36)..(411): NCBI GI NO: 12643751 NR Description: Shaggy-related protein kinase eta (ASK-eta)
  misc_feature (36)..(411): NCBI GI NO: 18700188 NR Description: AT4g18710/F28A21_120 [Arabidopsis thaliana]
  misc_feature (36)..(402): NCBI GI NO: 15224593 NR Description: putative shaggy-like protein kinase dzeta
  misc_feature (36)..(402): NCBI GI NO: 21593135 NR Description: putative shaggy-like protein kinase dzeta
  misc_feature (36)..(402): NCBI GI NO: 12643750 NR Description: Shaggy-related protein kinase delta
  misc_feature (36)..(407): NCBI GI NO: 22326813 NR Description: protein kinase MSK-3 - like; protein id:At5g14640
  misc_feature (42)..(399): NCBI GI NO: 15236918 NR Description: Shaggy related protein kinase tetha
MAAMPGGAHGAGAADPMQVDQPLPPAAAGTAHAPADAKHAGSMIEGSDPVTGHIISTTIGGKNGEPKRTISYMAERVVGTGSFGIVFQAKCLETGETVAIKKVLQDKRYKNRELQIMRSMDHCNVVSLKHCFFSTTSRDELFLNLVMEFVPESLYRVLKHYSNMNQRMPLIYVKLYTYQIFRGLAYIHTVPGVCHRDVKPQNLLVDPLTHQVKICDFGSAKMLVKGEANISYICSRYYRAPELIFGATEYTTSIDIWSAGCVLAELLLGQPLFPGESAVDQLVEIIKVLGTPTREEIRCMNPNYTEFRFPQIKAHPWHKIFHKRMPPEAIDLASRLLQYSPNLRCTALEACAHPFFDDLREPHARLPNGRPFPPLFNFKQELANASPELINRLIPDHARRHLGLTLLPATGP

SEQ ID NO: 26601 - protein, 409 aa, Zea mays subsp. mays
  peptide (1)..(409): Ceres Seq. ID no. 12406970
  misc_feature (69)..(353): Pfam Name: Pfam Description:  Protein kinase domain
  misc_feature (1)..(400): NCBI GI NO: 7434281 NR Description: probable shaggy-like protein kinase etha (EC2
  misc_feature (33)..(408): NCBI GI NO: 15233984 NR Description: shaggy-like protein kinase etha (EC 2
  misc_feature (1)..(403): NCBI GI NO: 15221476 NR Description: shaggy-like kinase, putative; protein id:At1g06390
  misc_feature (33)..(408): NCBI GI NO: 12643751 NR Description: Shaggy-related protein kinase eta (ASK-eta)
  misc_feature (33)..(408): NCBI GI NO: 18700188 NR Description: AT4g18710/F28A21_120 [Arabidopsis thaliana]
  misc_feature (33)..(399): NCBI GI NO: 15224593 NR Description: putative shaggy-like protein kinase dzeta
  misc_feature (33)..(399): NCBI GI NO: 21593135 NR Description: putative shaggy-like protein kinase dzeta
  misc_feature (33)..(399): NCBI GI NO: 12643750 NR Description: Shaggy-related protein kinase delta
  misc_feature (33)..(404): NCBI GI NO: 22326813 NR Description: protein kinase MSK-3 - like; protein id:At5g14640
  misc_feature (39)..(396): NCBI GI NO: 15236918 NR Description: Shaggy related protein kinase tetha
MPGGAHGAGAADPMQVDQPLPPAAAGTAHAPADAKHAGSMIEGSDPVTGHIISTTIGGKNGEPKRTISYMAERVVGTGSFGIVFQAKCLETGETVAIKKVLQDKRYKNRELQIMRSMDHCNVVSLKHCFFSTTSRDELFLNLVMEFVPESLYRVLKHYSNMNQRMPLIYVKLYTYQIFRGLAYIHTVPGVCHRDVKPQNLLVDPLTHQVKICDFGSAKMLVKGEANISYICSRYYRAPELIFGATEYTTSIDIWSAGCVLAELLLGQPLFPGESAVDQLVEIIKVLGTPTREEIRCMNPNYTEFRFPQIKAHPWHKIFHKRMPPEAIDLASRLLQYSPNLRCTALEACAHPFFDDLREPHARLPNGRPFPPLFNFKQELANASPELINRLIPDHARRHLGLTLLPATGP

SEQ ID NO: 26602 - DNA, 1672 bp, Zea mays subsp. mays
  misc_feature (1)..(1672): Ceres Seq. ID no. 12349023
ccgtccactcctttggtctcaaatcctcaatcatgcccggaattttgtaccagctcgtcgtcgccgccgccatctgcgccctctccagcggcagcatcgcggtcgcctcaggtttgaatgcgaccgactcgttcctcgtctgcctcatcggcgccggcgtcccgccgcgcctccttcagaccccggcgtccccgtcgtactccgcgacgctgctctcatccttacgcaacctccgctacgtcacgtcggacattcagcggccggtcgccatcgtggccgccaccgagccagcccacgcgcaggcggccgtacgctgcggccgccgccacggcgtccgcgtccgcgcccgaagcggcgggcacgactacgagggcctatcctacgcctccctcgacccccgcgagcgcttcgccgtgctcgacctcgccgctttccgtgacgtccgcgtcgactccgcgcgcgccgaggcgtgggctggatcgggggccacgctcggcgaggtctactatgccgtcgccgccgccagccgcgtgctcgcgttccccgcggggatctgccccactgtcggcgtaggaggacacctcagcggcggcggcttcggcacgctgatgcgcaggtacggcctcgccgcggacaacgtcattgacgccgtcctcgttgacgccgacgggaggctgctgaaccggaccaccatgggggaggatctgttctgggccatccgcggtggcggcggggagagcttcggtgtcatactgtcttggaagctccgcctcgtgcgcgtgccggagacagtcaccgtgttcaccgtgcgccggtcaataaaccagtccgcctcccaactcatcaccaaatggcaggcaatcgcgccggcgctgcccagtgacctcatcctccgagtcgccgtccggagccagcccgcgcggtttgaggcactgttcctcggccgctgcagccgcctccttgagcacatgagagctcacttcccggaccttggcgtcacccaatcggactgcgaggagataagctggatccagtccaccgtgtacttcgccttctactcgagctccaagccactggagctgctcctggacaggagcggcgagacgcccagatacgtcaaggccaagtccgactacgtgcaagaacccatcccacggcacgtgtgggagagaacatggtcatggctggagaagcccgaggccgggctgctcatcctggacccctacggcggccggatgggcagcatctctccgtcagcgacgccgttcccgcaccggaaggggaacctgtacaacctccagtactactcgtattggttcgagaatggcactgcggcattggagaagcggatgagctgggtcagggggctgtacgaggagatggagccgtatgtgtccaagaacccaagaactggatatgtcaactacagggacctggatcttgggacgaacgagttggaggacaatgtgactagctacgccagggcgaggatctggggggagaagtatttcaaaggcaattttgagaggctggcagctgtgaaggccatggcggatcctgatgacttcttcaggaatgagcagagcatccctcctcttcccgctgcaaaaggatggggcttcatttgagtggtcgtttgtttcgtagctttgtggtggtggatttcttggct

SEQ ID NO: 26603 - protein, 541 aa, Zea mays subsp. mays
  peptide (1)..(541): Ceres Seq. ID no. 12349024
  misc_feature (87)..(244): Pfam Name: Pfam Description:  FAD binding domain
  misc_feature (34)..(531): NCBI GI NO: 15233411 NR Description: FAD-linked oxidoreductase family
  misc_feature (36)..(532): NCBI GI NO: 13161397 NR Description: CPRD2 [Vigna unguiculata]
  misc_feature (65)..(532): NCBI GI NO: 15233424 NR Description: FAD-linked oxidoreductase family
  misc_feature (26)..(530): NCBI GI NO: 15241498 NR Description: FAD-linked oxidoreductase family
  misc_feature (35)..(533): NCBI GI NO: 15221473 NR Description: FAD-linked oxidoreductase family
  misc_feature (65)..(532): NCBI GI NO: 14194127 NR Description: AT4g20860/T13K14_20 [Arabidopsis thaliana]
  misc_feature (53)..(530): NCBI GI NO: 28058799 NR Description: berberine bridge enzyme-like protein
  misc_feature (31)..(530): NCBI GI NO: 15226830 NR Description: FAD-linked oxidoreductase family
  misc_feature (42)..(530): NCBI GI NO: 15241495 NR Description: FAD-linked oxidoreductase family
  misc_feature (35)..(532): NCBI GI NO: 15241474 NR Description: FAD-linked oxidoreductase family
VHSFGLKSSIMPGILYQLVVAAAICALSSGSIAVASGLNATDSFLVCLIGAGVPPRLLQTPASPSYSATLLSSLRNLRYVTSDIQRPVAIVAATEPAHAQAAVRCGRRHGVRVRARSGGHDYEGLSYASLDPRERFAVLDLAAFRDVRVDSARAEAWAGSGATLGEVYYAVAAASRVLAFPAGICPTVGVGGHLSGGGFGTLMRRYGLAADNVIDAVLVDADGRLLNRTTMGEDLFWAIRGGGGESFGVILSWKLRLVRVPETVTVFTVRRSINQSASQLITKWQAIAPALPSDLILRVAVRSQPARFEALFLGRCSRLLEHMRAHFPDLGVTQSDCEEISWIQSTVYFAFYSSSKPLELLLDRSGETPRYVKAKSDYVQEPIPRHVWERTWSWLEKPEAGLLILDPYGGRMGSISPSATPFPHRKGNLYNLQYYSYWFENGTAALEKRMSWVRGLYEEMEPYVSKNPRTGYVNYRDLDLGTNELEDNVTSYARARIWGEKYFKGNFERLAAVKAMADPDDFFRNEQSIPPLPAAKGWGFI

SEQ ID NO: 26604 - protein, 531 aa, Zea mays subsp. mays
  peptide (1)..(531): Ceres Seq. ID no. 12349025
  misc_feature (77)..(234): Pfam Name: Pfam Description:  FAD binding domain
  misc_feature (24)..(521): NCBI GI NO: 15233411 NR Description: FAD-linked oxidoreductase family
  misc_feature (26)..(522): NCBI GI NO: 13161397 NR Description: CPRD2 [Vigna unguiculata]
  misc_feature (55)..(522): NCBI GI NO: 15233424 NR Description: FAD-linked oxidoreductase family
  misc_feature (16)..(520): NCBI GI NO: 15241498 NR Description: FAD-linked oxidoreductase family
  misc_feature (25)..(523): NCBI GI NO: 15221473 NR Description: FAD-linked oxidoreductase family
  misc_feature (55)..(522): NCBI GI NO: 14194127 NR Description: AT4g20860/T13K14_20 [Arabidopsis thaliana]
  misc_feature (43)..(520): NCBI GI NO: 28058799 NR Description: berberine bridge enzyme-like protein
  misc_feature (21)..(520): NCBI GI NO: 15226830 NR Description: FAD-linked oxidoreductase family
  misc_feature (32)..(520): NCBI GI NO: 15241495 NR Description: FAD-linked oxidoreductase family
  misc_feature (25)..(522): NCBI GI NO: 15241474 NR Description: FAD-linked oxidoreductase family
MPGILYQLVVAAAICALSSGSIAVASGLNATDSFLVCLIGAGVPPRLLQTPASPSYSATLLSSLRNLRYVTSDIQRPVAIVAATEPAHAQAAVRCGRRHGVRVRARSGGHDYEGLSYASLDPRERFAVLDLAAFRDVRVDSARAEAWAGSGATLGEVYYAVAAASRVLAFPAGICPTVGVGGHLSGGGFGTLMRRYGLAADNVIDAVLVDADGRLLNRTTMGEDLFWAIRGGGGESFGVILSWKLRLVRVPETVTVFTVRRSINQSASQLITKWQAIAPALPSDLILRVAVRSQPARFEALFLGRCSRLLEHMRAHFPDLGVTQSDCEEISWIQSTVYFAFYSSSKPLELLLDRSGETPRYVKAKSDYVQEPIPRHVWERTWSWLEKPEAGLLILDPYGGRMGSISPSATPFPHRKGNLYNLQYYSYWFENGTAALEKRMSWVRGLYEEMEPYVSKNPRTGYVNYRDLDLGTNELEDNVTSYARARIWGEKYFKGNFERLAAVKAMADPDDFFRNEQSIPPLPAAKGWGFI

SEQ ID NO: 26605 - protein, 339 aa, Zea mays subsp. mays
  peptide (1)..(339): Ceres Seq. ID no. 12349026
  misc_feature (1)..(329): NCBI GI NO: 15233411 NR Description: FAD-linked oxidoreductase family
  misc_feature (1)..(330): NCBI GI NO: 13161397 NR Description: CPRD2 [Vigna unguiculata]
  misc_feature (1)..(330): NCBI GI NO: 15233424 NR Description: FAD-linked oxidoreductase family
  misc_feature (1)..(328): NCBI GI NO: 15241498 NR Description: FAD-linked oxidoreductase family
  misc_feature (1)..(331): NCBI GI NO: 15221473 NR Description: FAD-linked oxidoreductase family
  misc_feature (1)..(330): NCBI GI NO: 14194127 NR Description: AT4g20860/T13K14_20 [Arabidopsis thaliana]
  misc_feature (1)..(328): NCBI GI NO: 28058799 NR Description: berberine bridge enzyme-like protein
  misc_feature (1)..(328): NCBI GI NO: 15226830 NR Description: FAD-linked oxidoreductase family
  misc_feature (1)..(328): NCBI GI NO: 15241495 NR Description: FAD-linked oxidoreductase family
  misc_feature (1)..(330): NCBI GI NO: 15241474 NR Description: FAD-linked oxidoreductase family
MRRYGLAADNVIDAVLVDADGRLLNRTTMGEDLFWAIRGGGGESFGVILSWKLRLVRVPETVTVFTVRRSINQSASQLITKWQAIAPALPSDLILRVAVRSQPARFEALFLGRCSRLLEHMRAHFPDLGVTQSDCEEISWIQSTVYFAFYSSSKPLELLLDRSGETPRYVKAKSDYVQEPIPRHVWERTWSWLEKPEAGLLILDPYGGRMGSISPSATPFPHRKGNLYNLQYYSYWFENGTAALEKRMSWVRGLYEEMEPYVSKNPRTGYVNYRDLDLGTNELEDNVTSYARARIWGEKYFKGNFERLAAVKAMADPDDFFRNEQSIPPLPAAKGWGFI

SEQ ID NO: 26606 - DNA, 1599 bp, Zea mays subsp. mays
  misc_feature (1)..(1599): Ceres Seq. ID no. 13498780
ttgctgtcgcacggagaagaaaaaaaaaacaggcactgagctgagatggcgaagcacttggctgccatgtgcaggtgcagcctcctagtgcttgtactgctctgcttgggctcccagctggcccaatcccaggtcctcttccagggtttcaactgggagtcgtggaagaagcaaggtgggtggtacaactacctcctggggcgggtggacgacatcgccgcgacgggggccacgcacgtctggctcccgccgccgtcgcactcggtggcgccgcaggggtacatgcccggccggctctacgacctggacgcgtccaagtacggcacccacgcggagctcaagtcgctcaccgcggcgttccacgccaagggcgtcaagtgcgtcgccgacgtcgtgatcaaccaccgctgcgccgactacaaggacggccgcggcatctactgcgtcttcgagggcggcacgcccgacagccgcctcgactggggccccgacatgatctgcagcgacgacacgcagtactccaacgggcgcgggcaccgcgacacgggggccgacttcgccgccgcgcccgacatcgaccacctcaacccgcgcgtgcagcaggagctctcggactggctcaactggctcaagtccgacctcggcttcgacggctggcgcctcgacttcgccaagggctactccgccgccgtcgccaaggtgtacgtcgacagcaccgcccccaccttcgtcgtcgccgagatatggagctccctccactacgacggcaacggcgagccgtccagcaaccaggacgccgacaggcaggagctggtcaactgggcgcaggcggtgggcggccccgccgcggcgttcgacttcaccaccaagggcgtgctgcaggcggccgtccagggcgagctgtggcgcatgaaggacggcaacggcaaggcgcccgggatgatcggctggctgccggagaaggccgtcacgttcgtcgacaaccacgacaccggctccacgcagaactcgtggccattcccctccgacaaggtcatgcagggctacgcctatatcctcacgcacccaggaactccatgcatcttctacgaccacgttttcgactggaacctgaagcaggagatcagcgcgctgtctgcggtgaggtcaagaaacgggatccacccggggagcgagctgaacatcctcgccgccgacggggatctctacgtcgccaagattgacgacaaggtcatcgtgaagatcgggtcacggtacgacgtcgggaacctgatcccctcagacttccacgccgttgcccatggcaacaactactgcgtttgggagaagcacggtctgagagttccagcggggcggcaccactagactagacccattccgcccagcaacccctacagataattctcttttcaggtccattttgaacctggaaaagaaatttaagagaggctaaataaccggaatacgattgtgtactgagcttctttcacgtaattattgaaagaagattataatgtttggatgcactattaattatgttggcatggggatttttgtaacctcttaaaacgaggaaataaagactgttcttattaagcc

SEQ ID NO: 26607 - protein, 439 aa, Zea mays subsp. mays
  peptide (1)..(439): Ceres Seq. ID no. 13498781
  misc_feature (1)..(439): NCBI GI NO: 7435329 NR Description: alpha-amylase (EC 3.2.1.1) - maize
  misc_feature (1)..(439): NCBI GI NO: 113680 NR Description: ALPHA-AMYLASE ISOZYME 3B PRECURSOR
  misc_feature (1)..(439): NCBI GI NO: 113681 NR Description: ALPHA-AMYLASE ISOZYME 3C PRECURSOR
  misc_feature (1)..(439): NCBI GI NO: 113683 NR Description: ALPHA-AMYLASE ISOZYME 3E PRECURSOR
  misc_feature (1)..(439): NCBI GI NO: 11263719 NR Description: alpha-amylase (EC 3.2.1.1) isozyme III - rice
  misc_feature (3)..(438): NCBI GI NO: 113682 NR Description: ALPHA-AMYLASE ISOZYME 3D PRECURSOR
  misc_feature (3)..(438): NCBI GI NO: 11263717 NR Description: alpha-amylase (EC 3.2.1.1) isozyme I - rice
  misc_feature (3)..(438): NCBI GI NO: 169755 NR Description: alpha-amylase (EC 3.2.1.1)
  misc_feature (1)..(434): NCBI GI NO: 113679 NR Description: ALPHA-AMYLASE ISOZYME 3A PRECURSOR
  misc_feature (13)..(428): NCBI GI NO: 22536012 NR Description: alpha-amylase precursor
MAKHLAAMCRCSLLVLVLLCLGSQLAQSQVLFQGFNWESWKKQGGWYNYLLGRVDDIAATGATHVWLPPPSHSVAPQGYMPGRLYDLDASKYGTHAELKSLTAAFHAKGVKCVADVVINHRCADYKDGRGIYCVFEGGTPDSRLDWGPDMICSDDTQYSNGRGHRDTGADFAAAPDIDHLNPRVQQELSDWLNWLKSDLGFDGWRLDFAKGYSAAVAKVYVDSTAPTFVVAEIWSSLHYDGNGEPSSNQDADRQELVNWAQAVGGPAAAFDFTTKGVLQAAVQGELWRMKDGNGKAPGMIGWLPEKAVTFVDNHDTGSTQNSWPFPSDKVMQGYAYILTHPGTPCIFYDHVFDWNLKQEISALSAVRSRNGIHPGSELNILAADGDLYVAKIDDKVIVKIGSRYDVGNLIPSDFHAVAHGNNYCVWEKHGLRVPAGRHH

SEQ ID NO: 26608 - protein, 432 aa, Zea mays subsp. mays
  peptide (1)..(432): Ceres Seq. ID no. 13498782
  misc_feature (1)..(432): NCBI GI NO: 7435329 NR Description: alpha-amylase (EC 3.2.1.1) - maize
  misc_feature (1)..(432): NCBI GI NO: 113680 NR Description: ALPHA-AMYLASE ISOZYME 3B PRECURSOR
  misc_feature (1)..(432): NCBI GI NO: 113681 NR Description: ALPHA-AMYLASE ISOZYME 3C PRECURSOR
  misc_feature (1)..(432): NCBI GI NO: 113683 NR Description: ALPHA-AMYLASE ISOZYME 3E PRECURSOR
  misc_feature (1)..(432): NCBI GI NO: 11263719 NR Description: alpha-amylase (EC 3.2.1.1) isozyme III - rice
  misc_feature (1)..(431): NCBI GI NO: 113682 NR Description: ALPHA-AMYLASE ISOZYME 3D PRECURSOR
  misc_feature (1)..(431): NCBI GI NO: 11263717 NR Description: alpha-amylase (EC 3.2.1.1) isozyme I - rice
  misc_feature (1)..(431): NCBI GI NO: 169755 NR Description: alpha-amylase (EC 3.2.1.1)
  misc_feature (1)..(427): NCBI GI NO: 113679 NR Description: ALPHA-AMYLASE ISOZYME 3A PRECURSOR
  misc_feature (6)..(421): NCBI GI NO: 22536012 NR Description: alpha-amylase precursor
MCRCSLLVLVLLCLGSQLAQSQVLFQGFNWESWKKQGGWYNYLLGRVDDIAATGATHVWLPPPSHSVAPQGYMPGRLYDLDASKYGTHAELKSLTAAFHAKGVKCVADVVINHRCADYKDGRGIYCVFEGGTPDSRLDWGPDMICSDDTQYSNGRGHRDTGADFAAAPDIDHLNPRVQQELSDWLNWLKSDLGFDGWRLDFAKGYSAAVAKVYVDSTAPTFVVAEIWSSLHYDGNGEPSSNQDADRQELVNWAQAVGGPAAAFDFTTKGVLQAAVQGELWRMKDGNGKAPGMIGWLPEKAVTFVDNHDTGSTQNSWPFPSDKVMQGYAYILTHPGTPCIFYDHVFDWNLKQEISALSAVRSRNGIHPGSELNILAADGDLYVAKIDDKVIVKIGSRYDVGNLIPSDFHAVAHGNNYCVWEKHGLRVPAGRHH

SEQ ID NO: 26609 - protein, 360 aa, Zea mays subsp. mays
  peptide (1)..(360): Ceres Seq. ID no. 13498783
  misc_feature (1)..(360): NCBI GI NO: 7435329 NR Description: alpha-amylase (EC 3.2.1.1) - maize
  misc_feature (1)..(360): NCBI GI NO: 113680 NR Description: ALPHA-AMYLASE ISOZYME 3B PRECURSOR
  misc_feature (1)..(360): NCBI GI NO: 113681 NR Description: ALPHA-AMYLASE ISOZYME 3C PRECURSOR
  misc_feature (1)..(360): NCBI GI NO: 113683 NR Description: ALPHA-AMYLASE ISOZYME 3E PRECURSOR
  misc_feature (1)..(360): NCBI GI NO: 11263719 NR Description: alpha-amylase (EC 3.2.1.1) isozyme III - rice
  misc_feature (1)..(359): NCBI GI NO: 113682 NR Description: ALPHA-AMYLASE ISOZYME 3D PRECURSOR
  misc_feature (1)..(359): NCBI GI NO: 11263717 NR Description: alpha-amylase (EC 3.2.1.1) isozyme I - rice
  misc_feature (1)..(359): NCBI GI NO: 169755 NR Description: alpha-amylase (EC 3.2.1.1)
  misc_feature (1)..(355): NCBI GI NO: 113679 NR Description: ALPHA-AMYLASE ISOZYME 3A PRECURSOR
  misc_feature (1)..(349): NCBI GI NO: 22536012 NR Description: alpha-amylase precursor
MPGRLYDLDASKYGTHAELKSLTAAFHAKGVKCVADVVINHRCADYKDGRGIYCVFEGGTPDSRLDWGPDMICSDDTQYSNGRGHRDTGADFAAAPDIDHLNPRVQQELSDWLNWLKSDLGFDGWRLDFAKGYSAAVAKVYVDSTAPTFVVAEIWSSLHYDGNGEPSSNQDADRQELVNWAQAVGGPAAAFDFTTKGVLQAAVQGELWRMKDGNGKAPGMIGWLPEKAVTFVDNHDTGSTQNSWPFPSDKVMQGYAYILTHPGTPCIFYDHVFDWNLKQEISALSAVRSRNGIHPGSELNILAADGDLYVAKIDDKVIVKIGSRYDVGNLIPSDFHAVAHGNNYCVWEKHGLRVPAGRHH

SEQ ID NO: 26610 - DNA, 1212 bp, Zea mays subsp. mays
  misc_feature (1)..(1212): Ceres Seq. ID no. 12353792
  misc_feature (920)..(920): n is a, c, t, g, unknown, or other
attacgcaccttcacataacactgcaaaagcactcctctcttcgtcctccccctcccacctccatcccatcacataccataccattccataccaccagagaagaaccagtctcgctcgctcccaactcccaagccaagccggatcccaaatcggcacagcgcacccactccgctcggtcccttcgttcacccccatcatccatccatccatccagccatgggcggcaaggactgcggcaaccacggcgaggacgacctgcggcggtcgtgccggcgcctgctagcgatcctcctagtcctggccctgatcgtgggcgtgatcgcgctgatcatctacctggtggtccggcccacgcacccgcgcttctacctacaggacgcgtcgctccagcagctagacctgtccaactccaccaccgcctcctccccctccgcgtcctcgtccctcctctccacgacgctgcaggtgacgctggcctcgcgcaacccgaacgagcgcgtgggggtgtactacgaccggctggacgtgtacgcgtcgtacaagtaccagcaggtgacggtggccgcggcgctgccggccgtgtaccagggccacggcgacgtggacgtgtggtcgcccgtgctgtcgggcgggcccggcgtccccttcgcgccctacctcgccgacgcgctccgccaggactgccaggcgggctacctcgtcctccaggtcaaggtcgacggccgcgtgcggtggaaggtcggcagctggatctccggccactaccacctcttcgtcacctgccccgcgttcctcgtcaccgccggcggcaacggcgcccccggcgcttccgggttcaggttccagaccaccacctactgccacgtcgaagtttaatagattaggagcgagaggaggaggagggaggggaaggaagcanagagaccatggtccatggctctgctgctcctcctgctgccgttgcctggtgtggtaataactctctctatctctctctctgtccgctgctggcgttactgctgcagtgatgcgggatgtaaaggaggggtaaaaaagttcctttcgttttcgcctccctcttttttttttgttttttttttttttgcatcttctccttcacctttccatatactactagtatgctctgtcgactgttgttcaaaggaagcttccaattgtcaataaacattttggatcggaggatcaattgc

SEQ ID NO: 26611 - protein, 294 aa, Zea mays subsp. mays
  peptide (1)..(294): Ceres Seq. ID no. 12353793
ITHLHITLQKHSSLRPPPPTSIPSHTIPFHTTREEPVSLAPNSQAKPDPKSAQRTHSARSLRSPPSSIHPSSHGRQGLRQPRRGRPAAVVPAPASDPPSPGPDRGRDRADHLPGGPAHAPALLPTGRVAPAARPVQLHHRLLPLRVLVPPLHDAAGDAGLAQPERARGGVLRPAGRVRVVQVPAGDGGRGAAGRVPGPRRRGRVVARAVGRARRPLRALPRRRAPPGLPGGLPRPPGQGRRPRAVEGRQLDLRPLPPLRHLPRVPRHRRRQRRPRRFRVQVPDHHLLPRRSLID

SEQ ID NO: 26612 - protein, 219 aa, Zea mays subsp. mays
  peptide (1)..(219): Ceres Seq. ID no. 12353794
  misc_feature (3)..(199): NCBI GI NO: 38344036 NR Description: OJ991214_12.17
  misc_feature (1)..(219): NCBI GI NO: 38637038 NR Description: harpin-induced protein 1 family (HIN1)-like
  misc_feature (1)..(219): NCBI GI NO: 15229906 NR Description: hairpin-induced protein, putative
  misc_feature (1)..(219): NCBI GI NO: 22326984 NR Description: similar to hairpin-induced protein, putative
  misc_feature (1)..(219): NCBI GI NO: 15240001 NR Description: hairpin-induced protein, putative
  misc_feature (4)..(219): NCBI GI NO: 18399308 NR Description: VAMP protein SEC22; protein id: At3g11660
  misc_feature (4)..(219): NCBI GI NO: 28392929 NR Description: putative VAMP protein SEC22 [Arabidopsis thaliana]
  misc_feature (1)..(219): NCBI GI NO: 15227538 NR Description: hairpin-induced protein, putative
  misc_feature (4)..(219): NCBI GI NO: 15231227 NR Description: hairpin-induced protein, putative
  misc_feature (1)..(193): NCBI GI NO: 15233951 NR Description: hairpin-induced protein, putative
MGGKDCGNHGEDDLRRSCRRLLAILLVLALIVGVIALIIYLVVRPTHPRFYLQDASLQQLDLSNSTTASSPSASSSLLSTTLQVTLASRNPNERVGVYYDRLDVYASYKYQQVTVAAALPAVYQGHGDVDVWSPVLSGGPGVPFAPYLADALRQDCQAGYLVLQVKVDGRVRWKVGSWISGHYHLFVTCPAFLVTAGGNGAPGASGFRFQTTTYCHVEV

SEQ ID NO: 26613 - DNA, 1301 bp, Zea mays subsp. mays
  misc_feature (1)..(1301): Ceres Seq. ID no. 12372750
gcacgagaccattacctagaacatcctaatcgaaaaatctttgcgcttggggcaatgacgcagcttatgaggtcataccgaggcgcgtcaattgctggttgaaaactatttccaaaccccctctttggcccactgggccactgagaatttctggaagggctccttttcctcggataagttcctattgagatcatcgcatcatttaggagaatgaagaaactcgttcaagacctctcagtaattgaagctgcactcaggacatcatcaaagctggttgtaagttcaaatgggaaacgggtcaggaggttacatccattgccacacaaagaattgaaagattcaaagaaaagcactgttttggtcgaaaatctacctccagatttctcaatggagagtattcaggaaaaattcgcaacagtgggcaaagttgtgaacataacaattaatgatccagaatcagtgaaagaattttcaactgctaagaagcctgacttcaatttaagttttaaggctcatgtacttgttgaatatgaagcagtggaggctgctgagaaggctgttactgccctaagtgatgagagcaactggagaactgggatgaaagtcaggcttctgtctaaacaaagtgtaatgggaccaggaaagtataaaaaaccttctaaagaaaatcaagatgcagtttccaaaatgattgatcagaatcaacattcaaaagaagaccagcttaaaaccttggaaaagatctccggtgctgatgcagtggggattaccaaggacagagataatttgaaacctgtttttatcactgagactgagcaccaagatcagaagccaaatgctagaggacgaaaaggatggtacaaaggtcaaggtcagatgcagcaaaatgcaaacaaacaaggcagttgtggttccgagtcattaaacaagcctatttctggaccgaggatgccagatggaacaaggggcttcacactgggacgtggtagatctcttccactacagaagtctgagaaggctgaagagtagagctaccaaaaaaggcctgttaagaaccttatccaaagaagctgggtaaaatctaacagaaaacctttgcttttttttttttgaaacttaagatcatcgaagccgttctttgcatggaatgggacacagaagaaagggaatcttggaatggctttctctctgcaagaaatggaacacaaaagggaatctgggaatgacttgtacagaaacacaattgtctgggggtagttccgagttcactcgtatggaacacagtagaacctttgcatgtc

SEQ ID NO: 26614 - protein, 272 aa, Zea mays subsp. mays
  peptide (1)..(272): Ceres Seq. ID no. 12372751
  misc_feature (49)..(134): Pfam Name: a.k.a. RRM, RBD, or RNP domain Pfam Description: RNA recognition motif.
  misc_feature (1)..(272): NCBI GI NO: 34909652 NR Description: RNA-binding protein-like
  misc_feature (1)..(263): NCBI GI NO: 30694926 NR Description: RNA recognition motif (RRM)-containing protein
  misc_feature (1)..(263): NCBI GI NO: 10177706 NR Description: contains similarity to RNA-bindingprotein~gene_id:MPL12
  misc_feature (1)..(263): NCBI GI NO: 30694922 NR Description: RNA recognition motif (RRM)-containing protein
  misc_feature (1)..(262): NCBI GI NO: 34394175 NR Description: putative RNA-binding protein homolog
  misc_feature (1)..(260): NCBI GI NO: 15230287 NR Description: RNA-binding protein, putative
  misc_feature (1)..(232): NCBI GI NO: 15724224 NR Description: At2g43970/F6E13.10 [Arabidopsis thaliana]
  misc_feature (1)..(232): NCBI GI NO: 18406414 NR Description: VirF-interacting protein FIP1
  misc_feature (1)..(171): NCBI GI NO: 34896588 NR Description: putative RNA-binding protein [Oryza sativa]
  misc_feature (1)..(148): NCBI GI NO: 6449448 NR Description: RNA-binding protein homolog [Brassica napus]
MKKLVQDLSVIEAALRTSSKLVVSSNGKRVRRLHPLPHKELKDSKKSTVLVENLPPDFSMESIQEKFATVGKVVNITINDPESVKEFSTAKKPDFNLSFKAHVLVEYEAVEAAEKAVTALSDESNWRTGMKVRLLSKQSVMGPGKYKKPSKENQDAVSKMIDQNQHSKEDQLKTLEKISGADAVGITKDRDNLKPVFITETEHQDQKPNARGRKGWYKGQGQMQQNANKQGSCGSESLNKPISGPRMPDGTRGFTLGRGRSLPLQKSEKAEE

SEQ ID NO: 26615 - protein, 213 aa, Zea mays subsp. mays
  peptide (1)..(213): Ceres Seq. ID no. 12372752
  misc_feature (1)..(75): Pfam Name: a.k.a. RRM, RBD, or RNP domain Pfam Description: RNA recognition motif.
  misc_feature (1)..(213): NCBI GI NO: 34909652 NR Description: RNA-binding protein-like
  misc_feature (1)..(204): NCBI GI NO: 30694926 NR Description: RNA recognition motif (RRM)-containing protein
  misc_feature (1)..(204): NCBI GI NO: 10177706 NR Description: contains similarity to RNA-bindingprotein~gene_id:MPL12
  misc_feature (1)..(204): NCBI GI NO: 30694922 NR Description: RNA recognition motif (RRM)-containing protein
  misc_feature (1)..(203): NCBI GI NO: 34394175 NR Description: putative RNA-binding protein homolog
  misc_feature (1)..(201): NCBI GI NO: 15230287 NR Description: RNA-binding protein, putative
  misc_feature (1)..(173): NCBI GI NO: 15724224 NR Description: At2g43970/F6E13.10 [Arabidopsis thaliana]
  misc_feature (1)..(173): NCBI GI NO: 18406414 NR Description: VirF-interacting protein FIP1
  misc_feature (1)..(112): NCBI GI NO: 34896588 NR Description: putative RNA-binding protein [Oryza sativa]
  misc_feature (1)..(89): NCBI GI NO: 6449448 NR Description: RNA-binding protein homolog [Brassica napus]
MESIQEKFATVGKVVNITINDPESVKEFSTAKKPDFNLSFKAHVLVEYEAVEAAEKAVTALSDESNWRTGMKVRLLSKQSVMGPGKYKKPSKENQDAVSKMIDQNQHSKEDQLKTLEKISGADAVGITKDRDNLKPVFITETEHQDQKPNARGRKGWYKGQGQMQQNANKQGSCGSESLNKPISGPRMPDGTRGFTLGRGRSLPLQKSEKAEE

SEQ ID NO: 26616 - protein, 143 aa, Zea mays subsp. mays
  peptide (1)..(143): Ceres Seq. ID no. 12372753
  misc_feature (1)..(143): NCBI GI NO: 34909652 NR Description: RNA-binding protein-like
  misc_feature (1)..(134): NCBI GI NO: 30694926 NR Description: RNA recognition motif (RRM)-containing protein
  misc_feature (1)..(134): NCBI GI NO: 10177706 NR Description: contains similarity to RNA-bindingprotein~gene_id:MPL12
  misc_feature (1)..(134): NCBI GI NO: 30694922 NR Description: RNA recognition motif (RRM)-containing protein
  misc_feature (1)..(133): NCBI GI NO: 34394175 NR Description: putative RNA-binding protein homolog
  misc_feature (1)..(131): NCBI GI NO: 15230287 NR Description: RNA-binding protein, putative
  misc_feature (1)..(103): NCBI GI NO: 15724224 NR Description: At2g43970/F6E13.10 [Arabidopsis thaliana]
  misc_feature (1)..(103): NCBI GI NO: 18406414 NR Description: VirF-interacting protein FIP1
  misc_feature (1)..(42): NCBI GI NO: 34896588 NR Description: putative RNA-binding protein [Oryza sativa]
  misc_feature (1)..(19): NCBI GI NO: 6449448 NR Description: RNA-binding protein homolog [Brassica napus]
MKVRLLSKQSVMGPGKYKKPSKENQDAVSKMIDQNQHSKEDQLKTLEKISGADAVGITKDRDNLKPVFITETEHQDQKPNARGRKGWYKGQGQMQQNANKQGSCGSESLNKPISGPRMPDGTRGFTLGRGRSLPLQKSEKAEE

SEQ ID NO: 26617 - DNA, 1315 bp, Zea mays subsp. mays
  misc_feature (1)..(1315): Ceres Seq. ID no. 12434961
aagcaggatcatcatcatcagaagcagcagcaaggcaacatgtctcagcacggcggcctcggcgacacggcccggcggtggcgcgagctccacggcgacggcggctgggcgggaacgctggacccgctggacctcgacctgcggcgcaccgtgctccgctacggcgagatggcgcaggcgacctacgacgccttcaacaacgagcgggcgtcgccgcacgcggggctgtcccgcttcgccagggcgcgcttcttcgaccgggtgcggctgccggcgcacgccgccgcgtaccgggtcaccaggttcctgtacgccacgtcgtcggtggccgtgccggacgccttcatcctcaggtccgtgtccaggtcgcgccggtgcagggagtccaactggatcggctacgtcgcggtggccaccgacgaagggaaggccgcgctcggccgccgcgacgtcgtggtcgcgtggcgcggcaccatgcgggcgctggagtgggccgacgacctcgagttccccatggtgccgacgggaggcctcctcggggacggcgacgccatggtgcaccgcggctggctgtccatgtacacctccagcgacccggcgtccagccacaaccaggacagcgcacggcatcaggcgctgggcgaggtgcggaggctggtggacgcgtacaggggcgaggagctgagcatcaccgtgacgggccacagcctcggcgcggcgctagccacgctcaacgcgttcgacatcgccgccaacggctacaacgtgacggccacgggcgcggccgcctgcccggtgacctcgttcgcgttcgccagcccgcgcgtcggcggcggcggcttcaagaagcggttcgacgccgtcccggggctgcggctcctccgcgtccgcaacgcccgcgacgtggttcccaagtacccggtcgtgttcctaccacgacgtaggcgcggagctcgcgatcgacacgggggagtcgccgtacctgagaagccccgggggcgagcagacctggcacaacctcgaggtgtacctgcacggcgtggcgggcacgcggggcgcgcgcggcgggttcgagctcgccgtggcgcgggacgtggcgctggtgaacaaggcgtacgacgccctgcgggaccaccacggggtgccgccagggtggtgggtgccgctgaacaggggaatggtggagggcgccgacgggcgctggagcttggtggattgcgaggaggacgaggatgatgagtagtagacagcagacggagtaaacacttggcatgctggcggcagacaacatctgtagctgcccttgtgcgtcgcc

SEQ ID NO: 26618 - protein, 411 aa, Zea mays subsp. mays
  peptide (1)..(411): Ceres Seq. ID no. 12434962
  misc_feature (14)..(307): NCBI GI NO: 34911830 NR Description: lipase-like protein
  misc_feature (24)..(309): NCBI GI NO: 34911832 NR Description: lipase-like protein
  misc_feature (24)..(309): NCBI GI NO: 15233922 NR Description: lipase-like protein; protein id: At4g18550.1
  misc_feature (25)..(309): NCBI GI NO: 21537306 NR Description: lipase-like protein [Arabidopsis thaliana]
  misc_feature (25)..(309): NCBI GI NO: 15221426 NR Description: lipase-like protein; protein id: At1g06250
  misc_feature (24)..(277): NCBI GI NO: 34911870 NR Description: lipase-like protein
  misc_feature (8)..(307): NCBI GI NO: 34910484 NR Description: putative lipase
  misc_feature (19)..(168): NCBI GI NO: 4103627 NR Description: lipase [Dianthus caryophyllus]
  misc_feature (181)..(308): NCBI GI NO: 4103627 NR Description: lipase [Dianthus caryophyllus]
  misc_feature (8)..(314): NCBI GI NO: 30679836 NR Description: lipase (class 3) family [Arabidopsis thaliana]
KQDHHHQKQQQGNMSQHGGLGDTARRWRELHGDGGWAGTLDPLDLDLRRTVLRYGEMAQATYDAFNNERASPHAGLSRFARARFFDRVRLPAHAAAYRVTRFLYATSSVAVPDAFILRSVSRSRRCRESNWIGYVAVATDEGKAALGRRDVVVAWRGTMRALEWADDLEFPMVPTGGLLGDGDAMVHRGWLSMYTSSDPASSHNQDSARHQALGEVRRLVDAYRGEELSITVTGHSLGAALATLNAFDIAANGYNVTATGAAACPVTSFAFASPRVGGGGFKKRFDAVPGLRLLRVRNARDVVPKYPVVFLPRRRRGARDRHGGVAVPEKPRGRADLAQPRGVPARRGGHAGRARRVRARRGAGRGAGEQGVRRPAGPPRGAARVVGAAEQGNGGGRRRALELGGLRGGRG

SEQ ID NO: 26619 - protein, 398 aa, Zea mays subsp. mays
  peptide (1)..(398): Ceres Seq. ID no. 12434963
  misc_feature (1)..(294): NCBI GI NO: 34911830 NR Description: lipase-like protein
  misc_feature (11)..(296): NCBI GI NO: 34911832 NR Description: lipase-like protein
  misc_feature (11)..(296): NCBI GI NO: 15233922 NR Description: lipase-like protein; protein id: At4g18550.1
  misc_feature (12)..(296): NCBI GI NO: 21537306 NR Description: lipase-like protein [Arabidopsis thaliana]
  misc_feature (12)..(296): NCBI GI NO: 15221426 NR Description: lipase-like protein; protein id: At1g06250
  misc_feature (11)..(264): NCBI GI NO: 34911870 NR Description: lipase-like protein
  misc_feature (1)..(294): NCBI GI NO: 34910484 NR Description: putative lipase
  misc_feature (6)..(155): NCBI GI NO: 4103627 NR Description: lipase [Dianthus caryophyllus]
  misc_feature (168)..(295): NCBI GI NO: 4103627 NR Description: lipase [Dianthus caryophyllus]
  misc_feature (1)..(301): NCBI GI NO: 30679836 NR Description: lipase (class 3) family [Arabidopsis thaliana]
MSQHGGLGDTARRWRELHGDGGWAGTLDPLDLDLRRTVLRYGEMAQATYDAFNNERASPHAGLSRFARARFFDRVRLPAHAAAYRVTRFLYATSSVAVPDAFILRSVSRSRRCRESNWIGYVAVATDEGKAALGRRDVVVAWRGTMRALEWADDLEFPMVPTGGLLGDGDAMVHRGWLSMYTSSDPASSHNQDSARHQALGEVRRLVDAYRGEELSITVTGHSLGAALATLNAFDIAANGYNVTATGAAACPVTSFAFASPRVGGGGFKKRFDAVPGLRLLRVRNARDVVPKYPVVFLPRRRRGARDRHGGVAVPEKPRGRADLAQPRGVPARRGGHAGRARRVRARRGAGRGAGEQGVRRPAGPPRGAARVVGAAEQGNGGGRRRALELGGLRGGRG

SEQ ID NO: 26620 - protein, 355 aa, Zea mays subsp. mays
  peptide (1)..(355): Ceres Seq. ID no. 12434964
  misc_feature (1)..(251): NCBI GI NO: 34911830 NR Description: lipase-like protein
  misc_feature (1)..(253): NCBI GI NO: 34911832 NR Description: lipase-like protein
  misc_feature (1)..(253): NCBI GI NO: 15233922 NR Description: lipase-like protein; protein id: At4g18550.1
  misc_feature (1)..(253): NCBI GI NO: 21537306 NR Description: lipase-like protein [Arabidopsis thaliana]
  misc_feature (1)..(253): NCBI GI NO: 15221426 NR Description: lipase-like protein; protein id: At1g06250
  misc_feature (1)..(221): NCBI GI NO: 34911870 NR Description: lipase-like protein
  misc_feature (1)..(251): NCBI GI NO: 34910484 NR Description: putative lipase
  misc_feature (1)..(112): NCBI GI NO: 4103627 NR Description: lipase [Dianthus caryophyllus]
  misc_feature (125)..(252): NCBI GI NO: 4103627 NR Description: lipase [Dianthus caryophyllus]
  misc_feature (1)..(258): NCBI GI NO: 30679836 NR Description: lipase (class 3) family [Arabidopsis thaliana]
MAQATYDAFNNERASPHAGLSRFARARFFDRVRLPAHAAAYRVTRFLYATSSVAVPDAFILRSVSRSRRCRESNWIGYVAVATDEGKAALGRRDVVVAWRGTMRALEWADDLEFPMVPTGGLLGDGDAMVHRGWLSMYTSSDPASSHNQDSARHQALGEVRRLVDAYRGEELSITVTGHSLGAALATLNAFDIAANGYNVTATGAAACPVTSFAFASPRVGGGGFKKRFDAVPGLRLLRVRNARDVVPKYPVVFLPRRRRGARDRHGGVAVPEKPRGRADLAQPRGVPARRGGHAGRARRVRARRGAGRGAGEQGVRRPAGPPRGAARVVGAAEQGNGGGRRRALELGGLRGGRG

SEQ ID NO: 26621 - DNA, 1013 bp, Zea mays subsp. mays
  misc_feature (1)..(1013): Ceres Seq. ID no. 13498777
gttcctgttcccctcggcgacgccagtacggcagtacgccacgccagtgcccagttgcattgactcctccccggtccccacatcttgccgccaatggatgtcgacgggcccgcccccgccgacgcctctgccaggcccgccaccaacggcgaggccccctccggcgcccgcgaggtcgacgtcggcgaggaggacacgctcgccggcgtcctccgcagcttcgtcgacggcgtctggtacccggacgagcctctgctccggcggctccgggcggcgtcctgcgacgccgcgccgcgcctgaggggggcgtcccggaactccgcgcgggacctgcttgagtggaccaggcggggcagcggcctccgcgccatcctcgtcatctcggtcgggacaatcacgcttatagcattgactggccttctgaccttcatgttcttcctattggttgccactgctaatgcgatcattgtctcagtcttgatgtcactggccgctgccggaggattcttggccatcttctttgcttgcttggttgcagtgtatattggagcagtatcagttgctatctttgtcatttctgcgactgttatctcagcagttgttggaattttggttgctaccggttgggttgggttcttctggattatctggttcaccgcaaggaagagcatggtcctgacgaagcactccttcggcatgacgagctcggcaatccaatcgtattccgcgtcccggcaagtgaagcagaagcctgtcgactgaggctagttggttgcgtcctgtatgaagcggatatatctatctatgtgaatcacggttttgctgtttgtttgtttgtaagagtgtagaagacagcttgcttgttgcggcagctctgtttctctcggtgactaggtgtataatgctagctctgaactttggcagcatgtacgttcggcatggcggtcaatgctgttatttaaaggatagtgagcagatgttaatgtttatagcaaataaaagcatgttaatgt

SEQ ID NO: 26622 - protein, 222 aa, Zea mays subsp. mays
  peptide (1)..(222): Ceres Seq. ID no. 13498778
  misc_feature (9)..(222): NCBI GI NO: 34905012 NR Description: P0456B03.14
  misc_feature (18)..(218): NCBI GI NO: 14423560 NR Description: Unknown protein [Arabidopsis thaliana]
  misc_feature (18)..(218): NCBI GI NO: 18418008 NR Description: expressed protein [Arabidopsis thaliana]
MDVDGPAPADASARPATNGEAPSGAREVDVGEEDTLAGVLRSFVDGVWYPDEPLLRRLRAASCDAAPRLRGASRNSARDLLEWTRRGSGLRAILVISVGTITLIALTGLLTFMFFLLVATANAIIVSVLMSLAAAGGFLAIFFACLVAVYIGAVSVAIFVISATVISAVVGILVATGWVGFFWIIWFTARKSMVLTKHSFGMTSSAIQSYSASRQVKQKPVD

SEQ ID NO: 26623 - protein, 111 aa, Zea mays subsp. mays
  peptide (1)..(111): Ceres Seq. ID no. 13498779
SCSPRRRQYGSTPRQCPVALTPPRSPHLAANGCRRARPRRRLCQARHQRRGPLRRPRGRRRRGGHARRRPPQLRRRRLVPGRASAPAAPGGVLRRRAAPEGGVPELRAGPA

SEQ ID NO: 26624 - DNA, 1536 bp, Zea mays subsp. mays
  misc_feature (1)..(1536): Ceres Seq. ID no. 12407772
aaacctaacagaagcaaccgaatatcccctcgcctttcaactcgtcttcctcctcatgtcgtcgcctcctatccctctatatcttctattctaagccacctcgatcggaccctagatagatgcaagaaaagaaaagagaagagcctctgtggatagtggtgggtgctggatcactgggcggagcagcttctcatatcggatcgatcgattaattaatatatactataaacatacaatcaattacatacatatacgccaagagaagaggaacgccggcccgtttcacttgtctccttcctccgatccctcccggcggccggccgggctcgggcgtttttccccttttgtttcccatggaggacgccaagatggggaacggcgccaccatccgcgcggtgctcgccatcctccagtggtggggattcaacgtcaccgtcatcatcatcaacaagtggatcttccagaaactggagttcaagttccccctgacggtgtcgtgcgtccacttcatatgttcctccatcggagcctacatcgcgatcaaagtcctgagaacgaagccgctgatcgaggtggcctcggaggaccggtggaggaggatattccccatgtcgttggtgttctgcgtcaacatcgtgctggggaacgtgagcctgaggtacataccagtgtcattcatgcagacgatcaagtcgttcactccggcaacgacagtggttcttcagtggctggtttggaggaaatactttgagtggcgcatctgggcgtccttggtgcccatcgttggaggaatccttgtcacctccgtgacggagctgagcttcaacacggctggcttctgcgccgcgctggtggggtgcctggccacgtccaccaagaccatcctggcagagtcgctgctccacggctacaagttcgacagcatcaacacggtgtactacatggctccgctggccacgctgatcctgtcggtgccggccgtggcgctggagggcggcgccgtgctggggtggctgcggacgcacgagtccgtgggaccggcgctggcggtcgtcgtcacctccggggtgctggccttctgcctcaacttctccatcttctacgtcatccactccacgacggcagtcaccttcaacgtggccggcaacctcaaggtggccgtggcggtgctggcgtcctggatggtgttccggaaccccatctccgccatgaacgcactcggctgcggcgtcacgctcgtcggatgcaccttctacggctacgtcaggcaccgactctcgcagaaccaggcgcccagagcccgcttggagatgctgccgctcaccgccgtcgacaagcaaggcgacaagatataaaaagtcttttcgaataaaccatctgattctttctgatccacctagcctaaccgccgatcgagaatgcatccaccatcagagatgacaggaaattattttttgttggcagccagattttgataatgagtcagttcagttgttgcttaaagagaaatgtcatgaggtctataaagtcttttgg

SEQ ID NO: 26625 - protein, 333 aa, Zea mays subsp. mays
  peptide (1)..(333): Ceres Seq. ID no. 12407773
  misc_feature (28)..(152): Pfam Name: Pfam Description:  Integral membrane protein DUF6
  misc_feature (3)..(333): NCBI GI NO: 38567832 NR Description: OSJNBb0020J19.10
  misc_feature (6)..(333): NCBI GI NO: 18411611 NR Description: expressed protein; protein id: At1g77610
  misc_feature (1)..(333): NCBI GI NO: 15219121 NR Description: glucose 6 phosphate/phosphate translocator
  misc_feature (5)..(307): NCBI GI NO: 30681126 NR Description: phosphate translocator-related
  misc_feature (18)..(307): NCBI GI NO: 9759107 NR Description: phosphate/phosphoenolpyruvate translocator protein-like
  misc_feature (18)..(307): NCBI GI NO: 27476065 NR Description: Putative phosphate/phosphoenolpyruvate translocatorprotein
  misc_feature (18)..(307): NCBI GI NO: 15237644 NR Description: phosphate/phosphoenolpyruvate translocator
  misc_feature (18)..(307): NCBI GI NO: 17064798 NR Description: phosphate/phosphoenolpyruvate translocator-like
  misc_feature (1)..(307): NCBI GI NO: 15221371 NR Description: hypothetical protein; protein id: At1g12500.1
  misc_feature (18)..(307): NCBI GI NO: 15228248 NR Description: unknown protein; protein id: At3g10290.1
MEDAKMGNGATIRAVLAILQWWGFNVTVIIINKWIFQKLEFKFPLTVSCVHFICSSIGAYIAIKVLRTKPLIEVASEDRWRRIFPMSLVFCVNIVLGNVSLRYIPVSFMQTIKSFTPATTVVLQWLVWRKYFEWRIWASLVPIVGGILVTSVTELSFNTAGFCAALVGCLATSTKTILAESLLHGYKFDSINTVYYMAPLATLILSVPAVALEGGAVLGWLRTHESVGPALAVVVTSGVLAFCLNFSIFYVIHSTTAVTFNVAGNLKVAVAVLASWMVFRNPISAMNALGCGVTLVGCTFYGYVRHRLSQNQAPRARLEMLPLTAVDKQGDKI

SEQ ID NO: 26626 - protein, 328 aa, Zea mays subsp. mays
  peptide (1)..(328): Ceres Seq. ID no. 12407774
  misc_feature (23)..(147): Pfam Name: Pfam Description:  Integral membrane protein DUF6
  misc_feature (1)..(328): NCBI GI NO: 38567832 NR Description: OSJNBb0020J19.10
  misc_feature (1)..(328): NCBI GI NO: 18411611 NR Description: expressed protein; protein id: At1g77610
  misc_feature (1)..(328): NCBI GI NO: 15219121 NR Description: glucose 6 phosphate/phosphate translocator
  misc_feature (1)..(302): NCBI GI NO: 30681126 NR Description: phosphate translocator-related
  misc_feature (13)..(302): NCBI GI NO: 9759107 NR Description: phosphate/phosphoenolpyruvate translocator protein-like
  misc_feature (13)..(302): NCBI GI NO: 27476065 NR Description: Putative phosphate/phosphoenolpyruvate translocatorprotein
  misc_feature (13)..(302): NCBI GI NO: 15237644 NR Description: phosphate/phosphoenolpyruvate translocator
  misc_feature (13)..(302): NCBI GI NO: 17064798 NR Description: phosphate/phosphoenolpyruvate translocator-like
  misc_feature (1)..(302): NCBI GI NO: 15221371 NR Description: hypothetical protein; protein id: At1g12500.1
  misc_feature (13)..(302): NCBI GI NO: 15228248 NR Description: unknown protein; protein id: At3g10290.1
MGNGATIRAVLAILQWWGFNVTVIIINKWIFQKLEFKFPLTVSCVHFICSSIGAYIAIKVLRTKPLIEVASEDRWRRIFPMSLVFCVNIVLGNVSLRYIPVSFMQTIKSFTPATTVVLQWLVWRKYFEWRIWASLVPIVGGILVTSVTELSFNTAGFCAALVGCLATSTKTILAESLLHGYKFDSINTVYYMAPLATLILSVPAVALEGGAVLGWLRTHESVGPALAVVVTSGVLAFCLNFSIFYVIHSTTAVTFNVAGNLKVAVAVLASWMVFRNPISAMNALGCGVTLVGCTFYGYVRHRLSQNQAPRARLEMLPLTAVDKQGDKI

SEQ ID NO: 26627 - protein, 248 aa, Zea mays subsp. mays
  peptide (1)..(248): Ceres Seq. ID no. 12407775
  misc_feature (1)..(67): Pfam Name: Pfam Description:  Integral membrane protein DUF6
  misc_feature (1)..(248): NCBI GI NO: 38567832 NR Description: OSJNBb0020J19.10
  misc_feature (1)..(248): NCBI GI NO: 18411611 NR Description: expressed protein; protein id: At1g77610
  misc_feature (1)..(248): NCBI GI NO: 15219121 NR Description: glucose 6 phosphate/phosphate translocator
  misc_feature (1)..(222): NCBI GI NO: 30681126 NR Description: phosphate translocator-related
  misc_feature (1)..(222): NCBI GI NO: 9759107 NR Description: phosphate/phosphoenolpyruvate translocator protein-like
  misc_feature (1)..(222): NCBI GI NO: 27476065 NR Description: Putative phosphate/phosphoenolpyruvate translocatorprotein
  misc_feature (1)..(222): NCBI GI NO: 15237644 NR Description: phosphate/phosphoenolpyruvate translocator
  misc_feature (1)..(222): NCBI GI NO: 17064798 NR Description: phosphate/phosphoenolpyruvate translocator-like
  misc_feature (1)..(222): NCBI GI NO: 15221371 NR Description: hypothetical protein; protein id: At1g12500.1
  misc_feature (1)..(222): NCBI GI NO: 15228248 NR Description: unknown protein; protein id: At3g10290.1
MSLVFCVNIVLGNVSLRYIPVSFMQTIKSFTPATTVVLQWLVWRKYFEWRIWASLVPIVGGILVTSVTELSFNTAGFCAALVGCLATSTKTILAESLLHGYKFDSINTVYYMAPLATLILSVPAVALEGGAVLGWLRTHESVGPALAVVVTSGVLAFCLNFSIFYVIHSTTAVTFNVAGNLKVAVAVLASWMVFRNPISAMNALGCGVTLVGCTFYGYVRHRLSQNQAPRARLEMLPLTAVDKQGDKI

SEQ ID NO: 26628 - DNA, 1161 bp, Zea mays subsp. mays
  misc_feature (1)..(1161): Ceres Seq. ID no. 12435127
acctctaaaatcccccagcggcccaaccgaacccgcctagggattcctaccgagggaggccgcacgcagccatggatttcctgcaggagcaaagcgtcgagaccacagtggccgtcgccgtcgctgtcgccgccgtcgccgcaggcggcgccttcctcctccttcgatccaggaagcccaagggctgcttggatcctgagaacttcaggaagttcaaacttgttgaaaagaagcaaataagtcataatgttgccaggttcaagttcgctcttccaactccaacttctgtattgggccttccaatcggtcaacatatcagctgcagaggacaagacgctacaggtgaagaagtaatcaagccttatacccctactacattggattctgatcttggatattttgagcttgtcataaagatgtatccccaagggagaatgtcccatcatttccgcgagatgaaagttggtgattatttgtctgtgaagggacctaagggccgattcaagtaccacgttggccaagtgagggcatttggaatgctggctggtggatcaggcattactccaatgtttcaagttgccagagcaattcttgagaaccctaatgacaacaccaaggttcacttaatttatgctaatgtcacatatgaagacattcttctgaaggatgagctggacgacatggccaaaacctatcctggccgctttaagatctactatgtgttgaatcagcctcctgagaactggaacggtggtgttgggtttgtgtctaaggaaatgatccaatctcattgtccagcgcctgctgaggacattcagatcctgagatgtggtcctcctccgatgaacaaggccatggctgcacaccttgacgagctcaactacacaaaggagatgcagttccagttctaagcaatgttaagtttgcaaataataattagtgaccgacatggttcttcggtcacaggaatagtacctgactctgctcgttagctgatatcaggaggaattcaggatcacatgatgattagtagtgcgccagcattttttgcaatctctatttttgaggtcaaatgatatctacctccacataaatccacattggcagagacaacattttgttactatcattattgattttaaatgtggaccattggatgcg

SEQ ID NO: 26629 - protein, 279 aa, Zea mays subsp. mays
  peptide (1)..(279): Ceres Seq. ID no. 12435128
  misc_feature (151)..(265): Pfam Name: Pfam Description:  Oxidoreductase NAD-binding domain
  misc_feature (1)..(279): NCBI GI NO: 4336205 NR Description: cytochrome b5 reductase [Zea mays]
  misc_feature (1)..(279): NCBI GI NO: 17221690 NR Description: cytochrome b5 reductase isoform II [Zea mays]
  misc_feature (2)..(279): NCBI GI NO: 15238025 NR Description: NADH-cytochrome b5 reductase; protein id:At5g17770
  misc_feature (116)..(279): NCBI GI NO: 16648905 NR Description: NADH-cytochrome b5 reductase
  misc_feature (14)..(273): NCBI GI NO: 6070342 NR Description: NADH-cytochrome b5 reductase [Mortierella alpina]
  misc_feature (13)..(273): NCBI GI NO: 40739560 NR Description: hypothetical protein AN6366.2
  misc_feature (120)..(279): NCBI GI NO: 27712062 NR Description: similar to RIKEN cDNA 1500005G05
  misc_feature (26)..(146): NCBI GI NO: 27712062 NR Description: similar to RIKEN cDNA 1500005G05
  misc_feature (120)..(279): NCBI GI NO: 21312524 NR Description: RIKEN cDNA 1500005G05 [Mus musculus]
  misc_feature (26)..(146): NCBI GI NO: 21312524 NR Description: RIKEN cDNA 1500005G05 [Mus musculus]
MDFLQEQSVETTVAVAVAVAAVAAGGAFLLLRSRKPKGCLDPENFRKFKLVEKKQISHNVARFKFALPTPTSVLGLPIGQHISCRGQDATGEEVIKPYTPTTLDSDLGYFELVIKMYPQGRMSHHFREMKVGDYLSVKGPKGRFKYHVGQVRAFGMLAGGSGITPMFQVARAILENPNDNTKVHLIYANVTYEDILLKDELDDMAKTYPGRFKIYYVLNQPPENWNGGVGFVSKEMIQSHCPAPAEDIQILRCGPPPMNKAMAAHLDELNYTKEMQFQF

SEQ ID NO: 26630 - protein, 164 aa, Zea mays subsp. mays
  peptide (1)..(164): Ceres Seq. ID no. 12435129
  misc_feature (36)..(150): Pfam Name: Pfam Description:  Oxidoreductase NAD-binding domain
  misc_feature (1)..(164): NCBI GI NO: 4336205 NR Description: cytochrome b5 reductase [Zea mays]
  misc_feature (1)..(164): NCBI GI NO: 17221690 NR Description: cytochrome b5 reductase isoform II [Zea mays]
  misc_feature (1)..(164): NCBI GI NO: 15238025 NR Description: NADH-cytochrome b5 reductase; protein id:At5g17770
  misc_feature (1)..(164): NCBI GI NO: 16648905 NR Description: NADH-cytochrome b5 reductase
  misc_feature (1)..(158): NCBI GI NO: 6070342 NR Description: NADH-cytochrome b5 reductase [Mortierella alpina]
  misc_feature (1)..(158): NCBI GI NO: 40739560 NR Description: hypothetical protein AN6366.2
  misc_feature (5)..(164): NCBI GI NO: 27712062 NR Description: similar to RIKEN cDNA 1500005G05
  misc_feature (1)..(31): NCBI GI NO: 27712062 NR Description: similar to RIKEN cDNA 1500005G05
  misc_feature (5)..(164): NCBI GI NO: 21312524 NR Description: RIKEN cDNA 1500005G05 [Mus musculus]
  misc_feature (1)..(31): NCBI GI NO: 21312524 NR Description: RIKEN cDNA 1500005G05 [Mus musculus]
MYPQGRMSHHFREMKVGDYLSVKGPKGRFKYHVGQVRAFGMLAGGSGITPMFQVARAILENPNDNTKVHLIYANVTYEDILLKDELDDMAKTYPGRFKIYYVLNQPPENWNGGVGFVSKEMIQSHCPAPAEDIQILRCGPPPMNKAMAAHLDELNYTKEMQFQF

SEQ ID NO: 26631 - protein, 158 aa, Zea mays subsp. mays
  peptide (1)..(158): Ceres Seq. ID no. 12435130
  misc_feature (30)..(144): Pfam Name: Pfam Description:  Oxidoreductase NAD-binding domain
  misc_feature (1)..(158): NCBI GI NO: 4336205 NR Description: cytochrome b5 reductase [Zea mays]
  misc_feature (1)..(158): NCBI GI NO: 17221690 NR Description: cytochrome b5 reductase isoform II [Zea mays]
  misc_feature (1)..(158): NCBI GI NO: 15238025 NR Description: NADH-cytochrome b5 reductase; protein id:At5g17770
  misc_feature (1)..(158): NCBI GI NO: 16648905 NR Description: NADH-cytochrome b5 reductase
  misc_feature (1)..(152): NCBI GI NO: 6070342 NR Description: NADH-cytochrome b5 reductase [Mortierella alpina]
  misc_feature (1)..(152): NCBI GI NO: 40739560 NR Description: hypothetical protein AN6366.2
  misc_feature (1)..(158): NCBI GI NO: 27712062 NR Description: similar to RIKEN cDNA 1500005G05
  misc_feature (1)..(25): NCBI GI NO: 27712062 NR Description: similar to RIKEN cDNA 1500005G05
  misc_feature (1)..(158): NCBI GI NO: 21312524 NR Description: RIKEN cDNA 1500005G05 [Mus musculus]
  misc_feature (1)..(25): NCBI GI NO: 21312524 NR Description: RIKEN cDNA 1500005G05 [Mus musculus]
MSHHFREMKVGDYLSVKGPKGRFKYHVGQVRAFGMLAGGSGITPMFQVARAILENPNDNTKVHLIYANVTYEDILLKDELDDMAKTYPGRFKIYYVLNQPPENWNGGVGFVSKEMIQSHCPAPAEDIQILRCGPPPMNKAMAAHLDELNYTKEMQFQF

SEQ ID NO: 26632 - DNA, 1102 bp, Zea mays subsp. mays
  misc_feature (1)..(1102): Ceres Seq. ID no. 12349061
aaaggagtatcacgagcgtcgaggtcgagcgaacccaacgcatctccgcagttagcagcacgcacccagagcaagcccaagtgcccaatcaacaaacccagaccgccagacggcaaccgttgtcatccctcactccacggcgccggccatcgtcactcacacgcccagcaccgcagcacgacaccatcgcgccctggccatcctcccgttcacgtgcacctaccgcacgcaccaccgcggaaagtaaccccgagatccagcgccatcggcacgaccaggcctgtccagggatggggcggagaggggagccctactacgtcgaagcggcgccgccggtggacgtgaacaagaacacagagtggttcatgtacccgggcgtctggaccacctacatcctcctgctcttcttcgcttggctcctcgtcctctccgtctctggttgctcccccggagcagcctggaccgtcgtaaacctcgcgcacttcgccatcacttaccacttcttccattggaagaaaggaaccccttttgctgctgatgaccaaggcatctacagcagattgacatggtgggagcaaattgacaatggtcagcagcttactcggaacagaaagtttttgactgtggtacctgtggtgctgtatctgatcgcatcgcacttgactgactacaagcagccgatgtttttcctcaatacaatggcagtttttgtgctagttgtggcaaaattgccaaacatgcacaaggtccgcatatttggaatcaatggagacatctgaggaccactgcaggaagtacatggatgcaatgccatgatgtgatgaagagctaaacagaacaagcagtgtgtttctcaaacttgacacaactgtctgtaatatatgtacaggtttaggaagaactgtaaatgttactctaccatagaagctttgccagcggactggcctgtgttgttgccgttgctgctttcttttgagtttcactggaaggggaaacggtaactccggtaaacaaccaccagcatgtggataagaaataaggaagtgtgtagcagatgctatttggtatctggttcgattgaaccaagaaatcagttaagttc

SEQ ID NO: 26633 - protein, 258 aa, Zea mays subsp. mays
  peptide (1)..(258): Ceres Seq. ID no. 12349062
  misc_feature (114)..(257): Pfam Name: Pfam Description:  ORMDL family
  misc_feature (97)..(258): NCBI GI NO: 34394897 NR Description: putative ORMDL2
  misc_feature (99)..(248): NCBI GI NO: 34901370 NR Description: OSJNBb0062P14.15
  misc_feature (105)..(257): NCBI GI NO: 18378814 NR Description: expressed protein; protein id: At1g01230
  misc_feature (105)..(255): NCBI GI NO: 38344271 NR Description: OSJNBa0005N02.9
  misc_feature (105)..(257): NCBI GI NO: 15238262 NR Description: putative protein; protein id: At5g42000.1
  misc_feature (105)..(248): NCBI GI NO: 25513580 NR Description: F6F3.4 protein - Arabidopsis thaliana
  misc_feature (156)..(258): NCBI GI NO: 18419644 NR Description: unknown [Narcissus pseudonarcissus]
  misc_feature (113)..(255): NCBI GI NO: 13385128 NR Description: ORM1-like 3; expressed sequence AI315223
  misc_feature (113)..(255): NCBI GI NO: 26352536 NR Description: unnamed protein product [Mus musculus]
  misc_feature (113)..(255): NCBI GI NO: 21165606 NR Description: ORMDL2 [Homo sapiens]
RSITSVEVERTQRISAVSSTHPEQAQVPNQQTQTARRQPLSSLTPRRRPSSLTRPAPQHDTIAPWPSSRSRAPTARTTAESNPEIQRHRHDQACPGMGRRGEPYYVEAAPPVDVNKNTEWFMYPGVWTTYILLLFFAWLLVLSVSGCSPGAAWTVVNLAHFAITYHFFHWKKGTPFAADDQGIYSRLTWWEQIDNGQQLTRNRKFLTVVPVVLYLIASHLTDYKQPMFFLNTMAVFVLVVAKLPNMHKVRIFGINGDI

SEQ ID NO: 26634 - protein, 162 aa, Zea mays subsp. mays
  peptide (1)..(162): Ceres Seq. ID no. 12349063
  misc_feature (18)..(161): Pfam Name: Pfam Description:  ORMDL family
  misc_feature (1)..(162): NCBI GI NO: 34394897 NR Description: putative ORMDL2
  misc_feature (3)..(152): NCBI GI NO: 34901370 NR Description: OSJNBb0062P14.15
  misc_feature (9)..(161): NCBI GI NO: 18378814 NR Description: expressed protein; protein id: At1g01230
  misc_feature (9)..(159): NCBI GI NO: 38344271 NR Description: OSJNBa0005N02.9
  misc_feature (9)..(161): NCBI GI NO: 15238262 NR Description: putative protein; protein id: At5g42000.1
  misc_feature (9)..(152): NCBI GI NO: 25513580 NR Description: F6F3.4 protein - Arabidopsis thaliana
  misc_feature (60)..(162): NCBI GI NO: 18419644 NR Description: unknown [Narcissus pseudonarcissus]
  misc_feature (17)..(159): NCBI GI NO: 13385128 NR Description: ORM1-like 3; expressed sequence AI315223
  misc_feature (17)..(159): NCBI GI NO: 26352536 NR Description: unnamed protein product [Mus musculus]
  misc_feature (17)..(159): NCBI GI NO: 21165606 NR Description: ORMDL2 [Homo sapiens]
MGRRGEPYYVEAAPPVDVNKNTEWFMYPGVWTTYILLLFFAWLLVLSVSGCSPGAAWTVVNLAHFAITYHFFHWKKGTPFAADDQGIYSRLTWWEQIDNGQQLTRNRKFLTVVPVVLYLIASHLTDYKQPMFFLNTMAVFVLVVAKLPNMHKVRIFGINGDI

SEQ ID NO: 26635 - protein, 137 aa, Zea mays subsp. mays
  peptide (1)..(137): Ceres Seq. ID no. 12349064
  misc_feature (1)..(136): Pfam Name: Pfam Description:  ORMDL family
  misc_feature (1)..(137): NCBI GI NO: 34394897 NR Description: putative ORMDL2
  misc_feature (1)..(127): NCBI GI NO: 34901370 NR Description: OSJNBb0062P14.15
  misc_feature (1)..(136): NCBI GI NO: 18378814 NR Description: expressed protein; protein id: At1g01230
  misc_feature (1)..(134): NCBI GI NO: 38344271 NR Description: OSJNBa0005N02.9
  misc_feature (1)..(136): NCBI GI NO: 15238262 NR Description: putative protein; protein id: At5g42000.1
  misc_feature (1)..(127): NCBI GI NO: 25513580 NR Description: F6F3.4 protein - Arabidopsis thaliana
  misc_feature (35)..(137): NCBI GI NO: 18419644 NR Description: unknown [Narcissus pseudonarcissus]
  misc_feature (1)..(134): NCBI GI NO: 13385128 NR Description: ORM1-like 3; expressed sequence AI315223
  misc_feature (1)..(134): NCBI GI NO: 26352536 NR Description: unnamed protein product [Mus musculus]
  misc_feature (1)..(134): NCBI GI NO: 21165606 NR Description: ORMDL2 [Homo sapiens]
MYPGVWTTYILLLFFAWLLVLSVSGCSPGAAWTVVNLAHFAITYHFFHWKKGTPFAADDQGIYSRLTWWEQIDNGQQLTRNRKFLTVVPVVLYLIASHLTDYKQPMFFLNTMAVFVLVVAKLPNMHKVRIFGINGDI

SEQ ID NO: 26636 - DNA, 1794 bp, Zea mays subsp. mays
  misc_feature (1)..(1794): Ceres Seq. ID no. 12413946
agagctgccagcctgccactgagtgaggaaccctaagcggcgcactgtgcaggcgacggccgacgggggatacggcgacatcgtccccctcgacccctcctccatccccgacgcggcggcgccagcctgcagccctgcaggtgctggactagagtcgaatgctaggcggatgctagctgctaggtgttgaatgctgatttgttgtggcctgttacgtcttcaccagttcatatattaaacttgaagaaccacgtggttgaagaaaagcccactgaaaatgagtaatacatcatcttcgtcaagtgggatgtgatatatgctgatattccaaagctcattccatttattgatctgttgggctgttccctccctaaaccccagcgtcgcctccgacaagtcaccgctccgtcggctgcttgctgcagtccaggccacgcgctacgccgtcacggtcgctcctcccgtgacgcagccgtcgctaggcgccgcctatttctcggacaaagtcgctcgccaccatggtggcagcgtccgctgccgcagaagccagcggcgagagtaaaaacgaattcctcatacgcgacgacgcgccggggctactcgccgctctcaaggagatgaaggatggactggacctcgtcaggggcaaggttgaggccatcacgcggaaggtcaaggcgaaccagttgccggcggccaacgggatcgggtacctagaagcgaagaaccacctgctccttggctattgccaggacatcgtctactacctgctccgcaaggccaaggggctctcggtggatggccaccccgtcgtacggagccttgtcgagattaggctgtttctggagaagattcgtccgattgacaagaaggcagagtaccaaatccagaagctcaccgatgccgctgacaatgccactgttcgagagaaatcaggaaatgcagaggcgaaggggaaggacgggcattcggatgaggaagacctcctgaagtataggccaaacccagatatgatggacacaaagcctggtcctgatgggcaggatactgatggtgtttaccgccctccgaaatttatgcctactagcatggatgatgaagagaaacgtcgtaaaaaagattcaaggagagataaagcgatagcccgagtggcaatagaaaacccttatattaaagagataatcgatgatgctgcggacagacctgaagagtggaaggaaacagtgggcgatgaaagcagagaatttgggaggtacatgcgacagagagaagagcaagagaagcaggaagaggagttgttcactcgggctcctgtaaccaaacgtgataagcagatcgagaagcgcataaggagacaacttcatgggctaggaggcttaactgatggtttcgaccttgggatgaacatgctgttgggaggagacaaggaagatgatggcggttcaagcaagtcgcatggcaagagcggaaaccgaaagaagcacctgaagagcagcaagaagaggaagaggcattagctctggacccacactgctgtagcacttcaacataccgatacagcctagagacggttcaagcaatccacacggaaagttgaagctggagaaaataccaagaaaccaagtagagaaaaaaactttggttcctgtaggaaagttgaagctggagaaaataccaagaaaccaagtagagaaaaaaagctttggttcctgtaggcgtattatttctgaaacagaaaacttgatctgaacgactgatcctgagccaatggaacagtatgaattatatggcttg

SEQ ID NO: 26637 - protein, 332 aa, Zea mays subsp. mays
  peptide (1)..(332): Ceres Seq. ID no. 12413947
  misc_feature (24)..(132): Pfam Name: Pfam Description:  Sas10/Utp3 family
  misc_feature (19)..(332): NCBI GI NO: 18390818 NR Description: expressed protein; protein id: At1g07840
  misc_feature (19)..(278): NCBI GI NO: 25372823 NR Description: protein F24B9.6 [imported] - Arabidopsis thaliana
  misc_feature (1)..(138): NCBI GI NO: 34906856 NR Description: P0470A12.5
  misc_feature (1)..(330): NCBI GI NO: 37545892 NR Description: similar to hypothetical protein [Homo sapiens]
  misc_feature (19)..(332): NCBI GI NO: 40675680 NR Description: Unknown (protein for IMAGE:5336691)
  misc_feature (19)..(330): NCBI GI NO: 23272205 NR Description: Unknown (protein for IMAGE:5345281) [Mus musculus]
  misc_feature (19)..(330): NCBI GI NO: 21410066 NR Description: DKFZP564O092 protein [Homo sapiens]
  misc_feature (19)..(330): NCBI GI NO: 20876056 NR Description: RIKEN cDNA 1500001L15 [Mus musculus]
  misc_feature (19)..(321): NCBI GI NO: 7512783 NR Description: hypothetical protein DKFZp564O092
  misc_feature (19)..(330): NCBI GI NO: 34874139 NR Description: similar to CG11030-PA [Rattus norvegicus]
MVAASAAAEASGESKNEFLIRDDAPGLLAALKEMKDGLDLVRGKVEAITRKVKANQLPAANGIGYLEAKNHLLLGYCQDIVYYLLRKAKGLSVDGHPVVRSLVEIRLFLEKIRPIDKKAEYQIQKLTDAADNATVREKSGNAEAKGKDGHSDEEDLLKYRPNPDMMDTKPGPDGQDTDGVYRPPKFMPTSMDDEEKRRKKDSRRDKAIARVAIENPYIKEIIDDAADRPEEWKETVGDESREFGRYMRQREEQEKQEEELFTRAPVTKRDKQIEKRIRRQLHGLGGLTDGFDLGMNMLLGGDKEDDGGSSKSHGKSGNRKKHLKSSKKRKRH

SEQ ID NO: 26638 - protein, 299 aa, Zea mays subsp. mays
  peptide (1)..(299): Ceres Seq. ID no. 12413948
  misc_feature (1)..(99): Pfam Name: Pfam Description:  Sas10/Utp3 family
  misc_feature (1)..(299): NCBI GI NO: 18390818 NR Description: expressed protein; protein id: At1g07840
  misc_feature (1)..(245): NCBI GI NO: 25372823 NR Description: protein F24B9.6 [imported] - Arabidopsis thaliana
  misc_feature (1)..(105): NCBI GI NO: 34906856 NR Description: P0470A12.5
  misc_feature (1)..(297): NCBI GI NO: 37545892 NR Description: similar to hypothetical protein [Homo sapiens]
  misc_feature (1)..(299): NCBI GI NO: 40675680 NR Description: Unknown (protein for IMAGE:5336691)
  misc_feature (1)..(297): NCBI GI NO: 23272205 NR Description: Unknown (protein for IMAGE:5345281) [Mus musculus]
  misc_feature (1)..(297): NCBI GI NO: 21410066 NR Description: DKFZP564O092 protein [Homo sapiens]
  misc_feature (1)..(297): NCBI GI NO: 20876056 NR Description: RIKEN cDNA 1500001L15 [Mus musculus]
  misc_feature (1)..(288): NCBI GI NO: 7512783 NR Description: hypothetical protein DKFZp564O092
  misc_feature (1)..(297): NCBI GI NO: 34874139 NR Description: similar to CG11030-PA [Rattus norvegicus]
MKDGLDLVRGKVEAITRKVKANQLPAANGIGYLEAKNHLLLGYCQDIVYYLLRKAKGLSVDGHPVVRSLVEIRLFLEKIRPIDKKAEYQIQKLTDAADNATVREKSGNAEAKGKDGHSDEEDLLKYRPNPDMMDTKPGPDGQDTDGVYRPPKFMPTSMDDEEKRRKKDSRRDKAIARVAIENPYIKEIIDDAADRPEEWKETVGDESREFGRYMRQREEQEKQEEELFTRAPVTKRDKQIEKRIRRQLHGLGGLTDGFDLGMNMLLGGDKEDDGGSSKSHGKSGNRKKHLKSSKKRKRH

SEQ ID NO: 26639 - protein, 168 aa, Zea mays subsp. mays
  peptide (1)..(168): Ceres Seq. ID no. 12413949
  misc_feature (1)..(168): NCBI GI NO: 18390818 NR Description: expressed protein; protein id: At1g07840
  misc_feature (1)..(114): NCBI GI NO: 25372823 NR Description: protein F24B9.6 [imported] - Arabidopsis thaliana
  misc_feature (1)..(166): NCBI GI NO: 37545892 NR Description: similar to hypothetical protein [Homo sapiens]
  misc_feature (1)..(168): NCBI GI NO: 40675680 NR Description: Unknown (protein for IMAGE:5336691)
  misc_feature (1)..(166): NCBI GI NO: 23272205 NR Description: Unknown (protein for IMAGE:5345281) [Mus musculus]
  misc_feature (1)..(166): NCBI GI NO: 21410066 NR Description: DKFZP564O092 protein [Homo sapiens]
  misc_feature (1)..(166): NCBI GI NO: 20876056 NR Description: RIKEN cDNA 1500001L15 [Mus musculus]
  misc_feature (1)..(157): NCBI GI NO: 7512783 NR Description: hypothetical protein DKFZp564O092
  misc_feature (1)..(166): NCBI GI NO: 34874139 NR Description: similar to CG11030-PA [Rattus norvegicus]
  misc_feature (1)..(168): NCBI GI NO: 25012339 NR Description: RE04093p [Drosophila melanogaster]
MMDTKPGPDGQDTDGVYRPPKFMPTSMDDEEKRRKKDSRRDKAIARVAIENPYIKEIIDDAADRPEEWKETVGDESREFGRYMRQREEQEKQEEELFTRAPVTKRDKQIEKRIRRQLHGLGGLTDGFDLGMNMLLGGDKEDDGGSSKSHGKSGNRKKHLKSSKKRKRH

SEQ ID NO: 26640 - DNA, 1718 bp, Zea mays subsp. mays
  misc_feature (1)..(1718): Ceres Seq. ID no. 12391349
  misc_feature (1072)..(1072): n is a, c, t, g, unknown, or other
aaaaaaactcacatcgttccctacaccctactccctccgtcagccagcgaagttccttcagtcactcaacaccttacgtccctagccatcctccgccgcctccgtctctgcttccctagagccgtcgcgatggcagcagcccctgccggtgcccctgcaatcaccgcatcctcctcctttgtttcttcgtctccgttctgtctcaaggcatcgatgaccagccagcgccgacccgcggggagagtctccatcgtcatccgctgcgtcagtagcccgccggccgtcgacacatctttcaagactaatgtcccgcgcaatgctaatatggccaaactccaagcaggatatttgtttcctgagattgccaggagaagagccgctcatttgctgaagtttccagatgccaaaattataagccttggaataggcgacactaccgagcccattccaaatgtcataacaaatgccatggcagagagagcacatgccttgtcaacaattgatggctacagcggttatggagctgagcaaggtgaaaagaaactcagagcagcaattgctgcaacctactatgcggaccttggtattgaagattcagacatatttgtctctgatggtgccaaatgtgacatatctcgcttgcaggtcctttttggatctaatgtgacaattgcggtccaagatccatcataccctgcatatgttgattcaagtgttatcatggggcaaactgatttatatcagcaagacgttcagaagtatggaaacattgagtacatgagatgcggtccagaaaatggattttttcctgatctgtcaactgtccctaggacagatattattttcttttgttcacccaacaatcctactggtgctgctgcatctcgggaccaactaaccaaattagtaaaatttgcaaaggacaacgggtccatcatagtctatgattctgcttatgcaatgtacatatcagatgacagcccaaagtctatctttgaaattcctggagcaaaggaggttgctattgagacagcctcattctcgaaatacgctgggttcacaggtgtccgtntaggttggactgttgtccccaaggagctccttttctcggatggacatccagttgctaaagatttcaatcgcatagtttgcacttgcttcaatggtgcatcaaacattgcgcaagctggtggtttagcctgcctctctccagacggtctaaaggctatgcaagatgttgttggcttctacaaggagaacactgaaataatcgttgagacatttacatcactcggattcaacgtgtatggcgccaagaacgctccatacgtatgggtgcacttccctggccgcaattcgtgggatgtgttcgctgagatcctggagaaggccaatgtggtcactactcctggcactggatttggaccgggtggcgaaggctttgtgagggtcagcgcgttcgggcacagagagaacatcattgaagccgcaaggaggttaaagcagctgtataagtgagcaccgatgcagcttctgtgccctcctagacagatgtatcaataagaacacatcagggcaccaaaaatcgcttggtgaagctgccagaagatgttagattttgaacttttttttttaattctcgtgcggtgtctacattcaaaccatttcgaactctagacaatgcttgttgtaatcctgagacccttcattcactggtg

SEQ ID NO: 26641 - protein, 505 aa, Zea mays subsp. mays
  peptide (1)..(505): Ceres Seq. ID no. 12391350
  misc_feature (194)..(504): Pfam Name: Pfam Description:  Aminotransferase class I and II
  misc_feature (44)..(505): NCBI GI NO: 37703720 NR Description: putative aminotransferase AGD2
  misc_feature (55)..(505): NCBI GI NO: 18418270 NR Description: putative protein; protein id: At4g33680
  misc_feature (79)..(505): NCBI GI NO: 7447845 NR Description: probable transaminase (EC 2.6.1.-) T16L1.170
  misc_feature (89)..(501): NCBI GI NO: 37703722 NR Description: putative aminotransferase ALD1
  misc_feature (89)..(501): NCBI GI NO: 24414269 NR Description: Putative transaminase
  misc_feature (101)..(504): NCBI GI NO: 18397344 NR Description: putative aspartate aminotransferase
  misc_feature (101)..(504): NCBI GI NO: 25315768 NR Description: probable aspartate aminotransferase
  misc_feature (106)..(503): NCBI GI NO: 24213476 NR Description: aminotransferase
  misc_feature (106)..(505): NCBI GI NO: 23055537 NR Description: hypothetical protein [Geobacter metallireducens]
  misc_feature (106)..(505): NCBI GI NO: 23124300 NR Description: hypothetical protein [Nostoc punctiforme]
  misc_feature (358)..(358): Xaa is any aa, unknown or other
KKTHIVPYTLLPPSASEVPSVTQHLTSLAILRRLRLCFPRAVAMAAAPAGAPAITASSSFVSSSPFCLKASMTSQRRPAGRVSIVIRCVSSPPAVDTSFKTNVPRNANMAKLQAGYLFPEIARRRAAHLLKFPDAKIISLGIGDTTEPIPNVITNAMAERAHALSTIDGYSGYGAEQGEKKLRAAIAATYYADLGIEDSDIFVSDGAKCDISRLQVLFGSNVTIAVQDPSYPAYVDSSVIMGQTDLYQQDVQKYGNIEYMRCGPENGFFPDLSTVPRTDIIFFCSPNNPTGAAASRDQLTKLVKFAKDNGSIIVYDSAYAMYISDDSPKSIFEIPGAKEVAIETASFSKYAGFTGVRXGWTVVPKELLFSDGHPVAKDFNRIVCTCFNGASNIAQAGGLACLSPDGLKAMQDVVGFYKENTEIIVETFTSLGFNVYGAKNAPYVWVHFPGRNSWDVFAEILEKANVVTTPGTGFGPGGEGFVRVSAFGHRENIIEAARRLKQLYK

SEQ ID NO: 26642 - protein, 462 aa, Zea mays subsp. mays
  peptide (1)..(462): Ceres Seq. ID no. 12391351
  misc_feature (151)..(461): Pfam Name: Pfam Description:  Aminotransferase class I and II
  misc_feature (1)..(462): NCBI GI NO: 37703720 NR Description: putative aminotransferase AGD2
  misc_feature (12)..(462): NCBI GI NO: 18418270 NR Description: putative protein; protein id: At4g33680
  misc_feature (36)..(462): NCBI GI NO: 7447845 NR Description: probable transaminase (EC 2.6.1.-) T16L1.170
  misc_feature (46)..(458): NCBI GI NO: 37703722 NR Description: putative aminotransferase ALD1
  misc_feature (46)..(458): NCBI GI NO: 24414269 NR Description: Putative transaminase
  misc_feature (58)..(461): NCBI GI NO: 18397344 NR Description: putative aspartate aminotransferase
  misc_feature (58)..(461): NCBI GI NO: 25315768 NR Description: probable aspartate aminotransferase
  misc_feature (63)..(460): NCBI GI NO: 24213476 NR Description: aminotransferase
  misc_feature (63)..(462): NCBI GI NO: 23055537 NR Description: hypothetical protein [Geobacter metallireducens]
  misc_feature (63)..(462): NCBI GI NO: 23124300 NR Description: hypothetical protein [Nostoc punctiforme]
  misc_feature (315)..(315): Xaa is any aa, unknown or other
MAAAPAGAPAITASSSFVSSSPFCLKASMTSQRRPAGRVSIVIRCVSSPPAVDTSFKTNVPRNANMAKLQAGYLFPEIARRRAAHLLKFPDAKIISLGIGDTTEPIPNVITNAMAERAHALSTIDGYSGYGAEQGEKKLRAAIAATYYADLGIEDSDIFVSDGAKCDISRLQVLFGSNVTIAVQDPSYPAYVDSSVIMGQTDLYQQDVQKYGNIEYMRCGPENGFFPDLSTVPRTDIIFFCSPNNPTGAAASRDQLTKLVKFAKDNGSIIVYDSAYAMYISDDSPKSIFEIPGAKEVAIETASFSKYAGFTGVRXGWTVVPKELLFSDGHPVAKDFNRIVCTCFNGASNIAQAGGLACLSPDGLKAMQDVVGFYKENTEIIVETFTSLGFNVYGAKNAPYVWVHFPGRNSWDVFAEILEKANVVTTPGTGFGPGGEGFVRVSAFGHRENIIEAARRLKQLYK

SEQ ID NO: 26643 - protein, 434 aa, Zea mays subsp. mays
  peptide (1)..(434): Ceres Seq. ID no. 12391352
  misc_feature (123)..(433): Pfam Name: Pfam Description:  Aminotransferase class I and II
  misc_feature (1)..(434): NCBI GI NO: 37703720 NR Description: putative aminotransferase AGD2
  misc_feature (1)..(434): NCBI GI NO: 18418270 NR Description: putative protein; protein id: At4g33680
  misc_feature (8)..(434): NCBI GI NO: 7447845 NR Description: probable transaminase (EC 2.6.1.-) T16L1.170
  misc_feature (18)..(430): NCBI GI NO: 37703722 NR Description: putative aminotransferase ALD1
  misc_feature (18)..(430): NCBI GI NO: 24414269 NR Description: Putative transaminase
  misc_feature (30)..(433): NCBI GI NO: 18397344 NR Description: putative aspartate aminotransferase
  misc_feature (30)..(433): NCBI GI NO: 25315768 NR Description: probable aspartate aminotransferase
  misc_feature (35)..(432): NCBI GI NO: 24213476 NR Description: aminotransferase
  misc_feature (35)..(434): NCBI GI NO: 23055537 NR Description: hypothetical protein [Geobacter metallireducens]
  misc_feature (35)..(434): NCBI GI NO: 23124300 NR Description: hypothetical protein [Nostoc punctiforme]
  misc_feature (287)..(287): Xaa is any aa, unknown or other
MTSQRRPAGRVSIVIRCVSSPPAVDTSFKTNVPRNANMAKLQAGYLFPEIARRRAAHLLKFPDAKIISLGIGDTTEPIPNVITNAMAERAHALSTIDGYSGYGAEQGEKKLRAAIAATYYADLGIEDSDIFVSDGAKCDISRLQVLFGSNVTIAVQDPSYPAYVDSSVIMGQTDLYQQDVQKYGNIEYMRCGPENGFFPDLSTVPRTDIIFFCSPNNPTGAAASRDQLTKLVKFAKDNGSIIVYDSAYAMYISDDSPKSIFEIPGAKEVAIETASFSKYAGFTGVRXGWTVVPKELLFSDGHPVAKDFNRIVCTCFNGASNIAQAGGLACLSPDGLKAMQDVVGFYKENTEIIVETFTSLGFNVYGAKNAPYVWVHFPGRNSWDVFAEILEKANVVTTPGTGFGPGGEGFVRVSAFGHRENIIEAARRLKQLYK

SEQ ID NO: 26644 - DNA, 1447 bp, Zea mays subsp. mays
  misc_feature (1)..(1447): Ceres Seq. ID no. 12344064
gaccaaacccttctccctctcacaaaaccctagctttccctcctcccctgttttgcggcgcgccacgaactcgcgacgctctcgagagatccatggatcgggcgcaagggcggcaaccgcgacgccaacggcagcctggtcgaggccacggcgtcgcggctgagggtcgaatccgacgaggaggcggaagaggtggggatggaggtggaagagagcttcgacgcgggggtggaagacgagcaggcggcggcggaggtgattggaagcgaaaagaccagcgccgactactacttcgactcctactcccacttcggtattcatgaagaaatgctaaaagatgtcgttcggacaaaaacatatcaaaatgttatcacccagagtagctttcttatcaagaacaaagtagtccttgatgttggtgctggaactggaattctttctcttttctgtgcaaaagcaggagctaaacatgtctatgcgattgaatgttcccagatggcagacatggcacaggaaattgtaaaatcaaatggatattcagatgtcataactgtaataaaagggaaagtggaagaaatagaacttccagtcccaaaagtagatgtcatcatctcagagtggatgggctatttcctcctgttcgagaatatgttgaacactgtcctatatgcacgtgataaatggcttgctgatggtggtgtggtcctgccagacaggacttctttgcgtcttactgcgattgaagacgcagaatataaggaagacaaaattgaattttggaataatgtatatggatttgatatgagctgcataaagaaacaggcgatgatggagccactggtagatacagtggatgcaaatcagattgtcactaactgccagttactgaagacaatggatatctccaaaatgaccccaggtgacgcgtcctttactgtaccattcaagctggtagcagagcggaatgattacattcatgctcttgtcgcatactttgacgtgtcgttcaccaaatgccataagctgatgggcttctcaacaggcccgagatcgaaagccactcactggaagcaaactgttctctacctggaggatgttataactatctgtcagggggaaagcctgagtggttccatgacagtcacacccaataagagtaaccctcgagatatcgacattaagctcaagtactccataaatgggcataggtgtcaggtatcaagaacacagttctacaagatgcggtgacaatggaacaaacaagagttgcttcaaatctcattaaattttgtttaacgagtatcttgtttgacagaaattgtgctatttttattgttcatgtactatgcatcaaatattagattctttggaatctagcaaaagtagggagtagattaaactggtctgctgatatgagattgatgtagtgcaaaactgtcatattgcc

SEQ ID NO: 26645 - protein, 349 aa, Zea mays subsp. mays
  peptide (1)..(349): Ceres Seq. ID no. 12344065
  misc_feature (66)..(139): Pfam Name: Pfam Description:  Met-10+ like-protein
  misc_feature (1)..(349): NCBI GI NO: 15233606 NR Description: arginine methyltransferase
  misc_feature (1)..(349): NCBI GI NO: 17381028 NR Description: putative arginine methyltransferase pam1
  misc_feature (1)..(335): NCBI GI NO: 25456391 NR Description: protein-arginine N-methyltransferase (EC 2.1.1.23)
  misc_feature (1)..(349): NCBI GI NO: 15224820 NR Description: putative arginine N-methyltransferase
  misc_feature (16)..(349): NCBI GI NO: 28207757 NR Description: CR061 protein [Chlamydomonas reinhardtii]
  misc_feature (1)..(349): NCBI GI NO: 32425330 NR Description: Unknown (protein for IMAGE:2823702) [Homo sapiens]
  misc_feature (24)..(349): NCBI GI NO: 21314692 NR Description: HMT1 hnRNP methyltransferase-like 3 [Homo sapiens]
  misc_feature (1)..(349): NCBI GI NO: 27882547 NR Description: Similar to heterogeneous nuclear ribonucleoproteinsmethyltransferase-like 2
  misc_feature (24)..(349): NCBI GI NO: 7453575 NR Description: protein arginine N-methyltransferase 1-variant 2
  misc_feature (24)..(349): NCBI GI NO: 7453576 NR Description: protein arginine N-methyltransferase 1-variant 3
MEVEESFDAGVEDEQAAAEVIGSEKTSADYYFDSYSHFGIHEEMLKDVVRTKTYQNVITQSSFLIKNKVVLDVGAGTGILSLFCAKAGAKHVYAIECSQMADMAQEIVKSNGYSDVITVIKGKVEEIELPVPKVDVIISEWMGYFLLFENMLNTVLYARDKWLADGGVVLPDRTSLRLTAIEDAEYKEDKIEFWNNVYGFDMSCIKKQAMMEPLVDTVDANQIVTNCQLLKTMDISKMTPGDASFTVPFKLVAERNDYIHALVAYFDVSFTKCHKLMGFSTGPRSKATHWKQTVLYLEDVITICQGESLSGSMTVTPNKSNPRDIDIKLKYSINGHRCQVSRTQFYKMR

SEQ ID NO: 26646 - protein, 306 aa, Zea mays subsp. mays
  peptide (1)..(306): Ceres Seq. ID no. 12344066
  misc_feature (23)..(96): Pfam Name: Pfam Description:  Met-10+ like-protein
  misc_feature (1)..(306): NCBI GI NO: 15233606 NR Description: arginine methyltransferase
  misc_feature (1)..(306): NCBI GI NO: 17381028 NR Description: putative arginine methyltransferase pam1
  misc_feature (1)..(292): NCBI GI NO: 25456391 NR Description: protein-arginine N-methyltransferase (EC 2.1.1.23)
  misc_feature (1)..(306): NCBI GI NO: 15224820 NR Description: putative arginine N-methyltransferase
  misc_feature (1)..(306): NCBI GI NO: 28207757 NR Description: CR061 protein [Chlamydomonas reinhardtii]
  misc_feature (1)..(306): NCBI GI NO: 32425330 NR Description: Unknown (protein for IMAGE:2823702) [Homo sapiens]
  misc_feature (1)..(306): NCBI GI NO: 21314692 NR Description: HMT1 hnRNP methyltransferase-like 3 [Homo sapiens]
  misc_feature (1)..(306): NCBI GI NO: 27882547 NR Description: Similar to heterogeneous nuclear ribonucleoproteinsmethyltransferase-like 2
  misc_feature (1)..(306): NCBI GI NO: 7453575 NR Description: protein arginine N-methyltransferase 1-variant 2
  misc_feature (1)..(306): NCBI GI NO: 7453576 NR Description: protein arginine N-methyltransferase 1-variant 3
MLKDVVRTKTYQNVITQSSFLIKNKVVLDVGAGTGILSLFCAKAGAKHVYAIECSQMADMAQEIVKSNGYSDVITVIKGKVEEIELPVPKVDVIISEWMGYFLLFENMLNTVLYARDKWLADGGVVLPDRTSLRLTAIEDAEYKEDKIEFWNNVYGFDMSCIKKQAMMEPLVDTVDANQIVTNCQLLKTMDISKMTPGDASFTVPFKLVAERNDYIHALVAYFDVSFTKCHKLMGFSTGPRSKATHWKQTVLYLEDVITICQGESLSGSMTVTPNKSNPRDIDIKLKYSINGHRCQVSRTQFYKMR

SEQ ID NO: 26647 - protein, 250 aa, Zea mays subsp. mays
  peptide (1)..(250): Ceres Seq. ID no. 12344067
  misc_feature (1)..(250): NCBI GI NO: 15233606 NR Description: arginine methyltransferase
  misc_feature (1)..(250): NCBI GI NO: 17381028 NR Description: putative arginine methyltransferase pam1
  misc_feature (1)..(236): NCBI GI NO: 25456391 NR Description: protein-arginine N-methyltransferase (EC 2.1.1.23)
  misc_feature (1)..(250): NCBI GI NO: 15224820 NR Description: putative arginine N-methyltransferase
  misc_feature (1)..(250): NCBI GI NO: 28207757 NR Description: CR061 protein [Chlamydomonas reinhardtii]
  misc_feature (1)..(250): NCBI GI NO: 32425330 NR Description: Unknown (protein for IMAGE:2823702) [Homo sapiens]
  misc_feature (1)..(250): NCBI GI NO: 21314692 NR Description: HMT1 hnRNP methyltransferase-like 3 [Homo sapiens]
  misc_feature (1)..(250): NCBI GI NO: 27882547 NR Description: Similar to heterogeneous nuclear ribonucleoproteinsmethyltransferase-like 2
  misc_feature (1)..(250): NCBI GI NO: 7453575 NR Description: protein arginine N-methyltransferase 1-variant 2
  misc_feature (1)..(250): NCBI GI NO: 7453576 NR Description: protein arginine N-methyltransferase 1-variant 3
MADMAQEIVKSNGYSDVITVIKGKVEEIELPVPKVDVIISEWMGYFLLFENMLNTVLYARDKWLADGGVVLPDRTSLRLTAIEDAEYKEDKIEFWNNVYGFDMSCIKKQAMMEPLVDTVDANQIVTNCQLLKTMDISKMTPGDASFTVPFKLVAERNDYIHALVAYFDVSFTKCHKLMGFSTGPRSKATHWKQTVLYLEDVITICQGESLSGSMTVTPNKSNPRDIDIKLKYSINGHRCQVSRTQFYKMR

SEQ ID NO: 26648 - DNA, 1545 bp, Zea mays subsp. mays
  misc_feature (1)..(1545): Ceres Seq. ID no. 12364513
gcacgagaccattacctagaacatcctaatcgaaaaactgaatctggttgtgaaccaaacacacctcagctgctctgtccaaacgcaccctgacttccgagttccgacccccactgctttgcttgctctgcactccgctaattccttccgcggcgatcccgagcaagaaacccagcagcgcggcggatctcgccgggcggcggccgccactatgatgagcggtagctcgcctccgccgccctcgcttcctgccgggagtggaggcttcttcaggggatacacaaagctgtgcaagggcctcgccgtcatattgctcattgtgcaccttgtagtccagttgtttccgtccgccgtcacctatctcgcgcttatccctggaagaacgatcccttttgcttggaacctgataactgcaggctatgtcgagcaaacaattccagggatggttgtcagcatcattggccttcttttatttgggaagttgttagaacctctatggggttcaaaagagttatcaaagttcatttttattgtcaacctttcaacttctgcttgtgttttcatgactgctattgtgctgtactatataactcagcaagagatctacctctatactcctttttctggattttatggggttctatcaggattgttggtgggcattaaacagcttttacctgatcaagagcttaatctttttgtgctaaaaattaaggcaaagtggattccatctcttgttgcattgatatccattcttggaagcatcttcatatacgactttatgtcttacctcccagttctgttgtttggcatgtatatgagttggatctacctccgttactttcaaaagagacttgagaccagcctgaaaggggatccaagtgaggagttctctttctcaagcttcttccctgaatttgtaagaccatttctcgacccaatagcatctgtattccataggttactttgtggaagatctgatgccaggggagaaacattagacacctcaccattacctggttcagattcgtttgaggcaaacaggaggagagagaggggtcaacgggcactggagcaaagattagctgagaagctggctgcagtcaggagttcagagggcggcacatcactggatgccgctgacaaagtttgagtcttctatgcaacgaacaacgagctgtgcggtgcagtttgtgatttcctggcaatttgtttctatgtgatttcctgaaggattgaacggacgcgaatgtttcatgtaccttcaccagccccagcctcaccgccgagtgcttcattttttttatggtttctcatcctaatcatcatcgggaaccaactaatgaagcactgcgccccattttccccatggtttttctgtaatcaactagaagtgatcaagtaccaagcagtgtacaatgcgatgctccgtaggacaagaactcatctatgttcggtttcctgtttttttccttccaaatggtgaggttgatacttgatagtagttgacacttgacaggaacaaaattatttttgtaacctttt

SEQ ID NO: 26649 - protein, 313 aa, Zea mays subsp. mays
  peptide (1)..(313): Ceres Seq. ID no. 12364514
  misc_feature (1)..(313): NCBI GI NO: 34395257 NR Description: putative placental protein 6
  misc_feature (20)..(313): NCBI GI NO: 6648207 NR Description: unknown protein [Arabidopsis thaliana]
  misc_feature (20)..(313): NCBI GI NO: 18398108 NR Description: expressed protein; protein id: At3g07950
  misc_feature (9)..(297): NCBI GI NO: 21741573 NR Description: OSJNBa0094O15.3
  misc_feature (17)..(291): NCBI GI NO: 9790165 NR Description: PL6 protein; PL-6; placental protein 6
  misc_feature (17)..(291): NCBI GI NO: 34865897 NR Description: similar to PL6 protein [Rattus norvegicus]
  misc_feature (17)..(291): NCBI GI NO: 5902022 NR Description: PL6 protein [Homo sapiens]
  misc_feature (46)..(291): NCBI GI NO: 19920824 NR Description: CG9536-PA [Drosophila melanogaster]
  misc_feature (63)..(157): NCBI GI NO: 2340093 NR Description: PL6 protein
  misc_feature (220)..(291): NCBI GI NO: 2340093 NR Description: PL6 protein
MMSGSSPPPPSLPAGSGGFFRGYTKLCKGLAVILLIVHLVVQLFPSAVTYLALIPGRTIPFAWNLITAGYVEQTIPGMVVSIIGLLLFGKLLEPLWGSKELSKFIFIVNLSTSACVFMTAIVLYYITQQEIYLYTPFSGFYGVLSGLLVGIKQLLPDQELNLFVLKIKAKWIPSLVALISILGSIFIYDFMSYLPVLLFGMYMSWIYLRYFQKRLETSLKGDPSEEFSFSSFFPEFVRPFLDPIASVFHRLLCGRSDARGETLDTSPLPGSDSFEANRRRERGQRALEQRLAEKLAAVRSSEGGTSLDAADKV

SEQ ID NO: 26650 - protein, 312 aa, Zea mays subsp. mays
  peptide (1)..(312): Ceres Seq. ID no. 12364515
  misc_feature (1)..(312): NCBI GI NO: 34395257 NR Description: putative placental protein 6
  misc_feature (19)..(312): NCBI GI NO: 6648207 NR Description: unknown protein [Arabidopsis thaliana]
  misc_feature (19)..(312): NCBI GI NO: 18398108 NR Description: expressed protein; protein id: At3g07950
  misc_feature (8)..(296): NCBI GI NO: 21741573 NR Description: OSJNBa0094O15.3
  misc_feature (16)..(290): NCBI GI NO: 9790165 NR Description: PL6 protein; PL-6; placental protein 6
  misc_feature (16)..(290): NCBI GI NO: 34865897 NR Description: similar to PL6 protein [Rattus norvegicus]
  misc_feature (16)..(290): NCBI GI NO: 5902022 NR Description: PL6 protein [Homo sapiens]
  misc_feature (45)..(290): NCBI GI NO: 19920824 NR Description: CG9536-PA [Drosophila melanogaster]
  misc_feature (62)..(156): NCBI GI NO: 2340093 NR Description: PL6 protein
  misc_feature (219)..(290): NCBI GI NO: 2340093 NR Description: PL6 protein
MSGSSPPPPSLPAGSGGFFRGYTKLCKGLAVILLIVHLVVQLFPSAVTYLALIPGRTIPFAWNLITAGYVEQTIPGMVVSIIGLLLFGKLLEPLWGSKELSKFIFIVNLSTSACVFMTAIVLYYITQQEIYLYTPFSGFYGVLSGLLVGIKQLLPDQELNLFVLKIKAKWIPSLVALISILGSIFIYDFMSYLPVLLFGMYMSWIYLRYFQKRLETSLKGDPSEEFSFSSFFPEFVRPFLDPIASVFHRLLCGRSDARGETLDTSPLPGSDSFEANRRRERGQRALEQRLAEKLAAVRSSEGGTSLDAADKV

SEQ ID NO: 26651 - protein, 236 aa, Zea mays subsp. mays
  peptide (1)..(236): Ceres Seq. ID no. 12364516
  misc_feature (1)..(236): NCBI GI NO: 34395257 NR Description: putative placental protein 6
  misc_feature (1)..(236): NCBI GI NO: 6648207 NR Description: unknown protein [Arabidopsis thaliana]
  misc_feature (1)..(236): NCBI GI NO: 18398108 NR Description: expressed protein; protein id: At3g07950
  misc_feature (1)..(220): NCBI GI NO: 21741573 NR Description: OSJNBa0094O15.3
  misc_feature (1)..(214): NCBI GI NO: 9790165 NR Description: PL6 protein; PL-6; placental protein 6
  misc_feature (1)..(214): NCBI GI NO: 34865897 NR Description: similar to PL6 protein [Rattus norvegicus]
  misc_feature (1)..(214): NCBI GI NO: 5902022 NR Description: PL6 protein [Homo sapiens]
  misc_feature (1)..(214): NCBI GI NO: 19920824 NR Description: CG9536-PA [Drosophila melanogaster]
  misc_feature (1)..(80): NCBI GI NO: 2340093 NR Description: PL6 protein
  misc_feature (143)..(214): NCBI GI NO: 2340093 NR Description: PL6 protein
MVVSIIGLLLFGKLLEPLWGSKELSKFIFIVNLSTSACVFMTAIVLYYITQQEIYLYTPFSGFYGVLSGLLVGIKQLLPDQELNLFVLKIKAKWIPSLVALISILGSIFIYDFMSYLPVLLFGMYMSWIYLRYFQKRLETSLKGDPSEEFSFSSFFPEFVRPFLDPIASVFHRLLCGRSDARGETLDTSPLPGSDSFEANRRRERGQRALEQRLAEKLAAVRSSEGGTSLDAADKV

SEQ ID NO: 26652 - DNA, 1332 bp, Zea mays subsp. mays
  misc_feature (1)..(1332): Ceres Seq. ID no. 12362166
atcctcctctcgctctcaggcgcatcattcttctcgcctcgtgtcgctgacttccccaagctttgctgggttgccttcgagcaggagacaggctgtgtagtgtagtctagtgctaccaggatcggatcagcggctgctgcgcttcagttgccgccggcggcatgagggtggtggtgacgggcgcgacggggtacctgggaggccgcctgtgcgcggcgctggccggcgcgggccacgccgtgcgcgcgctcgtccgccactccagcgacgtctccggcctgccccgcgacatcgagatgacctacggcgacgtcaccgacgccgagtccctcgccgtggccttcgacggctgcgacgtcgtgttccacgtcgccgcggccgttgagccgtggttgcccgacccctccgttttcttcaaagttaatgtaggtggacttgagaatgtgttgaaggctgtcaagagaacaccaactgtgaagaagataatctacacatcttctttctttgcaattggtccaactgatggttatgttgcagatgagacacagatgcatcgagggaaggaattttgtactgaatatgagaaatcgaagtttcttgcagatagaatcgcactgcaggcagcagcagataaggtgccaatcaccattgtctacccaggtgttctctacggccctggaaaacttacgactggaaatcttgtctcacgcattctaatagagaggtttaatgggcgcttgcctggttacataggagatgggtatgatagagaatcgttctgccatgttgatgatgttgttaacgggcacatagcagctatggagaagggcagagtgggccaacggtatctcctcactggtgaaaacatgtcgttcgtgctgatttttaacatggttgctaatatcacaaacacaagggctcccatgttccacgtacctctctggttgattgaagcgtatgggtggatttcagtttttgtttctcgcatcactggaaaactcccacttatcagttaccctactgtgcgtgttctgagacatcagtgggcatactcgtgtgacaaagcaaagatggagctgggctataccccaagaaacttgaccgaaggtttgtcggagatgctcctgtggctcaaggaagaaaaactaatcaagttttagcgttctctactacacaccacatcacatatttaatgtacaccgatacattggggatgtgctggggattttgaagtgtatatgcttcggcattgcatcacgtcgtattatgctagaggaaatctaagatgttgacgtgtgatactgatgttggcaacaaagagagaaattatgc

SEQ ID NO: 26653 - protein, 332 aa, Zea mays subsp. mays
  peptide (1)..(332): Ceres Seq. ID no. 12362167
  misc_feature (2)..(328): Pfam Name: Pfam Description:  3-beta hydroxysteroid dehydrogenase/ isomerase family
  misc_feature (1)..(332): NCBI GI NO: 15217277 NR Description: Putative dihydroflavonal-4-reductase
  misc_feature (1)..(332): NCBI GI NO: 15234163 NR Description: putative protein; protein id: At4g33360
  misc_feature (1)..(332): NCBI GI NO: 21450875 NR Description: unknown protein [Arabidopsis thaliana]
  misc_feature (1)..(328): NCBI GI NO: 23103397 NR Description: hypothetical protein [Azotobacter vinelandii]
  misc_feature (3)..(331): NCBI GI NO: 22981628 NR Description: hypothetical protein [Ralstonia metallidurans]
  misc_feature (1)..(325): NCBI GI NO: 22965470 NR Description: hypothetical protein [Rhodospirillum rubrum]
  misc_feature (1)..(331): NCBI GI NO: 40063226 NR Description: conserved hypothetical protein
  misc_feature (3)..(331): NCBI GI NO: 22985846 NR Description: hypothetical protein [Burkholderia fungorum]
  misc_feature (1)..(331): NCBI GI NO: 23056056 NR Description: hypothetical protein [Geobacter metallireducens]
  misc_feature (1)..(331): NCBI GI NO: 17231760 NR Description: putative dihydroflavonol 4-reductase
MRVVVTGATGYLGGRLCAALAGAGHAVRALVRHSSDVSGLPRDIEMTYGDVTDAESLAVAFDGCDVVFHVAAAVEPWLPDPSVFFKVNVGGLENVLKAVKRTPTVKKIIYTSSFFAIGPTDGYVADETQMHRGKEFCTEYEKSKFLADRIALQAAADKVPITIVYPGVLYGPGKLTTGNLVSRILIERFNGRLPGYIGDGYDRESFCHVDDVVNGHIAAMEKGRVGQRYLLTGENMSFVLIFNMVANITNTRAPMFHVPLWLIEAYGWISVFVSRITGKLPLISYPTVRVLRHQWAYSCDKAKMELGYTPRNLTEGLSEMLLWLKEEKLIKF

SEQ ID NO: 26654 - protein, 287 aa, Zea mays subsp. mays
  peptide (1)..(287): Ceres Seq. ID no. 12362168
  misc_feature (1)..(283): Pfam Name: Pfam Description:  3-beta hydroxysteroid dehydrogenase/ isomerase family
  misc_feature (1)..(287): NCBI GI NO: 15217277 NR Description: Putative dihydroflavonal-4-reductase
  misc_feature (1)..(287): NCBI GI NO: 15234163 NR Description: putative protein; protein id: At4g33360
  misc_feature (1)..(287): NCBI GI NO: 21450875 NR Description: unknown protein [Arabidopsis thaliana]
  misc_feature (1)..(283): NCBI GI NO: 23103397 NR Description: hypothetical protein [Azotobacter vinelandii]
  misc_feature (1)..(286): NCBI GI NO: 22981628 NR Description: hypothetical protein [Ralstonia metallidurans]
  misc_feature (1)..(280): NCBI GI NO: 22965470 NR Description: hypothetical protein [Rhodospirillum rubrum]
  misc_feature (1)..(286): NCBI GI NO: 40063226 NR Description: conserved hypothetical protein
  misc_feature (1)..(286): NCBI GI NO: 22985846 NR Description: hypothetical protein [Burkholderia fungorum]
  misc_feature (1)..(286): NCBI GI NO: 23056056 NR Description: hypothetical protein [Geobacter metallireducens]
  misc_feature (1)..(286): NCBI GI NO: 17231760 NR Description: putative dihydroflavonol 4-reductase
MTYGDVTDAESLAVAFDGCDVVFHVAAAVEPWLPDPSVFFKVNVGGLENVLKAVKRTPTVKKIIYTSSFFAIGPTDGYVADETQMHRGKEFCTEYEKSKFLADRIALQAAADKVPITIVYPGVLYGPGKLTTGNLVSRILIERFNGRLPGYIGDGYDRESFCHVDDVVNGHIAAMEKGRVGQRYLLTGENMSFVLIFNMVANITNTRAPMFHVPLWLIEAYGWISVFVSRITGKLPLISYPTVRVLRHQWAYSCDKAKMELGYTPRNLTEGLSEMLLWLKEEKLIKF

SEQ ID NO: 26655 - protein, 203 aa, Zea mays subsp. mays
  peptide (1)..(203): Ceres Seq. ID no. 12362169
  misc_feature (1)..(199): Pfam Name: Pfam Description:  3-beta hydroxysteroid dehydrogenase/ isomerase family
  misc_feature (1)..(203): NCBI GI NO: 15217277 NR Description: Putative dihydroflavonal-4-reductase
  misc_feature (1)..(203): NCBI GI NO: 15234163 NR Description: putative protein; protein id: At4g33360
  misc_feature (1)..(203): NCBI GI NO: 21450875 NR Description: unknown protein [Arabidopsis thaliana]
  misc_feature (1)..(199): NCBI GI NO: 23103397 NR Description: hypothetical protein [Azotobacter vinelandii]
  misc_feature (1)..(202): NCBI GI NO: 22981628 NR Description: hypothetical protein [Ralstonia metallidurans]
  misc_feature (1)..(196): NCBI GI NO: 22965470 NR Description: hypothetical protein [Rhodospirillum rubrum]
  misc_feature (1)..(202): NCBI GI NO: 40063226 NR Description: conserved hypothetical protein
  misc_feature (1)..(202): NCBI GI NO: 22985846 NR Description: hypothetical protein [Burkholderia fungorum]
  misc_feature (1)..(202): NCBI GI NO: 23056056 NR Description: hypothetical protein [Geobacter metallireducens]
  misc_feature (1)..(202): NCBI GI NO: 17231760 NR Description: putative dihydroflavonol 4-reductase
MHRGKEFCTEYEKSKFLADRIALQAAADKVPITIVYPGVLYGPGKLTTGNLVSRILIERFNGRLPGYIGDGYDRESFCHVDDVVNGHIAAMEKGRVGQRYLLTGENMSFVLIFNMVANITNTRAPMFHVPLWLIEAYGWISVFVSRITGKLPLISYPTVRVLRHQWAYSCDKAKMELGYTPRNLTEGLSEMLLWLKEEKLIKF

SEQ ID NO: 26656 - DNA, 1001 bp, Zea mays subsp. mays
  misc_feature (1)..(1001): Ceres Seq. ID no. 12405116
acgcgcgaagtcattctcgtccaaaatggcgcacaagcactgtttcgtccttcttcgtattccctccctatagccgcccgcatggcgaaccgaagcgaagccaaaacgcccattccccttcgccctcttcgaccctagcaagaagacggcggcggagatggtgtactacgcgcttttggtgggcgcagagctggacggcctcaccaacctgcagcccagcggcggctgcgacgaccccagcttcccctactacctcaagctcaagtgcgagaactgcggggaggtcaccgccaagtccacctacgtcactctcagcgagcaagtcgacctgcccaagggacatggcaccgctcacctcgtccagaagtgcaagctttgcgggagagatggaacaattgtgatgattcctggtcaggggacgccacttactattgagcagagccagaaagaagagaagacttgtttgatggtgtttgactgcagaggctatgaacctgttgagttttcttttggagctggctggaaggctgaatctgtgcatgggactccttttgaaattgactgctctgaagatgaattttctgagtatgatgagaagggagaatgcccggttgagctaagcaagctgcagtcaacattcaaagtggtgaagaagcatgagaagggtggtaagacaagatttgtctagatccagtgacttggagtctgtcgggtattggaatcgaaggtgtataaatggtacatttgggctaaaaggttgtgcgtaatcagacgtcccttttctgtctattgattctgtggatgccgtgaaccatgtgaagctttcggtgacagtgtccacagaggcatttgccctggaccgattgctattgttctgtggtctgaggccatcggaaccgatctttttatcttgtgctaatgcttgaacatgctgctgatttttttagcattgtgactgatggctctgaagacatctcacgaattggaggctccgaaccatt

SEQ ID NO: 26657 - protein, 176 aa, Zea mays subsp. mays
  peptide (1)..(176): Ceres Seq. ID no. 12405117
  misc_feature (1)..(164): Pfam Name: DUF866 Pfam Description: Eukaryotic protein of unknown function
  misc_feature (1)..(174): NCBI GI NO: 34914208 NR Description: OSJNBb0049O23.17
  misc_feature (1)..(165): NCBI GI NO: 18418118 NR Description: putative protein; protein id: At4g32930
  misc_feature (1)..(165): NCBI GI NO: 7486215 NR Description: hypothetical protein F26P21
  misc_feature (3)..(169): NCBI GI NO: 7503539 NR Description: hypothetical protein F46B6
  misc_feature (5)..(161): NCBI GI NO: 8923541 NR Description: hypothetical protein FLJ20580 [Homo sapiens]
  misc_feature (5)..(161): NCBI GI NO: 27715611 NR Description: similar to hypothetical protein FLJ20580
  misc_feature (5)..(161): NCBI GI NO: 21539639 NR Description: RIKEN cDNA 0610037L13 [Mus musculus]
  misc_feature (5)..(161): NCBI GI NO: 26328397 NR Description: unnamed protein product [Mus musculus]
  misc_feature (33)..(169): NCBI GI NO: 17561054 NR Description: Putative protein of eukaryotic origin
  misc_feature (5)..(161): NCBI GI NO: 26341300 NR Description: unnamed protein product [Mus musculus]
MVYYALLVGAELDGLTNLQPSGGCDDPSFPYYLKLKCENCGEVTAKSTYVTLSEQVDLPKGHGTAHLVQKCKLCGRDGTIVMIPGQGTPLTIEQSQKEEKTCLMVFDCRGYEPVEFSFGAGWKAESVHGTPFEIDCSEDEFSEYDEKGECPVELSKLQSTFKVVKKHEKGGKTRFV

SEQ ID NO: 26658 - protein, 132 aa, Zea mays subsp. mays
  peptide (1)..(132): Ceres Seq. ID no. 12405118
ARSHSRPKWRTSTVSSFFVFPPYSRPHGEPKRSQNAHSPSPSSTLARRRRRRWCTTRFWWAQSWTASPTCSPAAAATTPASPTTSSSSARTAGRSPPSPPTSLSASKSTCPRDMAPLTSSRSASFAGEMEQL

SEQ ID NO: 26659 - protein, 95 aa, Zea mays subsp. mays
  peptide (1)..(95): Ceres Seq. ID no. 12405119
  misc_feature (1)..(83): Pfam Name: DUF866 Pfam Description: Eukaryotic protein of unknown function
  misc_feature (1)..(93): NCBI GI NO: 34914208 NR Description: OSJNBb0049O23.17
  misc_feature (1)..(84): NCBI GI NO: 18418118 NR Description: putative protein; protein id: At4g32930
  misc_feature (1)..(84): NCBI GI NO: 7486215 NR Description: hypothetical protein F26P21
  misc_feature (1)..(88): NCBI GI NO: 7503539 NR Description: hypothetical protein F46B6
  misc_feature (1)..(80): NCBI GI NO: 8923541 NR Description: hypothetical protein FLJ20580 [Homo sapiens]
  misc_feature (1)..(80): NCBI GI NO: 27715611 NR Description: similar to hypothetical protein FLJ20580
  misc_feature (1)..(80): NCBI GI NO: 21539639 NR Description: RIKEN cDNA 0610037L13 [Mus musculus]
  misc_feature (1)..(80): NCBI GI NO: 26328397 NR Description: unnamed protein product [Mus musculus]
  misc_feature (1)..(88): NCBI GI NO: 17561054 NR Description: Putative protein of eukaryotic origin
  misc_feature (1)..(80): NCBI GI NO: 26341300 NR Description: unnamed protein product [Mus musculus]
MIPGQGTPLTIEQSQKEEKTCLMVFDCRGYEPVEFSFGAGWKAESVHGTPFEIDCSEDEFSEYDEKGECPVELSKLQSTFKVVKKHEKGGKTRFV

SEQ ID NO: 26660 - DNA, 1674 bp, Zea mays subsp. mays
  misc_feature (1)..(1674): Ceres Seq. ID no. 12409778
atcacataacatcacatgtttttcgtcgtgacgtctcacactcccactagttgattgaggaagagacctgctcgcttctccctctccccgagtcgatcggtccagtccgagggaagaaggcaagaagctcccggcgcgcgcgcgcaagcgagaggaaatggcgaccagcaacggctcaggggtcgcgcagggggaggaggggaagacgccaccgcctgcggggtcgatcggcgggtacgagtccctgcacaggctcctggaggccaacctttcccccgatctattccaggaagcaagtcgattgctgctgggactgaattgtgcacgacctcttgaggctatctcactgcctgacgccacaaccactcttgcggaaacacacagttttgatttgcaggcattccgttttagtgcagacaaagagtttctgaggcaatcaagagttgttcgagtaggtctaattcagaactcaattgctgttcccactacttgtcactttgctgaccaaaagaaggcaatcatggacaaaataaaacctctaattgatgcagccggcgcttctggtgtcaatattatgtgcttacaagaagcctggacaatgccttttgccttctgcacacgcgagaaaagatggtgtgaatttgctgaaccagttgatggagaatctactcaattccttcaggaacttgcacagaagtataacatggtaatagtgagcccaatccttgaaagggatataaaccatggggagactatttggaatactgctgttgttattggaaacaacggcaacataattggcattcatcgaaagaatcacattccaagagttggtgatttcaatgagagcacatactacatggagggtaacactgggcatccagtgtttgaaacagcttatggcaaaataggagtgaacatttgttatggaagacatcatccccttaattggcttgcgtttggtctcaatggagctgaaatagtgttcaacccatctgcgactgttggtgaactgagtgaaccaatgtggcccattgaggcaaggaacgccgcaattgcaaacagctacttcgttggatcaattaatcgggttggcacagaagtgttccctaatcctttcacatccggtgatgggaaaccgcaacacgcagactttggccatttctatggatctagccatttctcagcacctgatgcctcctgcaccccatctctatcacgctaccgagatggcttgatcatctccgatatggacctcaacctatgccgccagatcaaagacaagtgggccttccgcatgactgctcgctatgagatgtatgcatccttgctctcagagtacttgaagccagatttcaaacctcaagtcattgttgatcccttgattaataagaaggcataaaaactgaggtatgctggatacttgggcttaaaaggaggtcatttgtgtattgacatgaacaggaaaaggtttaccatttagcagaataatgtctacgatgaagatgcaaaatggaggaagtttctttctttttttttcctttacatttccacatactgtaaaaatgtgtttggtgtagtttgagcttcttttactcaatattcgaaacagtaatgcttgttttgttgtataatttgctagagatttttcgatgaagaaattcaacaatcttt

SEQ ID NO: 26661 - protein, 414 aa, Zea mays subsp. mays
  peptide (1)..(414): Ceres Seq. ID no. 12409779
  misc_feature (1)..(414): NCBI GI NO: 22775671 NR Description: contains ESTsAU094470
  misc_feature (13)..(414): NCBI GI NO: 30698009 NR Description: beta-ureidopropionase [Arabidopsis thaliana]
  misc_feature (27)..(408): NCBI GI NO: 14334061 NR Description: beta-alanine synthase [Dictyostelium discoideum]
  misc_feature (22)..(405): NCBI GI NO: 40215848 NR Description: LD13390p [Drosophila melanogaster]
  misc_feature (28)..(405): NCBI GI NO: 21358471 NR Description: CG3027-PA [Drosophila melanogaster]
  misc_feature (27)..(405): NCBI GI NO: 7706509 NR Description: beta-ureidopropionase [Homo sapiens]
  misc_feature (27)..(405): NCBI GI NO: 6288790 NR Description: beta-ureidopropionase [Homo sapiens]
  misc_feature (27)..(410): NCBI GI NO: 16758704 NR Description: ureidopropionase, beta [Rattus norvegicus]
  misc_feature (27)..(410): NCBI GI NO: 19527212 NR Description: expressed sequence AI195023 [Mus musculus]
  misc_feature (21)..(404): NCBI GI NO: 39597058 NR Description: Hypothetical protein CBG02618
MATSNGSGVAQGEEGKTPPPAGSIGGYESLHRLLEANLSPDLFQEASRLLLGLNCARPLEAISLPDATTTLAETHSFDLQAFRFSADKEFLRQSRVVRVGLIQNSIAVPTTCHFADQKKAIMDKIKPLIDAAGASGVNIMCLQEAWTMPFAFCTREKRWCEFAEPVDGESTQFLQELAQKYNMVIVSPILERDINHGETIWNTAVVIGNNGNIIGIHRKNHIPRVGDFNESTYYMEGNTGHPVFETAYGKIGVNICYGRHHPLNWLAFGLNGAEIVFNPSATVGELSEPMWPIEARNAAIANSYFVGSINRVGTEVFPNPFTSGDGKPQHADFGHFYGSSHFSAPDASCTPSLSRYRDGLIISDMDLNLCRQIKDKWAFRMTARYEMYASLLSEYLKPDFKPQVIVDPLINKKA

SEQ ID NO: 26662 - protein, 293 aa, Zea mays subsp. mays
  peptide (1)..(293): Ceres Seq. ID no. 12409780
  misc_feature (1)..(293): NCBI GI NO: 22775671 NR Description: contains ESTsAU094470
  misc_feature (1)..(293): NCBI GI NO: 30698009 NR Description: beta-ureidopropionase [Arabidopsis thaliana]
  misc_feature (1)..(287): NCBI GI NO: 14334061 NR Description: beta-alanine synthase [Dictyostelium discoideum]
  misc_feature (1)..(284): NCBI GI NO: 40215848 NR Description: LD13390p [Drosophila melanogaster]
  misc_feature (1)..(284): NCBI GI NO: 21358471 NR Description: CG3027-PA [Drosophila melanogaster]
  misc_feature (1)..(284): NCBI GI NO: 7706509 NR Description: beta-ureidopropionase [Homo sapiens]
  misc_feature (1)..(284): NCBI GI NO: 6288790 NR Description: beta-ureidopropionase [Homo sapiens]
  misc_feature (1)..(289): NCBI GI NO: 16758704 NR Description: ureidopropionase, beta [Rattus norvegicus]
  misc_feature (1)..(289): NCBI GI NO: 19527212 NR Description: expressed sequence AI195023 [Mus musculus]
  misc_feature (1)..(283): NCBI GI NO: 39597058 NR Description: Hypothetical protein CBG02618
MDKIKPLIDAAGASGVNIMCLQEAWTMPFAFCTREKRWCEFAEPVDGESTQFLQELAQKYNMVIVSPILERDINHGETIWNTAVVIGNNGNIIGIHRKNHIPRVGDFNESTYYMEGNTGHPVFETAYGKIGVNICYGRHHPLNWLAFGLNGAEIVFNPSATVGELSEPMWPIEARNAAIANSYFVGSINRVGTEVFPNPFTSGDGKPQHADFGHFYGSSHFSAPDASCTPSLSRYRDGLIISDMDLNLCRQIKDKWAFRMTARYEMYASLLSEYLKPDFKPQVIVDPLINKKA

SEQ ID NO: 26663 - protein, 275 aa, Zea mays subsp. mays
  peptide (1)..(275): Ceres Seq. ID no. 12409781
  misc_feature (1)..(275): NCBI GI NO: 22775671 NR Description: contains ESTsAU094470
  misc_feature (1)..(275): NCBI GI NO: 30698009 NR Description: beta-ureidopropionase [Arabidopsis thaliana]
  misc_feature (1)..(269): NCBI GI NO: 14334061 NR Description: beta-alanine synthase [Dictyostelium discoideum]
  misc_feature (1)..(266): NCBI GI NO: 40215848 NR Description: LD13390p [Drosophila melanogaster]
  misc_feature (1)..(266): NCBI GI NO: 21358471 NR Description: CG3027-PA [Drosophila melanogaster]
  misc_feature (1)..(266): NCBI GI NO: 7706509 NR Description: beta-ureidopropionase [Homo sapiens]
  misc_feature (1)..(266): NCBI GI NO: 6288790 NR Description: beta-ureidopropionase [Homo sapiens]
  misc_feature (1)..(271): NCBI GI NO: 16758704 NR Description: ureidopropionase, beta [Rattus norvegicus]
  misc_feature (1)..(271): NCBI GI NO: 19527212 NR Description: expressed sequence AI195023 [Mus musculus]
  misc_feature (1)..(265): NCBI GI NO: 39597058 NR Description: Hypothetical protein CBG02618
MCLQEAWTMPFAFCTREKRWCEFAEPVDGESTQFLQELAQKYNMVIVSPILERDINHGETIWNTAVVIGNNGNIIGIHRKNHIPRVGDFNESTYYMEGNTGHPVFETAYGKIGVNICYGRHHPLNWLAFGLNGAEIVFNPSATVGELSEPMWPIEARNAAIANSYFVGSINRVGTEVFPNPFTSGDGKPQHADFGHFYGSSHFSAPDASCTPSLSRYRDGLIISDMDLNLCRQIKDKWAFRMTARYEMYASLLSEYLKPDFKPQVIVDPLINKKA

SEQ ID NO: 26664 - DNA, 2088 bp, Zea mays subsp. mays
  misc_feature (1)..(2088): Ceres Seq. ID no. 12409774
gaccggccactcgtctgacgctacgctgcctactatctatctacctctaccctccctcatcacttgttccactacgaccggccacctagctcgccgcgcgcgcaagcctgcgccaccacccactctactagcttagtctcccctcgtgcagcgcgacgacagccagcaatggccgccgcccagtgaggcagggtcgcagtgacggcacgagacgcacacccacgggcgctggcggcatgccgggcgacgcctacgacctcctgtgcgccgaggacgacgccgccggcagcgccctgctgtgcaccaccgacgacgacgacgggtgctgctccgctgtcgaggaggactcggcggcggcggcggcctccatcgccgagctcatcggcggcgaggcccagtactcgcccaggccggactaccccgacaggctccgctccaggtccatcgacccggccgcccgcgccgagtcggtcgcatggattctcaaggtgcaagaatactatgggtttcttccattgacagcctacctcgccgtcaactacatggaccggttcctctctctccaccgtttgccgcaggaggacgggtgggcgatgcagctgctggccgtgacctgcctctccctcgctgccaagatggaggagaccctcgtgccctccctcctggacctgcaggttgagggcaccagcagatacgactgcttcgagcctgggacggtcggccggatggagctcctcgtcctgatggcgctcaactggcggctccgctcggttactcccttcaccttcgtcgacttcttcgcgtgcaaggtcgacccaggagggaggcacaccaggtgcctcattgcccgggccacgcaagtcattctggctgcgatgcatgacgtcgagttcttggaccactgcccgtcatcaatggcggcagcggccgtgctctgcgccatcggtgagacgccgtcactggagtcggtcagccctggggctgccgtcagctggtgcatcggccttgcagaggaagggatcagcagctgctacagactgatgcagcggctggtgataggcaacgtccggacaagggtcgccagcacgacgaccatggcagcagtgaacctgtgctgctcggatgaggcgctgtcctcgcattcctccgccacctcctcgccacccccggccaagaggaggaagaggtcgccgacggccacgtgaaaactgaagaacgcaagtagataggattatttatacgcttttggggggcagattaacagggtttgatcgatttctttgcagtttgtttgtcgttttttcttctttgtgattctttctcctttttcccccttttgccatttatttgttctgttcttttgggttggatctctactcctcggtggggggattctgcctgcctgctcgaccggcccagtcatcatggcggcctctggcctctgcaccgccagccagtatgtgaaggcgacgagactcgagagagagaaagaaagacagctactacgtataacagacacatctgtgtttctctgtgcaacactctgtggggcttcttcaaccccgacgcagagctgcagagagggaccattgattggtgagcgagggcagccatggcggcagatggagatggagagggaggggggaagaggcaatgagttgcggtggatggatgatgattggtagggttaaatgaggtggtcaaagggccgggcggtcagtgctcctgccaagatgcagccctgcctgcaaagtttctgttcatattcatgagggcaaaaattgtttgtttccgagtggtttgtttgtattttgttgatgccgctgaggcgagggcgtcagagagagagaaagaggggcatgctttgctttgctgtgatgggagtcacatggatatgccctactgtggtggtgctctggagggaaatatttgtccatctccagagctaacagtgtccaagcatggggcttttgggggcccttgctgattgtttgtatctcttttttcttgcttgtgtatcaatgaagattttgccatttgaattggcctgagaagagagtacaagctgaagagagagtttctgtgttc

SEQ ID NO: 26665 - protein, 322 aa, Zea mays subsp. mays
  peptide (1)..(322): Ceres Seq. ID no. 12409775
  misc_feature (44)..(177): Pfam Name: Pfam Description:  Cyclin, N-terminal domain
  misc_feature (7)..(316): NCBI GI NO: 25989347 NR Description: cyclin D1 [Helianthus tuberosus]
  misc_feature (7)..(318): NCBI GI NO: 15223075 NR Description: Cyclin D1;1; protein id: At1g70210.1
  misc_feature (122)..(316): NCBI GI NO: 34904924 NR Description: putative cyclin delta-1
  misc_feature (27)..(116): NCBI GI NO: 34904924 NR Description: putative cyclin delta-1
  misc_feature (7)..(318): NCBI GI NO: 3915635 NR Description: Cyclin delta-1
  misc_feature (7)..(318): NCBI GI NO: 1076311 NR Description: cyclin delta-1 - Arabidopsis thaliana
  misc_feature (7)..(316): NCBI GI NO: 6448480 NR Description: cyclin D1 [Antirrhinum majus]
  misc_feature (12)..(318): NCBI GI NO: 18916916 NR Description: cyclin [Oryza sativa (japonica cultivar-group)]
  misc_feature (34)..(275): NCBI GI NO: 25809160 NR Description: cyclin D protein [Physcomitrella patens]
  misc_feature (38)..(290): NCBI GI NO: 1076312 NR Description: cyclin delta-2 - Arabidopsis thaliana
MPGDAYDLLCAEDDAAGSALLCTTDDDDGCCSAVEEDSAAAAASIAELIGGEAQYSPRPDYPDRLRSRSIDPAARAESVAWILKVQEYYGFLPLTAYLAVNYMDRFLSLHRLPQEDGWAMQLLAVTCLSLAAKMEETLVPSLLDLQVEGTSRYDCFEPGTVGRMELLVLMALNWRLRSVTPFTFVDFFACKVDPGGRHTRCLIARATQVILAAMHDVEFLDHCPSSMAAAAVLCAIGETPSLESVSPGAAVSWCIGLAEEGISSCYRLMQRLVIGNVRTRVASTTTMAAVNLCCSDEALSSHSSATSSPPPAKRRKRSPTAT

SEQ ID NO: 26666 - protein, 220 aa, Zea mays subsp. mays
  peptide (1)..(220): Ceres Seq. ID no. 12409776
  misc_feature (1)..(75): Pfam Name: Pfam Description:  Cyclin, N-terminal domain
  misc_feature (1)..(214): NCBI GI NO: 25989347 NR Description: cyclin D1 [Helianthus tuberosus]
  misc_feature (1)..(216): NCBI GI NO: 15223075 NR Description: Cyclin D1;1; protein id: At1g70210.1
  misc_feature (20)..(214): NCBI GI NO: 34904924 NR Description: putative cyclin delta-1
  misc_feature (1)..(14): NCBI GI NO: 34904924 NR Description: putative cyclin delta-1
  misc_feature (1)..(216): NCBI GI NO: 3915635 NR Description: Cyclin delta-1
  misc_feature (1)..(216): NCBI GI NO: 1076311 NR Description: cyclin delta-1 - Arabidopsis thaliana
  misc_feature (1)..(214): NCBI GI NO: 6448480 NR Description: cyclin D1 [Antirrhinum majus]
  misc_feature (1)..(216): NCBI GI NO: 18916916 NR Description: cyclin [Oryza sativa (japonica cultivar-group)]
  misc_feature (1)..(173): NCBI GI NO: 25809160 NR Description: cyclin D protein [Physcomitrella patens]
  misc_feature (1)..(188): NCBI GI NO: 1076312 NR Description: cyclin delta-2 - Arabidopsis thaliana
MDRFLSLHRLPQEDGWAMQLLAVTCLSLAAKMEETLVPSLLDLQVEGTSRYDCFEPGTVGRMELLVLMALNWRLRSVTPFTFVDFFACKVDPGGRHTRCLIARATQVILAAMHDVEFLDHCPSSMAAAAVLCAIGETPSLESVSPGAAVSWCIGLAEEGISSCYRLMQRLVIGNVRTRVASTTTMAAVNLCCSDEALSSHSSATSSPPPAKRRKRSPTAT

SEQ ID NO: 26667 - protein, 203 aa, Zea mays subsp. mays
  peptide (1)..(203): Ceres Seq. ID no. 12409777
  misc_feature (1)..(58): Pfam Name: Pfam Description:  Cyclin, N-terminal domain
  misc_feature (1)..(197): NCBI GI NO: 25989347 NR Description: cyclin D1 [Helianthus tuberosus]
  misc_feature (1)..(199): NCBI GI NO: 15223075 NR Description: Cyclin D1;1; protein id: At1g70210.1
  misc_feature (3)..(197): NCBI GI NO: 34904924 NR Description: putative cyclin delta-1
  misc_feature (1)..(199): NCBI GI NO: 3915635 NR Description: Cyclin delta-1
  misc_feature (1)..(199): NCBI GI NO: 1076311 NR Description: cyclin delta-1 - Arabidopsis thaliana
  misc_feature (1)..(197): NCBI GI NO: 6448480 NR Description: cyclin D1 [Antirrhinum majus]
  misc_feature (1)..(199): NCBI GI NO: 18916916 NR Description: cyclin [Oryza sativa (japonica cultivar-group)]
  misc_feature (1)..(156): NCBI GI NO: 25809160 NR Description: cyclin D protein [Physcomitrella patens]
  misc_feature (1)..(171): NCBI GI NO: 1076312 NR Description: cyclin delta-2 - Arabidopsis thaliana
  misc_feature (1)..(171): NCBI GI NO: 15227224 NR Description: Cyclin D2;1; protein id: At2g22490.1
MQLLAVTCLSLAAKMEETLVPSLLDLQVEGTSRYDCFEPGTVGRMELLVLMALNWRLRSVTPFTFVDFFACKVDPGGRHTRCLIARATQVILAAMHDVEFLDHCPSSMAAAAVLCAIGETPSLESVSPGAAVSWCIGLAEEGISSCYRLMQRLVIGNVRTRVASTTTMAAVNLCCSDEALSSHSSATSSPPPAKRRKRSPTAT

SEQ ID NO: 26668 - DNA, 1624 bp, Zea mays subsp. mays
  misc_feature (1)..(1624): Ceres Seq. ID no. 12407768
atataattgcagatgagcatgtggccgtcgccgagtccctgtcgatcggcgtcaactacgggcagatcgccaacaacctgccatcgccggcgcaggtatcgtggctgctccggtcgatgcgggtcagcaaggtgaagctgtacgacgccgaccccaacgtcctgcgcgcgttcctcggcacgggcgtcgagttcgtagtcggcatcggcaacgagtacgtgccggcgatggtgagccccgcggcggcgcaggcgtggctgcagcagcacgtggtgccgtacctccgctcgggcgcgcgcatcacctgcgtcaccgtgggcaacgaggtgttcaagggcaacgacaccgccctccaggcggcggtgcttcccgccatgcagtccgtgcacagggccctgggcgcgctcggcctccagggccgcatcaacgtcaccacggcgcactcgctggacgtcatgggcgtctccttcccgccctccgccggcgccttcgcccccgcggcgctggcgcacctgcagccgttcctgagctttctgtcggcgacgcggtcgccgttcctcatcaactgctacccctacttcgcgtacaaggacgacccggcgcgggtgccgccggactacgtgctcttccgtcccaacgccggtgtcgccgacgcccgcacggggctccgctacgacaacatgctgtacgcgcaggtgtggacgccgtgtacgcggccatccaggggctcgggtacacggacgtggaggtcaaggtgtcggagaccgggtggccgtcgcgaggcgacgccgacgaacccggcgccacgcccgagtacgcggggacctacatccggaacctgctgcagcggatcgagatgaagcagggcacgccgctgcgcccggcgacgcccgtcgacgtctacgtgttcgcgctcttcaacgagaacctcaagccagggccggcgtcggagaggaactacggcctcttctaccccgacggcacaccggtgtacaacgtcggcctgcacggatacctcccgccgatgctggtgtcgtcgactgcagcacgacagctgattcgttattttgcactagtcgccatcgcgtccgtcgcatattcgtctgtcttatcctgacagtgtagcctaccgacggagcactaaacagctaagcatctcatgctactcacgactcaaggaacttctgagtaatctgctggccatctcaacttgggtacctttactgcatttcggatagcgatcacaagctcttactgtacacatactgacaataaggtagaactgactgaagcatatgcagcatccattcatcacagcttacattttgacccaaaaaggaaaggtacaaacagtagggagagctgcatggacagcacctattttgttgttcactccttttcaaatgctatgaatcaagaacaagtcaacacaattattaaagattaagggtcttcgtcttccgaagtattatctccacaagaagataatattcatcagacgaagaccatttgagacgaacattcattatttaatatgtcaatgggaatgcaaaagggtagagatggaactggatcttcattaattcatttatattcatgtcccacaaaatataaatgaatattc

SEQ ID NO: 26669 - protein, 285 aa, Zea mays subsp. mays
  peptide (1)..(285): Ceres Seq. ID no. 12407769
  misc_feature (16)..(232): Pfam Name: Pfam Description:  Glycosyl hydrolases family 17
  misc_feature (1)..(232): NCBI GI NO: 38346337 NR Description: OSJNBa0073L04.8
  misc_feature (15)..(232): NCBI GI NO: 18401444 NR Description: glycosyl hydrolase family 17; protein id:At2g27500
  misc_feature (15)..(232): NCBI GI NO: 25316425 NR Description: probable beta-1,3-glucanase
  misc_feature (9)..(232): NCBI GI NO: 34908492 NR Description: putative beta-1,3-glucanase
  misc_feature (14)..(232): NCBI GI NO: 25316443 NR Description: CDS protein F9L11.6
  misc_feature (14)..(232): NCBI GI NO: 30692765 NR Description: glycosyl hydrolase family 17
  misc_feature (10)..(232): NCBI GI NO: 6006371 NR Description: Similar to hypothetical protein - potato (S31196)
  misc_feature (15)..(232): NCBI GI NO: 419789 NR Description: hypothetical protein - potato
  misc_feature (14)..(232): NCBI GI NO: 22328768 NR Description: glycosyl hydrolase family 17; protein id:At4g18340
  misc_feature (14)..(232): NCBI GI NO: 7447983 NR Description: hypothetical protein T9A21
IIADEHVAVAESLSIGVNYGQIANNLPSPAQVSWLLRSMRVSKVKLYDADPNVLRAFLGTGVEFVVGIGNEYVPAMVSPAAAQAWLQQHVVPYLRSGARITCVTVGNEVFKGNDTALQAAVLPAMQSVHRALGALGLQGRINVTTAHSLDVMGVSFPPSAGAFAPAALAHLQPFLSFLSATRSPFLINCYPYFAYKDDPARVPPDYVLFRPNAGVADARTGLRYDNMLYAQVWTPCTRPSRGSGTRTWRSRCRRPGGRREATPTNPAPRPSTRGPTSGTCCSGSR

SEQ ID NO: 26670 - protein, 247 aa, Zea mays subsp. mays
  peptide (1)..(247): Ceres Seq. ID no. 12407770
  misc_feature (1)..(194): Pfam Name: Pfam Description:  Glycosyl hydrolases family 17
  misc_feature (1)..(194): NCBI GI NO: 38346337 NR Description: OSJNBa0073L04.8
  misc_feature (1)..(194): NCBI GI NO: 18401444 NR Description: glycosyl hydrolase family 17; protein id:At2g27500
  misc_feature (1)..(194): NCBI GI NO: 25316425 NR Description: probable beta-1,3-glucanase
  misc_feature (1)..(194): NCBI GI NO: 34908492 NR Description: putative beta-1,3-glucanase
  misc_feature (1)..(194): NCBI GI NO: 25316443 NR Description: CDS protein F9L11.6
  misc_feature (1)..(194): NCBI GI NO: 30692765 NR Description: glycosyl hydrolase family 17
  misc_feature (1)..(194): NCBI GI NO: 6006371 NR Description: Similar to hypothetical protein - potato (S31196)
  misc_feature (1)..(194): NCBI GI NO: 419789 NR Description: hypothetical protein - potato
  misc_feature (1)..(194): NCBI GI NO: 22328768 NR Description: glycosyl hydrolase family 17; protein id:At4g18340
  misc_feature (1)..(194): NCBI GI NO: 7447983 NR Description: hypothetical protein T9A21
MRVSKVKLYDADPNVLRAFLGTGVEFVVGIGNEYVPAMVSPAAAQAWLQQHVVPYLRSGARITCVTVGNEVFKGNDTALQAAVLPAMQSVHRALGALGLQGRINVTTAHSLDVMGVSFPPSAGAFAPAALAHLQPFLSFLSATRSPFLINCYPYFAYKDDPARVPPDYVLFRPNAGVADARTGLRYDNMLYAQVWTPCTRPSRGSGTRTWRSRCRRPGGRREATPTNPAPRPSTRGPTSGTCCSGSR

SEQ ID NO: 26671 - protein, 210 aa, Zea mays subsp. mays
  peptide (1)..(210): Ceres Seq. ID no. 12407771
  misc_feature (1)..(157): Pfam Name: Pfam Description:  Glycosyl hydrolases family 17
  misc_feature (1)..(157): NCBI GI NO: 38346337 NR Description: OSJNBa0073L04.8
  misc_feature (1)..(157): NCBI GI NO: 18401444 NR Description: glycosyl hydrolase family 17; protein id:At2g27500
  misc_feature (1)..(157): NCBI GI NO: 25316425 NR Description: probable beta-1,3-glucanase
  misc_feature (1)..(157): NCBI GI NO: 34908492 NR Description: putative beta-1,3-glucanase
  misc_feature (1)..(157): NCBI GI NO: 25316443 NR Description: CDS protein F9L11.6
  misc_feature (1)..(157): NCBI GI NO: 30692765 NR Description: glycosyl hydrolase family 17
  misc_feature (1)..(157): NCBI GI NO: 6006371 NR Description: Similar to hypothetical protein - potato (S31196)
  misc_feature (1)..(157): NCBI GI NO: 419789 NR Description: hypothetical protein - potato
  misc_feature (1)..(157): NCBI GI NO: 22328768 NR Description: glycosyl hydrolase family 17; protein id:At4g18340
  misc_feature (1)..(157): NCBI GI NO: 7447983 NR Description: hypothetical protein T9A21
MVSPAAAQAWLQQHVVPYLRSGARITCVTVGNEVFKGNDTALQAAVLPAMQSVHRALGALGLQGRINVTTAHSLDVMGVSFPPSAGAFAPAALAHLQPFLSFLSATRSPFLINCYPYFAYKDDPARVPPDYVLFRPNAGVADARTGLRYDNMLYAQVWTPCTRPSRGSGTRTWRSRCRRPGGRREATPTNPAPRPSTRGPTSGTCCSGSR

SEQ ID NO: 26672 - DNA, 1701 bp, Zea mays subsp. mays
  misc_feature (1)..(1701): Ceres Seq. ID no. 12344072
ctacaaaaagaggagacgcgcgcacgcaaacccggaggccgggaggcggagggcagaggcagcaccgtcccgtccacctgaccacctccaccattttttcctcttcctcctcgcctccaccccttcccttccatctcttctcacctggccactcctctccctctctcccgcgccgatcgattggcccacccatcgatcgagcacgggaagaagattccagtccggagaggtctcaattcgatcgggctcgttctggtgtgggtgggcaccatggcggccacagaggcctcggcagacaagaacgccgtcttccgcaagcttcgcaccaaatcagacaacaagatgtgcttcgattgtaacgccaagaacccgacgtgggcgtccgtcacctacggtgtcttcctctgcatcgactgctcggcggtgcaccgcagcctcggcgtccacgtctccttcgtcaggtcaacaaatttggattcatggactccagaacagctgaaaatgatggtctatggaggaaacaaccgtgcacaagctttctttaagcagcatggttggacagatggtggaaaaattgaagcaaagtatacttcaagagcagctgacttgtaccggcagttgcttgctaaagaggtcgctaaaagcgccactgaagatggcaacaatagttggccatcttcaccagttgcagcttcccaggcttcggatcaaactgctgcgtttccagatcttaagctgacagaggtatcaaaagaaaatgtaagtgaaaaggaagactctgagattgttcgttcgcctagagttccaacccgttctatcaagaagccgattggtgctaaaaagcctggaaataagaccggcggacttggtgcacggaagcttacatcaaagccaaatgaaagcctgtatgagcagaagcccgaagaaacagctcctgtcctgccatcatcggtgattgcaagtactacagctaggagcaaaccccatacttcccgatttgagtatgtagaaaatgcacctgctcctaagactgggagcagctcagaaggcaatctcatgagtggacatgttgcacccccaaagtcatcgaacttctttgttgaatttgggatggacagtggatatcacaaaaaatctacatccagttcatccaaagtgcagattgaggaaagcagtgaagcaagacagaaattctcgaatgcaaaatcaatttcatcctctcagttttttggtgatcaggccagtttcgaaaaggacactcaagtctctctccaaaagttttctggttcctctgccatatcaagtgctgatctatttggccatccagcaaacaattctagcgtggatctcagtgcttcagatttgatcaacagaatatcattccaggccactcaagatctgtcttctctcaagaacatggcaggggaaactgggaaaaggttgacatcgatggcatccaacatcatcactgatcttcaggaccgcatcctctaagcttaagttacagcaaagtaaacttttacgttgcttcagtggctggtcccgtcaaccgggtgacagactggcctgccccgcagatctgtctaggagttcgagttcgtaggcgtctgaaaacttcctggcatatctgtctaggagttcggaagcatctgaaaaaagtgtaagctatttccttaatatgaaagcaggaaggattgccgc

SEQ ID NO: 26673 - protein, 407 aa, Zea mays subsp. mays
  peptide (1)..(407): Ceres Seq. ID no. 12344073
  misc_feature (11)..(127): Pfam Name: Pfam Description:  Putative GTPase activating protein for Arf
  misc_feature (1)..(407): NCBI GI NO: 37537094 NR Description: unknown protein
  misc_feature (3)..(407): NCBI GI NO: 29126345 NR Description: putative zinc finger protein
  misc_feature (1)..(407): NCBI GI NO: 13430530 NR Description: unknown protein [Arabidopsis thaliana]
  misc_feature (1)..(407): NCBI GI NO: 7487780 NR Description: hypothetical protein T6K21
  misc_feature (1)..(407): NCBI GI NO: 18414983 NR Description: Expressed protein; protein id: At4g17890.1
  misc_feature (3)..(407): NCBI GI NO: 15237500 NR Description: zinc finger protein Glo3-like
  misc_feature (3)..(398): NCBI GI NO: 18403775 NR Description: expressed protein; protein id: At2g35210
  misc_feature (11)..(192): NCBI GI NO: 37362182 NR Description: ADP-ribosylation factor GTPase activating protein 3
  misc_feature (291)..(405): NCBI GI NO: 37362182 NR Description: ADP-ribosylation factor GTPase activating protein 3
  misc_feature (1)..(229): NCBI GI NO: 12844436 NR Description: unnamed protein product [Mus musculus]
MAATEASADKNAVFRKLRTKSDNKMCFDCNAKNPTWASVTYGVFLCIDCSAVHRSLGVHVSFVRSTNLDSWTPEQLKMMVYGGNNRAQAFFKQHGWTDGGKIEAKYTSRAADLYRQLLAKEVAKSATEDGNNSWPSSPVAASQASDQTAAFPDLKLTEVSKENVSEKEDSEIVRSPRVPTRSIKKPIGAKKPGNKTGGLGARKLTSKPNESLYEQKPEETAPVLPSSVIASTTARSKPHTSRFEYVENAPAPKTGSSSEGNLMSGHVAPPKSSNFFVEFGMDSGYHKKSTSSSSKVQIEESSEARQKFSNAKSISSSQFFGDQASFEKDTQVSLQKFSGSSAISSADLFGHPANNSSVDLSASDLINRISFQATQDLSSLKNMAGETGKRLTSMASNIITDLQDRIL

SEQ ID NO: 26674 - protein, 383 aa, Zea mays subsp. mays
  peptide (1)..(383): Ceres Seq. ID no. 12344074
  misc_feature (1)..(103): Pfam Name: Pfam Description:  Putative GTPase activating protein for Arf
  misc_feature (1)..(383): NCBI GI NO: 37537094 NR Description: unknown protein
  misc_feature (1)..(383): NCBI GI NO: 29126345 NR Description: putative zinc finger protein
  misc_feature (1)..(383): NCBI GI NO: 13430530 NR Description: unknown protein [Arabidopsis thaliana]
  misc_feature (1)..(383): NCBI GI NO: 7487780 NR Description: hypothetical protein T6K21
  misc_feature (1)..(383): NCBI GI NO: 18414983 NR Description: Expressed protein; protein id: At4g17890.1
  misc_feature (1)..(383): NCBI GI NO: 15237500 NR Description: zinc finger protein Glo3-like
  misc_feature (1)..(374): NCBI GI NO: 18403775 NR Description: expressed protein; protein id: At2g35210
  misc_feature (1)..(168): NCBI GI NO: 37362182 NR Description: ADP-ribosylation factor GTPase activating protein 3
  misc_feature (267)..(381): NCBI GI NO: 37362182 NR Description: ADP-ribosylation factor GTPase activating protein 3
  misc_feature (1)..(205): NCBI GI NO: 12844436 NR Description: unnamed protein product [Mus musculus]
MCFDCNAKNPTWASVTYGVFLCIDCSAVHRSLGVHVSFVRSTNLDSWTPEQLKMMVYGGNNRAQAFFKQHGWTDGGKIEAKYTSRAADLYRQLLAKEVAKSATEDGNNSWPSSPVAASQASDQTAAFPDLKLTEVSKENVSEKEDSEIVRSPRVPTRSIKKPIGAKKPGNKTGGLGARKLTSKPNESLYEQKPEETAPVLPSSVIASTTARSKPHTSRFEYVENAPAPKTGSSSEGNLMSGHVAPPKSSNFFVEFGMDSGYHKKSTSSSSKVQIEESSEARQKFSNAKSISSSQFFGDQASFEKDTQVSLQKFSGSSAISSADLFGHPANNSSVDLSASDLINRISFQATQDLSSLKNMAGETGKRLTSMASNIITDLQDRIL

SEQ ID NO: 26675 - protein, 330 aa, Zea mays subsp. mays
  peptide (1)..(330): Ceres Seq. ID no. 12344075
  misc_feature (1)..(330): NCBI GI NO: 37537094 NR Description: unknown protein
  misc_feature (1)..(330): NCBI GI NO: 29126345 NR Description: putative zinc finger protein
  misc_feature (1)..(330): NCBI GI NO: 13430530 NR Description: unknown protein [Arabidopsis thaliana]
  misc_feature (1)..(330): NCBI GI NO: 7487780 NR Description: hypothetical protein T6K21
  misc_feature (1)..(330): NCBI GI NO: 18414983 NR Description: Expressed protein; protein id: At4g17890.1
  misc_feature (1)..(330): NCBI GI NO: 15237500 NR Description: zinc finger protein Glo3-like
  misc_feature (1)..(321): NCBI GI NO: 18403775 NR Description: expressed protein; protein id: At2g35210
  misc_feature (1)..(115): NCBI GI NO: 37362182 NR Description: ADP-ribosylation factor GTPase activating protein 3
  misc_feature (214)..(328): NCBI GI NO: 37362182 NR Description: ADP-ribosylation factor GTPase activating protein 3
  misc_feature (1)..(152): NCBI GI NO: 12844436 NR Description: unnamed protein product [Mus musculus]
MMVYGGNNRAQAFFKQHGWTDGGKIEAKYTSRAADLYRQLLAKEVAKSATEDGNNSWPSSPVAASQASDQTAAFPDLKLTEVSKENVSEKEDSEIVRSPRVPTRSIKKPIGAKKPGNKTGGLGARKLTSKPNESLYEQKPEETAPVLPSSVIASTTARSKPHTSRFEYVENAPAPKTGSSSEGNLMSGHVAPPKSSNFFVEFGMDSGYHKKSTSSSSKVQIEESSEARQKFSNAKSISSSQFFGDQASFEKDTQVSLQKFSGSSAISSADLFGHPANNSSVDLSASDLINRISFQATQDLSSLKNMAGETGKRLTSMASNIITDLQDRIL

SEQ ID NO: 26676 - DNA, 1273 bp, Zea mays subsp. mays
  misc_feature (1)..(1273): Ceres Seq. ID no. 12374425
acgccacgctcccgtcctctccgctggcctcgtgccccctcgtcccaactcccaactgccgatggggaaggagcaatccggtgtgcgcgcgcgggcgcggaagtgaaccccggttgagtagtaggtgggagatcgaggtcgcgcccttgccccacacgccactaaaggccgcgccgacgggctcatcagacgctttggagtttggacgggctcgcctcggccgctctggcgcttgtgcggtgggtgaagcgcgggtgctggtgcgggaagcctcgccagacctagcgctgccgactgccgagctgggtgcgggcgcgaggagtcgacgggaagacaagggtgaggaattatgagtgaaacagggcacactgtacaagtcactaacctctcgagcagagtatctgaaagtgatcttcatgagttcttttcgttctctggtcctattgagcatatagaacttatcagatcagaaggatacggtgccactgcttatgtgacattcaaggaacgctttgccttggaaactgcagtattgctcagtggggctactattgtggatcagccagtatgcataacctattggggacaacctgagggaacttttaatttctgggacaggccaacttgggaggttgaagaggaaatcgaatacaggaactaccaaacatgccagtacaacactactccgcaggaagcttttacagtggctcaagatatcatgaagacgatgctagaaaaggggtacgtgctcagcaaggatgctttggctaaggctagagcctttgatgagtcctatggattaacagctgcagcagcagccagggctgcagagctgagcaagagaattggtttaactgatagggtcaatgctggtgttggtgcaatgcgatcagtcgatgagacatatcgcgtaagagagacaaccaagacggttgctactgccactggaagaacggcagcaaaggtggtaaatggcatcgtcaccagcagctacttctctgcaggagccatgatcttgtctgatgctcttactagggctgccaaggccgcggcagatctggccgctcatggtaggcagaattaagtgaaaaatagacataaagttcatccttgcagttactaaacatgaggacgaacaccttcaagtgatgttgcttgatgtatatttatgacacaacagtgtcgtaaattaaaaggagacgatcactgcgtttggaacaaattgtttgctctgataagtttgattattgcaaatgtagtcaagtgatcgtgc

SEQ ID NO: 26677 - protein, 244 aa, Zea mays subsp. mays
  peptide (1)..(244): Ceres Seq. ID no. 12374426
  misc_feature (8)..(76): Pfam Name: a.k.a. RRM, RBD, or RNP domain Pfam Description: RNA recognition motif.
  misc_feature (1)..(244): NCBI GI NO: 38344906 NR Description: OSJNBb0079B02.9
  misc_feature (5)..(243): NCBI GI NO: 18394102 NR Description: RRM-containing protein; protein id: At1g14340
  misc_feature (5)..(243): NCBI GI NO: 21618045 NR Description: unknown [Arabidopsis thaliana]
  misc_feature (5)..(239): NCBI GI NO: 25518024 NR Description: F14L17.11 protein - Arabidopsis thaliana
  misc_feature (1)..(241): NCBI GI NO: 6714467 NR Description: unknown protein [Arabidopsis thaliana]
  misc_feature (7)..(243): NCBI GI NO: 8809670 NR Description: gene_id:MSD23
  misc_feature (7)..(243): NCBI GI NO: 30695063 NR Description: RNA recognition motif (RRM)-containing protein
  misc_feature (7)..(243): NCBI GI NO: 18414951 NR Description: RRM-containing protein; protein id: At4g17720
  misc_feature (7)..(239): NCBI GI NO: 18071362 NR Description: putative splicing regulatory protein
  misc_feature (3)..(232): NCBI GI NO: 18421342 NR Description: RRM-containing protein; protein id: At5g32450
MSETGHTVQVTNLSSRVSESDLHEFFSFSGPIEHIELIRSEGYGATAYVTFKERFALETAVLLSGATIVDQPVCITYWGQPEGTFNFWDRPTWEVEEEIEYRNYQTCQYNTTPQEAFTVAQDIMKTMLEKGYVLSKDALAKARAFDESYGLTAAAAARAAELSKRIGLTDRVNAGVGAMRSVDETYRVRETTKTVATATGRTAAKVVNGIVTSSYFSAGAMILSDALTRAAKAAADLAAHGRQN

SEQ ID NO: 26678 - DNA, 1855 bp, Zea mays subsp. mays
  misc_feature (1)..(1855): Ceres Seq. ID no. 12566608
gactcggatcagccgcagttgatctggaggcgcgggccggccatggaggagggtggcgagcacacgagtcttctggtcaaggatgatgcatcatgtcatggcgaggaaacacagagtctattggaagcaaatctagggccacagctgaaaagtaaatgctctgattggagagcaccggcactcatcctgggattggaatgcttggagagcatggctttcaatggcattgccacaaacctagttgtgtatctccgttcagttctccatgggggtattgcttccagtgcagcaactgtatctctttggtatgggacaagcttctttgtgccaattcttggagccgccatagcagatacttgcttgggaaattataagaccatcttgatctcccttatcatgtacctatttggaatagtactaattacagttgcaacattcatgccttctacttcagtcttgtgcgacgtcagttcatgcttgtcatcaaatggaactcaaaccatgattttctttgctggtttgtatctcactgctgttggatgtggaggagtaagatctgcattgcttccgtttggtgctaaccagttcaacaacgagaacagtctagacataaaaaagagaagaaatttcttcagcttgttctatatatgtgtcatctttggtgtgattacttctgggacaatcatagtttgggttcaggaaaatgttagctgggctattggatatggagtcgccactacatgcataggtcttgctttgataggatttctggtgggaacaccaatattccaagaagatgagccttgtggttctccagtgaagagtattttccaggttattgttgcctcttttaggaacatgagcttggaagtacctgctgatagctgtcttctgtatgaggtcgggagcaaccacatacaaaggacaaaacttgctcactctgatgattttaggttcttagataaggcggcagttatttctgatccaagcctggtgtatggaggctgtcgaagctcatggagcatatgtacagttactgaagttgaggaactgaaaatacttatccgcttgctcccaatatgggtgactggaatattctttggtgctgcgatctcgcaaatgcacaccacttttattcagcagggaactgtgatggacaccaagatcggttccctgtccattccaccagcatccttatactcatttgaagtgatatgtgtcacgctttgggtacttgctgtcaacaaagtgcttgtgccggcaatccgaacgtattttgcaaatggggtagagctcacacagttacagaggattgggatcggtcgtttcctgatgatctttgccatggcaatggcagcacttctagaaaccaagaggctgcatattgttcaggagggggaactgctaagcattgtatggcagcttccacagtacttcgtcattgctggggctgagtgcttcggtatcatcactcagctggagttctttcatggccaggcgccagactccatgaagagcattttaacggcatttgcattgctcaccactgcccttgggaattacttgagctcagctatcatcaccctcattgcaggggtgaccagggtatggcatagccctggttggataccagatgatctgaacaaaggacaccttgactactactactggtgtcttactaccctctcattggtgaattttgttgtgtatctgtattttgctagtaaatacaaattgaagaaagttgtttgttaatactaccaaacactaatgaaatatctttacgtgtaacatatgaaatataacgtttcaaatgtttatgtttattaatataaggtttcaaatgtttatgttt

SEQ ID NO: 26679 - protein, 584 aa, Zea mays subsp. mays
  peptide (1)..(584): Ceres Seq. ID no. 12566609
  misc_feature (124)..(514): Pfam Name: Pfam Description:  POT family
  misc_feature (15)..(583): NCBI GI NO: 34394564 NR Description: putative peptide transporter
  misc_feature (47)..(583): NCBI GI NO: 38567970 NR Description: OSJNBa0093F12.11
  misc_feature (42)..(583): NCBI GI NO: 38567971 NR Description: OSJNBa0093F12.12
  misc_feature (55)..(582): NCBI GI NO: 37537182 NR Description: putative peptide transporter
  misc_feature (47)..(581): NCBI GI NO: 15076661 NR Description: peptide transporter
  misc_feature (47)..(581): NCBI GI NO: 4102839 NR Description: LeOPT1 [Lycopersicon esculentum]
  misc_feature (13)..(581): NCBI GI NO: 15226861 NR Description: histidine transport protein
  misc_feature (13)..(581): NCBI GI NO: 1076331 NR Description: histidine transport protein - Arabidopsis thaliana
  misc_feature (46)..(581): NCBI GI NO: 37537188 NR Description: putative peptide transporter
  misc_feature (47)..(581): NCBI GI NO: 31088360 NR Description: peptide transporter 1 [Vicia faba]
DSDQPQLIWRRGPAMEEGGEHTSLLVKDDASCHGEETQSLLEANLGPQLKSKCSDWRAPALILGLECLESMAFNGIATNLVVYLRSVLHGGIASSAATVSLWYGTSFFVPILGAAIADTCLGNYKTILISLIMYLFGIVLITVATFMPSTSVLCDVSSCLSSNGTQTMIFFAGLYLTAVGCGGVRSALLPFGANQFNNENSLDIKKRRNFFSLFYICVIFGVITSGTIIVWVQENVSWAIGYGVATTCIGLALIGFLVGTPIFQEDEPCGSPVKSIFQVIVASFRNMSLEVPADSCLLYEVGSNHIQRTKLAHSDDFRFLDKAAVISDPSLVYGGCRSSWSICTVTEVEELKILIRLLPIWVTGIFFGAAISQMHTTFIQQGTVMDTKIGSLSIPPASLYSFEVICVTLWVLAVNKVLVPAIRTYFANGVELTQLQRIGIGRFLMIFAMAMAALLETKRLHIVQEGELLSIVWQLPQYFVIAGAECFGIITQLEFFHGQAPDSMKSILTAFALLTTALGNYLSSAIITLIAGVTRVWHSPGWIPDDLNKGHLDYYYWCLTTLSLVNFVVYLYFASKYKLKKVVC

SEQ ID NO: 26680 - protein, 570 aa, Zea mays subsp. mays
  peptide (1)..(570): Ceres Seq. ID no. 12566610
  misc_feature (110)..(500): Pfam Name: Pfam Description:  POT family
  misc_feature (1)..(569): NCBI GI NO: 34394564 NR Description: putative peptide transporter
  misc_feature (33)..(569): NCBI GI NO: 38567970 NR Description: OSJNBa0093F12.11
  misc_feature (28)..(569): NCBI GI NO: 38567971 NR Description: OSJNBa0093F12.12
  misc_feature (41)..(568): NCBI GI NO: 37537182 NR Description: putative peptide transporter
  misc_feature (33)..(567): NCBI GI NO: 15076661 NR Description: peptide transporter
  misc_feature (33)..(567): NCBI GI NO: 4102839 NR Description: LeOPT1 [Lycopersicon esculentum]
  misc_feature (1)..(567): NCBI GI NO: 15226861 NR Description: histidine transport protein
  misc_feature (1)..(567): NCBI GI NO: 1076331 NR Description: histidine transport protein - Arabidopsis thaliana
  misc_feature (32)..(567): NCBI GI NO: 37537188 NR Description: putative peptide transporter
  misc_feature (33)..(567): NCBI GI NO: 31088360 NR Description: peptide transporter 1 [Vicia faba]
MEEGGEHTSLLVKDDASCHGEETQSLLEANLGPQLKSKCSDWRAPALILGLECLESMAFNGIATNLVVYLRSVLHGGIASSAATVSLWYGTSFFVPILGAAIADTCLGNYKTILISLIMYLFGIVLITVATFMPSTSVLCDVSSCLSSNGTQTMIFFAGLYLTAVGCGGVRSALLPFGANQFNNENSLDIKKRRNFFSLFYICVIFGVITSGTIIVWVQENVSWAIGYGVATTCIGLALIGFLVGTPIFQEDEPCGSPVKSIFQVIVASFRNMSLEVPADSCLLYEVGSNHIQRTKLAHSDDFRFLDKAAVISDPSLVYGGCRSSWSICTVTEVEELKILIRLLPIWVTGIFFGAAISQMHTTFIQQGTVMDTKIGSLSIPPASLYSFEVICVTLWVLAVNKVLVPAIRTYFANGVELTQLQRIGIGRFLMIFAMAMAALLETKRLHIVQEGELLSIVWQLPQYFVIAGAECFGIITQLEFFHGQAPDSMKSILTAFALLTTALGNYLSSAIITLIAGVTRVWHSPGWIPDDLNKGHLDYYYWCLTTLSLVNFVVYLYFASKYKLKKVVC

SEQ ID NO: 26681 - protein, 514 aa, Zea mays subsp. mays
  peptide (1)..(514): Ceres Seq. ID no. 12566611
  misc_feature (54)..(444): Pfam Name: Pfam Description:  POT family
  misc_feature (1)..(513): NCBI GI NO: 34394564 NR Description: putative peptide transporter
  misc_feature (1)..(513): NCBI GI NO: 38567970 NR Description: OSJNBa0093F12.11
  misc_feature (1)..(513): NCBI GI NO: 38567971 NR Description: OSJNBa0093F12.12
  misc_feature (1)..(512): NCBI GI NO: 37537182 NR Description: putative peptide transporter
  misc_feature (1)..(511): NCBI GI NO: 15076661 NR Description: peptide transporter
  misc_feature (1)..(511): NCBI GI NO: 4102839 NR Description: LeOPT1 [Lycopersicon esculentum]
  misc_feature (1)..(511): NCBI GI NO: 15226861 NR Description: histidine transport protein
  misc_feature (1)..(511): NCBI GI NO: 1076331 NR Description: histidine transport protein - Arabidopsis thaliana
  misc_feature (1)..(511): NCBI GI NO: 37537188 NR Description: putative peptide transporter
  misc_feature (1)..(511): NCBI GI NO: 31088360 NR Description: peptide transporter 1 [Vicia faba]
MAFNGIATNLVVYLRSVLHGGIASSAATVSLWYGTSFFVPILGAAIADTCLGNYKTILISLIMYLFGIVLITVATFMPSTSVLCDVSSCLSSNGTQTMIFFAGLYLTAVGCGGVRSALLPFGANQFNNENSLDIKKRRNFFSLFYICVIFGVITSGTIIVWVQENVSWAIGYGVATTCIGLALIGFLVGTPIFQEDEPCGSPVKSIFQVIVASFRNMSLEVPADSCLLYEVGSNHIQRTKLAHSDDFRFLDKAAVISDPSLVYGGCRSSWSICTVTEVEELKILIRLLPIWVTGIFFGAAISQMHTTFIQQGTVMDTKIGSLSIPPASLYSFEVICVTLWVLAVNKVLVPAIRTYFANGVELTQLQRIGIGRFLMIFAMAMAALLETKRLHIVQEGELLSIVWQLPQYFVIAGAECFGIITQLEFFHGQAPDSMKSILTAFALLTTALGNYLSSAIITLIAGVTRVWHSPGWIPDDLNKGHLDYYYWCLTTLSLVNFVVYLYFASKYKLKKVVC

SEQ ID NO: 26682 - DNA, 1968 bp, Zea mays subsp. mays
  misc_feature (1)..(1968): Ceres Seq. ID no. 12409766
ataaaacacgcaccggcacctaccagccgccaccttcccggctcctttactcgccggaggcgaaccagaactcgtgccacctcctcctgttccttgccatctccgaattcccatctgagattccaagggccgcgccgtgcaatcgaggctctccccgctcaccatatatcggaggctccgcccccgcgcctcgaatccttcgcgagaggtgctgttgtttgccgtgatttgagccgggtggaggtgtctcgcttcttgatcttgagaggtgttcctagttgattgttgggagcgaagaaggcatgataccttctgtgaggatctctcctggctctgcagccttctctggctccagcctacgcttaaaattacattcaattccatccatctctagtctcaaaccctccaaatatgtggtctcctcgctgaaaccactctacctagcaccgctagatggtccacacacttctgagcttaagtcttggagacaaccacttgagttccgttgtgctgcttctgctgccgatgacaaggagtcaaagactcaggtggtgccagttcagttggaaggcgcacagaggttaaagatctccatctatttcgcgacctggtgggcgcttaatgtgatatttaacatttacaacaagaaggttctcaatgctttcccttacccctggctcacctccacactctcccttgcctgcggctctgcgatgatgcttttctcgtgggccactcgtcttgttgaggcccccaagaccgacctagacttctggaaagtccttttcccggttgctgtggcacatacaattggccatgttgctgcgacagtgagcatgtctaaggtggcagtgtcattcacacacataattaaaagtgcagaacctgcattcactgttttggtgtcaaagttcctccttggggagacgtttccagttccagtctatctttctcttcttccaatcattggtggttgtgctctagctgctgtcacagagctgaactttaatatggttggatttatgggtgctatgatgtccaaccttgcatttgttttccgcaacatcttctcgaagaggggcatgaaggggaagtccgtcagtggcatgaattactatgcttgcctgtcaataatgtcgctggtcatactgactccatttgctatagctatggaaggtcctcagatgtgggctgctggttggcaaaaggctgttgcagaagttggacccaatgttgtctggtggatcgctgcacagagcgtgttctatcacttatataaccaggtgtcctacatgtctctcgatcagatctctccattgacgtttagcattggcaatacaatgaaacgtatatcagtgattgtttcatctataattatcttccacacgcctgtccgccctgtcaatgcactgggagctgccattgccatccttggcacattcctgtactctcaggcaaaggcgtgaggctaaagctttggccaaaggatcggagccagtagcaggcactggatccagttttgcttgttggagtggcatgtagatataaggttcggttttcgtgagagagagggtaataatggatcagtggctctgctgttccgttcttgtttgttgaccagattgaaatgcacaggccgtgacatgaaccgtcgtcaagtgtacctgaataacaccgtaacgaaattcaccgatgctgtttctttatggtattttagcagagctaagctgcgagccatgaccatgaccatgagcgcttgaacctccctacctttctggcgtttgagcatcatcagaagttagcttgaacaagcaagagtgaagatttcgaaggcttgaagaatgttctctgcatcagtgtacaaatatattgcagggctagtacaacaaagtagaatgtgatgttatgtttagctgcattgtgattgctttgccagtttacatgtaacaaaaagatagctgggacgtg

SEQ ID NO: 26683 - protein, 387 aa, Zea mays subsp. mays
  peptide (1)..(387): Ceres Seq. ID no. 12409767
  misc_feature (105)..(230): Pfam Name: Pfam Description:  Integral membrane protein DUF6
  misc_feature (1)..(387): NCBI GI NO: 7489744 NR Description: glucose-6-phosphate/ phosphate-translocatorprecursor
  misc_feature (1)..(386): NCBI GI NO: 38637068 NR Description: glucose-6-phosphate/phosphate translocator
  misc_feature (1)..(386): NCBI GI NO: 14150753 NR Description: glucose-6-phosphate/phosphate translocator
  misc_feature (3)..(386): NCBI GI NO: 7488807 NR Description: glucose-6-phosphate/ phosphate-translocatorprecursor
  misc_feature (7)..(386): NCBI GI NO: 18407336 NR Description: glucose-6-phosphate/ phosphate-translocatorprecursor
  misc_feature (7)..(386): NCBI GI NO: 14596173 NR Description: Similar to glucose-6-phosphate/phosphate-translocator
  misc_feature (7)..(384): NCBI GI NO: 7484980 NR Description: glucose-6-phosphate/ phosphate translocatorprecursor
  misc_feature (1)..(386): NCBI GI NO: 18423670 NR Description: glucose-6-phosphate/phosphate translocator
  misc_feature (4)..(386): NCBI GI NO: 7489258 NR Description: probable glucose-6-phosphate/phosphate-translocatorprecursor - potato
  misc_feature (4)..(386): NCBI GI NO: 27752361 NR Description: glucose-6-phosphate/phosphate translocator 2
MIPSVRISPGSAAFSGSSLRLKLHSIPSISSLKPSKYVVSSLKPLYLAPLDGPHTSELKSWRQPLEFRCAASAADDKESKTQVVPVQLEGAQRLKISIYFATWWALNVIFNIYNKKVLNAFPYPWLTSTLSLACGSAMMLFSWATRLVEAPKTDLDFWKVLFPVAVAHTIGHVAATVSMSKVAVSFTHIIKSAEPAFTVLVSKFLLGETFPVPVYLSLLPIIGGCALAAVTELNFNMVGFMGAMMSNLAFVFRNIFSKRGMKGKSVSGMNYYACLSIMSLVILTPFAIAMEGPQMWAAGWQKAVAEVGPNVVWWIAAQSVFYHLYNQVSYMSLDQISPLTFSIGNTMKRISVIVSSIIIFHTPVRPVNALGAAIAILGTFLYSQAKA

SEQ ID NO: 26684 - protein, 250 aa, Zea mays subsp. mays
  peptide (1)..(250): Ceres Seq. ID no. 12409768
  misc_feature (1)..(93): Pfam Name: Pfam Description:  Integral membrane protein DUF6
  misc_feature (1)..(250): NCBI GI NO: 7489744 NR Description: glucose-6-phosphate/ phosphate-translocatorprecursor
  misc_feature (1)..(249): NCBI GI NO: 38637068 NR Description: glucose-6-phosphate/phosphate translocator
  misc_feature (1)..(249): NCBI GI NO: 14150753 NR Description: glucose-6-phosphate/phosphate translocator
  misc_feature (1)..(249): NCBI GI NO: 7488807 NR Description: glucose-6-phosphate/ phosphate-translocatorprecursor
  misc_feature (1)..(249): NCBI GI NO: 18407336 NR Description: glucose-6-phosphate/ phosphate-translocatorprecursor
  misc_feature (1)..(249): NCBI GI NO: 14596173 NR Description: Similar to glucose-6-phosphate/phosphate-translocator
  misc_feature (1)..(247): NCBI GI NO: 7484980 NR Description: glucose-6-phosphate/ phosphate translocatorprecursor
  misc_feature (1)..(249): NCBI GI NO: 18423670 NR Description: glucose-6-phosphate/phosphate translocator
  misc_feature (1)..(249): NCBI GI NO: 7489258 NR Description: probable glucose-6-phosphate/phosphate-translocatorprecursor - potato
  misc_feature (1)..(249): NCBI GI NO: 27752361 NR Description: glucose-6-phosphate/phosphate translocator 2
MMLFSWATRLVEAPKTDLDFWKVLFPVAVAHTIGHVAATVSMSKVAVSFTHIIKSAEPAFTVLVSKFLLGETFPVPVYLSLLPIIGGCALAAVTELNFNMVGFMGAMMSNLAFVFRNIFSKRGMKGKSVSGMNYYACLSIMSLVILTPFAIAMEGPQMWAAGWQKAVAEVGPNVVWWIAAQSVFYHLYNQVSYMSLDQISPLTFSIGNTMKRISVIVSSIIIFHTPVRPVNALGAAIAILGTFLYSQAKA

SEQ ID NO: 26685 - protein, 249 aa, Zea mays subsp. mays
  peptide (1)..(249): Ceres Seq. ID no. 12409769
  misc_feature (1)..(92): Pfam Name: Pfam Description:  Integral membrane protein DUF6
  misc_feature (1)..(249): NCBI GI NO: 7489744 NR Description: glucose-6-phosphate/ phosphate-translocatorprecursor
  misc_feature (1)..(248): NCBI GI NO: 38637068 NR Description: glucose-6-phosphate/phosphate translocator
  misc_feature (1)..(248): NCBI GI NO: 14150753 NR Description: glucose-6-phosphate/phosphate translocator
  misc_feature (1)..(248): NCBI GI NO: 7488807 NR Description: glucose-6-phosphate/ phosphate-translocatorprecursor
  misc_feature (1)..(248): NCBI GI NO: 18407336 NR Description: glucose-6-phosphate/ phosphate-translocatorprecursor
  misc_feature (1)..(248): NCBI GI NO: 14596173 NR Description: Similar to glucose-6-phosphate/phosphate-translocator
  misc_feature (1)..(246): NCBI GI NO: 7484980 NR Description: glucose-6-phosphate/ phosphate translocatorprecursor
  misc_feature (1)..(248): NCBI GI NO: 18423670 NR Description: glucose-6-phosphate/phosphate translocator
  misc_feature (1)..(248): NCBI GI NO: 7489258 NR Description: probable glucose-6-phosphate/phosphate-translocatorprecursor - potato
  misc_feature (1)..(248): NCBI GI NO: 27752361 NR Description: glucose-6-phosphate/phosphate translocator 2
MLFSWATRLVEAPKTDLDFWKVLFPVAVAHTIGHVAATVSMSKVAVSFTHIIKSAEPAFTVLVSKFLLGETFPVPVYLSLLPIIGGCALAAVTELNFNMVGFMGAMMSNLAFVFRNIFSKRGMKGKSVSGMNYYACLSIMSLVILTPFAIAMEGPQMWAAGWQKAVAEVGPNVVWWIAAQSVFYHLYNQVSYMSLDQISPLTFSIGNTMKRISVIVSSIIIFHTPVRPVNALGAAIAILGTFLYSQAKA

SEQ ID NO: 26686 - DNA, 1346 bp, Zea mays subsp. mays
  misc_feature (1)..(1346): Ceres Seq. ID no. 12379321
gcacgagaccattacctagaacatcctaatccaaaagttttaacccaaagtaaccgtcccgtgtttccgtttgcttcgcctggtcaccttccgtggtgcctgtggctgtgtacgcggtcgtctccatccgacccatcgatcatccaaaaactaaaccaaatcttccccatcgatcccaacttccagtcgatctcctcgctcggctgttgcctcccaaagccgcgccttacaacgagattcctcccctcctctctccaataaccctagcctcctccgccgccggcgacgaatccggcgttttgagtttctgttgccagcgtagccatgtccatgttcaataggatcttcgggaagcccaaggagcaggccaactccaatgccttggccactctggacaagttaaatgagactcttgatatgctggagaagaaagaaaaggtgctggagaaaaaagcagccgctgagctggagagagccaaggagttctcaaaagctaagaataaaagagcggctatccaatccttgaagaggaaaaaactttatgagcaacaaattgagcagcttggaaattttcagttgagaatccatgatcagatgatcatgttagaagcagctaaagctacaacagagactgttgatgcattgagaactggagctgcagctatgaaagcaatgcaaaaagcaacaaacattgatgatgtagacaagaccatggatgaaattaatgaacagactgaaaatatgaaacaaattcaggatgctttgtcagctcctctcggagcttctgctgatttcgatgaggatgaactggaagccgaacttgaagaactggagggagcagagttggaatctcagcttctggagcctgttgcagctcctccggtgcatccagtgcatgccccagccaacaagcaaccagcgcgccctgctccacagaaagctacagctgaagatgatgagcttgctgcactgcaagctgaaatggcattgtgatcaggtttccaatgaagaggtggaatgtgtatatgaatggcgttatgctaccaagatgaaagttgagtcaggatttattatatttgccatgtgtataatcttgggggatatttggcaagcagaaaaaaagctgctccaggcagtgtttgtttcagtgattttgggctctgttttccacaaacagtttaatgtcgcccggttagctctaagctaactattcaggtcaccaacgtgcattgtttgtcacagtatttttcatttacccatattgtctggagccatgtaagagtgttggaacgtataaagcctcagggtacacatttgatgtgccggtttgcagctatttcgacctc

SEQ ID NO: 26687 - protein, 222 aa, Zea mays subsp. mays
  peptide (1)..(222): Ceres Seq. ID no. 12379322
  misc_feature (22)..(203): Pfam Name: Pfam Description:  SNF7
  misc_feature (3)..(222): NCBI GI NO: 15233464 NR Description: putative protein; protein id: At4g29160
  misc_feature (5)..(222): NCBI GI NO: 21594892 NR Description: copia-like retroelement pol polyprotein
  misc_feature (3)..(222): NCBI GI NO: 15224854 NR Description: copia-like retroelement pol polyprotein
  misc_feature (1)..(218): NCBI GI NO: 28277855 NR Description: Unknown (protein for MGC:56112) [Danio rerio]
  misc_feature (1)..(217): NCBI GI NO: 28077049 NR Description: RIKEN cDNA 2010012F05 [Mus musculus]
  misc_feature (1)..(217): NCBI GI NO: 28827795 NR Description: chromosome 20 open reading frame 178
  misc_feature (1)..(212): NCBI GI NO: 28278647 NR Description: Similar to RIKEN cDNA 2010012F05 gene
  misc_feature (1)..(219): NCBI GI NO: 40548422 NR Description: Snf7 homologue associated with Alix 2
  misc_feature (1)..(219): NCBI GI NO: 13182765 NR Description: CDA04 [Homo sapiens]
  misc_feature (25)..(213): NCBI GI NO: 28828571 NR Description: hypothetical protein [Dictyostelium discoideum]
MSMFNRIFGKPKEQANSNALATLDKLNETLDMLEKKEKVLEKKAAAELERAKEFSKAKNKRAAIQSLKRKKLYEQQIEQLGNFQLRIHDQMIMLEAAKATTETVDALRTGAAAMKAMQKATNIDDVDKTMDEINEQTENMKQIQDALSAPLGASADFDEDELEAELEELEGAELESQLLEPVAAPPVHPVHAPANKQPARPAPQKATAEDDELAALQAEMAL

SEQ ID NO: 26688 - protein, 220 aa, Zea mays subsp. mays
  peptide (1)..(220): Ceres Seq. ID no. 12379323
  misc_feature (20)..(201): Pfam Name: Pfam Description:  SNF7
  misc_feature (1)..(220): NCBI GI NO: 15233464 NR Description: putative protein; protein id: At4g29160
  misc_feature (3)..(220): NCBI GI NO: 21594892 NR Description: copia-like retroelement pol polyprotein
  misc_feature (1)..(220): NCBI GI NO: 15224854 NR Description: copia-like retroelement pol polyprotein
  misc_feature (1)..(216): NCBI GI NO: 28277855 NR Description: Unknown (protein for MGC:56112) [Danio rerio]
  misc_feature (1)..(215): NCBI GI NO: 28077049 NR Description: RIKEN cDNA 2010012F05 [Mus musculus]
  misc_feature (1)..(215): NCBI GI NO: 28827795 NR Description: chromosome 20 open reading frame 178
  misc_feature (1)..(210): NCBI GI NO: 28278647 NR Description: Similar to RIKEN cDNA 2010012F05 gene
  misc_feature (1)..(217): NCBI GI NO: 40548422 NR Description: Snf7 homologue associated with Alix 2
  misc_feature (1)..(217): NCBI GI NO: 13182765 NR Description: CDA04 [Homo sapiens]
  misc_feature (23)..(211): NCBI GI NO: 28828571 NR Description: hypothetical protein [Dictyostelium discoideum]
MFNRIFGKPKEQANSNALATLDKLNETLDMLEKKEKVLEKKAAAELERAKEFSKAKNKRAAIQSLKRKKLYEQQIEQLGNFQLRIHDQMIMLEAAKATTETVDALRTGAAAMKAMQKATNIDDVDKTMDEINEQTENMKQIQDALSAPLGASADFDEDELEAELEELEGAELESQLLEPVAAPPVHPVHAPANKQPARPAPQKATAEDDELAALQAEMAL

SEQ ID NO: 26689 - protein, 191 aa, Zea mays subsp. mays
  peptide (1)..(191): Ceres Seq. ID no. 12379324
  misc_feature (1)..(172): Pfam Name: Pfam Description:  SNF7
  misc_feature (1)..(191): NCBI GI NO: 15233464 NR Description: putative protein; protein id: At4g29160
  misc_feature (1)..(191): NCBI GI NO: 21594892 NR Description: copia-like retroelement pol polyprotein
  misc_feature (1)..(191): NCBI GI NO: 15224854 NR Description: copia-like retroelement pol polyprotein
  misc_feature (1)..(187): NCBI GI NO: 28277855 NR Description: Unknown (protein for MGC:56112) [Danio rerio]
  misc_feature (1)..(186): NCBI GI NO: 28077049 NR Description: RIKEN cDNA 2010012F05 [Mus musculus]
  misc_feature (1)..(186): NCBI GI NO: 28827795 NR Description: chromosome 20 open reading frame 178
  misc_feature (1)..(181): NCBI GI NO: 28278647 NR Description: Similar to RIKEN cDNA 2010012F05 gene
  misc_feature (1)..(188): NCBI GI NO: 40548422 NR Description: Snf7 homologue associated with Alix 2
  misc_feature (1)..(188): NCBI GI NO: 13182765 NR Description: CDA04 [Homo sapiens]
  misc_feature (1)..(182): NCBI GI NO: 28828571 NR Description: hypothetical protein [Dictyostelium discoideum]
MLEKKEKVLEKKAAAELERAKEFSKAKNKRAAIQSLKRKKLYEQQIEQLGNFQLRIHDQMIMLEAAKATTETVDALRTGAAAMKAMQKATNIDDVDKTMDEINEQTENMKQIQDALSAPLGASADFDEDELEAELEELEGAELESQLLEPVAAPPVHPVHAPANKQPARPAPQKATAEDDELAALQAEMAL

SEQ ID NO: 26690 - DNA, 1321 bp, Zea mays subsp. mays
  misc_feature (1)..(1321): Ceres Seq. ID no. 12363181
tcttcctcgtcgtcggcgactgcctccttgttggtctccagcccatcctagtgttcatgtcaaaggttgatgggaagtttcagttcagtcccatcagtgttaactttctgacggaggttatgaaagtcatctttgctgtcgtcatgctcataattcagtctagaaagcaaaaggttggagaaaagccacttttggcacgttcaaccttcatacaggcagcccgtaataatgtacttctagctgttcctgctcttctatatgcaatcaacaattacctaaaattcatcatgcagttgtacttcaatcctgcaactgtgaaaatgctaagtaacctaaaggtactggttatagcttttcttctgaaatttataatgagaaggagattctcagttattcagtgggaagctcttgctctattgcttattggaatcagcatcaatcaactccgaactgtacctgtgggcaacacagcatttggtcttcctgtcactgctattgcgtacatatatacattgatttttgtaactgttccttcagtggcttctgtctacaatgaatatgccttgaaaagtcaatatgacactagcatctatctccagaacttgtttctgtacggatatggagcaatattcaacttgcttggcattcttgggactgtcctattccaagggccagagagttttaatattcttcgaggccattcaagggccacaatatttctcatatgtaacaatgctgcacaaggcattctatcttcattcttctttaagtatgcagacacaattttgaagaaatattcgtcaactgttgccacaatatttactggcctagcttctgctgcatttttggggcattccttgaccattaattttctcctgggcatatcagtggtgtttatttcaatgcaccagttcttctctccgcttgcaaaagtcaaagatgacaaaccagctgactcaatagagttggaagatacacaaaatgaccgcccatctgaatcttcttttgtaaatatgactgctggtgccgctgatgatgcaagccatcggattggaactgatgagaggcagccgctattgcctatatgaacttgtttgttgaggtaggacagaagagaggggatagaagaagaggctcctttttgccgtgtgagcaacagatttgatgtagcattgttaggcgaataaacagctattgtacactgtagaggcaaaagaaacaaataaacgtggtttccattttctttaaattttttggggataccttgggagcggcagaaatcatacattttgatagacataattcaatagggatttctagg

SEQ ID NO: 26691 - protein, 361 aa, Zea mays subsp. mays
  peptide (1)..(361): Ceres Seq. ID no. 12363182
  misc_feature (61)..(297): Pfam Name: Pfam Description:  Nucleotide-sugar transporter
  misc_feature (2)..(361): NCBI GI NO: 38345234 NR Description: OSJNBa0084K20.12
  misc_feature (1)..(360): NCBI GI NO: 26450627 NR Description: unknown protein [Arabidopsis thaliana]
  misc_feature (2)..(360): NCBI GI NO: 18411150 NR Description: transporter-like protein; protein id: At3g59360
  misc_feature (2)..(345): NCBI GI NO: 34907666 NR Description: putative transporter-like protein
  misc_feature (171)..(347): NCBI GI NO: 25408848 NR Description: hypothetical protein At2g43240
  misc_feature (1)..(99): NCBI GI NO: 25408848 NR Description: hypothetical protein At2g43240
  misc_feature (171)..(347): NCBI GI NO: 30689311 NR Description: expressed protein [Arabidopsis thaliana]
  misc_feature (1)..(58): NCBI GI NO: 30689311 NR Description: expressed protein [Arabidopsis thaliana]
  misc_feature (71)..(99): NCBI GI NO: 30689311 NR Description: expressed protein [Arabidopsis thaliana]
  misc_feature (2)..(292): NCBI GI NO: 11358902 NR Description: transporter-like protein - Arabidopsis thaliana
FLVVGDCLLVGLQPILVFMSKVDGKFQFSPISVNFLTEVMKVIFAVVMLIIQSRKQKVGEKPLLARSTFIQAARNNVLLAVPALLYAINNYLKFIMQLYFNPATVKMLSNLKVLVIAFLLKFIMRRRFSVIQWEALALLLIGISINQLRTVPVGNTAFGLPVTAIAYIYTLIFVTVPSVASVYNEYALKSQYDTSIYLQNLFLYGYGAIFNLLGILGTVLFQGPESFNILRGHSRATIFLICNNAAQGILSSFFFKYADTILKKYSSTVATIFTGLASAAFLGHSLTINFLLGISVVFISMHQFFSPLAKVKDDKPADSIELEDTQNDRPSESSFVNMTAGAADDASHRIGTDERQPLLPI

SEQ ID NO: 26692 - protein, 343 aa, Zea mays subsp. mays
  peptide (1)..(343): Ceres Seq. ID no. 12363183
  misc_feature (43)..(279): Pfam Name: Pfam Description:  Nucleotide-sugar transporter
  misc_feature (1)..(343): NCBI GI NO: 38345234 NR Description: OSJNBa0084K20.12
  misc_feature (1)..(342): NCBI GI NO: 26450627 NR Description: unknown protein [Arabidopsis thaliana]
  misc_feature (1)..(342): NCBI GI NO: 18411150 NR Description: transporter-like protein; protein id: At3g59360
  misc_feature (1)..(327): NCBI GI NO: 34907666 NR Description: putative transporter-like protein
  misc_feature (153)..(329): NCBI GI NO: 25408848 NR Description: hypothetical protein At2g43240
  misc_feature (1)..(81): NCBI GI NO: 25408848 NR Description: hypothetical protein At2g43240
  misc_feature (153)..(329): NCBI GI NO: 30689311 NR Description: expressed protein [Arabidopsis thaliana]
  misc_feature (1)..(40): NCBI GI NO: 30689311 NR Description: expressed protein [Arabidopsis thaliana]
  misc_feature (53)..(81): NCBI GI NO: 30689311 NR Description: expressed protein [Arabidopsis thaliana]
  misc_feature (1)..(274): NCBI GI NO: 11358902 NR Description: transporter-like protein - Arabidopsis thaliana
MSKVDGKFQFSPISVNFLTEVMKVIFAVVMLIIQSRKQKVGEKPLLARSTFIQAARNNVLLAVPALLYAINNYLKFIMQLYFNPATVKMLSNLKVLVIAFLLKFIMRRRFSVIQWEALALLLIGISINQLRTVPVGNTAFGLPVTAIAYIYTLIFVTVPSVASVYNEYALKSQYDTSIYLQNLFLYGYGAIFNLLGILGTVLFQGPESFNILRGHSRATIFLICNNAAQGILSSFFFKYADTILKKYSSTVATIFTGLASAAFLGHSLTINFLLGISVVFISMHQFFSPLAKVKDDKPADSIELEDTQNDRPSESSFVNMTAGAADDASHRIGTDERQPLLPI

SEQ ID NO: 26693 - protein, 322 aa, Zea mays subsp. mays
  peptide (1)..(322): Ceres Seq. ID no. 12363184
  misc_feature (22)..(258): Pfam Name: Pfam Description:  Nucleotide-sugar transporter
  misc_feature (1)..(322): NCBI GI NO: 38345234 NR Description: OSJNBa0084K20.12
  misc_feature (1)..(321): NCBI GI NO: 26450627 NR Description: unknown protein [Arabidopsis thaliana]
  misc_feature (1)..(321): NCBI GI NO: 18411150 NR Description: transporter-like protein; protein id: At3g59360
  misc_feature (1)..(306): NCBI GI NO: 34907666 NR Description: putative transporter-like protein
  misc_feature (132)..(308): NCBI GI NO: 25408848 NR Description: hypothetical protein At2g43240
  misc_feature (1)..(60): NCBI GI NO: 25408848 NR Description: hypothetical protein At2g43240
  misc_feature (132)..(308): NCBI GI NO: 30689311 NR Description: expressed protein [Arabidopsis thaliana]
  misc_feature (1)..(19): NCBI GI NO: 30689311 NR Description: expressed protein [Arabidopsis thaliana]
  misc_feature (32)..(60): NCBI GI NO: 30689311 NR Description: expressed protein [Arabidopsis thaliana]
  misc_feature (1)..(253): NCBI GI NO: 11358902 NR Description: transporter-like protein - Arabidopsis thaliana
MKVIFAVVMLIIQSRKQKVGEKPLLARSTFIQAARNNVLLAVPALLYAINNYLKFIMQLYFNPATVKMLSNLKVLVIAFLLKFIMRRRFSVIQWEALALLLIGISINQLRTVPVGNTAFGLPVTAIAYIYTLIFVTVPSVASVYNEYALKSQYDTSIYLQNLFLYGYGAIFNLLGILGTVLFQGPESFNILRGHSRATIFLICNNAAQGILSSFFFKYADTILKKYSSTVATIFTGLASAAFLGHSLTINFLLGISVVFISMHQFFSPLAKVKDDKPADSIELEDTQNDRPSESSFVNMTAGAADDASHRIGTDERQPLLPI

SEQ ID NO: 26694 - DNA, 1678 bp, Zea mays subsp. mays
  misc_feature (1)..(1678): Ceres Seq. ID no. 13498837
  misc_feature (1201)..(1201): n is a, c, t, g, unknown, or other
atctcgcaagcagcagcagagcagaaactgagggaagcgagggacggcgatggcgggtgcggaggggagagggccgagacggagccgcgtggcgttcgtgctggtggacgggatcggggacgtgagcgttccgtcgctgggcgggcgcacgccgctggacgcggcgtgcgcgccgcggctggacgcggtggcggcggccggggtgaccgggctcatggaccccgtggagccggggcttgcatgcggcagcgacacggcgcacctatccctcctcgggtacgacccacgggagtactaccgcggccgcggcgcgttcgaatccatgggtgccgggctcgccatggcgcctggcgacatcgccttcaagtcgaacttcgctacactggatgagaacactggagttatcatcagcaggagggcagatcggcactttgaagaggaaggccctatactctgtgctgcgttggatgggatgaaacttcggtcgtttcctgagtatgaagtcagagtaagatatgctaccgagcatagatgtggtgtggttgtcaaaggaccaaagctgagtgggaacatttctggaactgatcccttgaaggacaaccgcttgcatctgaaggctgaaccgttggatggctcagaagaagctaaaaacactgcagctgtggtcaatgagctttctatggagattacgcgcatactggtttctcaccccatcaacgcaaagcgtgcagctgaggggaagaacatcgcaaatgttgtgttgctgcgaggttgtggtattcggattgaggtgcctgcctttgaaaccaaacatggacttgcaccttgcatggttgctcctaccaagatcatagctggcctgggactgtcactggggattgatatccttgaagcacctggagcaactggagattatcgtactctcttaacttctaaagctaaagccatagccaaggcactctctgcccctatggatacaccacctcgtgtttttgtgcctggagaggatggatacaaggctggaaaagaaaatggatatgactttgggttcctgcacataaaggccattgatgatgctggtcatgacaaggctgtcaagttgaaagtacggggtctagaagctgttgatcgagctattggtcagcttgcgaggcttctttgggaagctgaaaaggccggacactatcagtactttctttgngtcactggagaccattctactcctgttgaatatggtgatcatagcttcgaacccgtcccgtttgcaatatgcagactgagagattatgcaggagccattggggaggataatattatgaatacacagctcgacgattttcccctcccttcggtaaaatccggagaagatttgctcgacagtatagaatcactggagcacaagcctggtcaacttaaagctttcagtggcgacagtgtgtgtgagttcaacgagatcgccgctgcgaggggctgccttggacgattcccaggaagcgagatgatgggcatcattaagaagtttatcaaggccaagaatgattaatgctggttgaaatgctaacctttagcgtaatatattggccataaggtttattatcaatgtaataaactaataatgacagaatggagcaatatggaagaaccgtcttgattggagatgaataagagataccttggc

SEQ ID NO: 26695 - protein, 497 aa, Zea mays subsp. mays
  peptide (1)..(497): Ceres Seq. ID no. 13498838
  misc_feature (312)..(423): Pfam Name: Pfam Description:  Metalloenzyme superfamily
  misc_feature (11)..(492): NCBI GI NO: 30690068 NR Description: phosphonopyruvate decarboxylase -related
  misc_feature (11)..(493): NCBI GI NO: 30681098 NR Description: expressed protein [Arabidopsis thaliana]
  misc_feature (11)..(493): NCBI GI NO: 25407505 NR Description: hypothetical protein AT4g09520
  misc_feature (12)..(302): NCBI GI NO: 28828261 NR Description: similar to Arabidopsis thaliana (Mouse-ear cress)
  misc_feature (330)..(466): NCBI GI NO: 28828261 NR Description: similar to Arabidopsis thaliana (Mouse-ear cress)
  misc_feature (458)..(492): NCBI GI NO: 28828261 NR Description: similar to Arabidopsis thaliana (Mouse-ear cress)
  misc_feature (13)..(304): NCBI GI NO: 20094629 NR Description: Predicted phosphoglycerate mutase
  misc_feature (330)..(407): NCBI GI NO: 20094629 NR Description: Predicted phosphoglycerate mutase
  misc_feature (461)..(489): NCBI GI NO: 20094629 NR Description: Predicted phosphoglycerate mutase
  misc_feature (17)..(341): NCBI GI NO: 15679586 NR Description: phosphonopyruvate decarboxylase
  misc_feature (384)..(384): Xaa is any aa, unknown or other
MAGAEGRGPRRSRVAFVLVDGIGDVSVPSLGGRTPLDAACAPRLDAVAAAGVTGLMDPVEPGLACGSDTAHLSLLGYDPREYYRGRGAFESMGAGLAMAPGDIAFKSNFATLDENTGVIISRRADRHFEEEGPILCAALDGMKLRSFPEYEVRVRYATEHRCGVVVKGPKLSGNISGTDPLKDNRLHLKAEPLDGSEEAKNTAAVVNELSMEITRILVSHPINAKRAAEGKNIANVVLLRGCGIRIEVPAFETKHGLAPCMVAPTKIIAGLGLSLGIDILEAPGATGDYRTLLTSKAKAIAKALSAPMDTPPRVFVPGEDGYKAGKENGYDFGFLHIKAIDDAGHDKAVKLKVRGLEAVDRAIGQLARLLWEAEKAGHYQYFLXVTGDHSTPVEYGDHSFEPVPFAICRLRDYAGAIGEDNIMNTQLDDFPLPSVKSGEDLLDSIESLEHKPGQLKAFSGDSVCEFNEIAAARGCLGRFPGSEMMGIIKKFIKAKND

SEQ ID NO: 26696 - protein, 442 aa, Zea mays subsp. mays
  peptide (1)..(442): Ceres Seq. ID no. 13498839
  misc_feature (257)..(368): Pfam Name: Pfam Description:  Metalloenzyme superfamily
  misc_feature (1)..(437): NCBI GI NO: 30690068 NR Description: phosphonopyruvate decarboxylase -related
  misc_feature (1)..(438): NCBI GI NO: 30681098 NR Description: expressed protein [Arabidopsis thaliana]
  misc_feature (1)..(438): NCBI GI NO: 25407505 NR Description: hypothetical protein AT4g09520
  misc_feature (1)..(247): NCBI GI NO: 28828261 NR Description: similar to Arabidopsis thaliana (Mouse-ear cress)
  misc_feature (275)..(411): NCBI GI NO: 28828261 NR Description: similar to Arabidopsis thaliana (Mouse-ear cress)
  misc_feature (403)..(437): NCBI GI NO: 28828261 NR Description: similar to Arabidopsis thaliana (Mouse-ear cress)
  misc_feature (1)..(249): NCBI GI NO: 20094629 NR Description: Predicted phosphoglycerate mutase
  misc_feature (275)..(352): NCBI GI NO: 20094629 NR Description: Predicted phosphoglycerate mutase
  misc_feature (406)..(434): NCBI GI NO: 20094629 NR Description: Predicted phosphoglycerate mutase
  misc_feature (1)..(286): NCBI GI NO: 15679586 NR Description: phosphonopyruvate decarboxylase
  misc_feature (329)..(329): Xaa is any aa, unknown or other
MDPVEPGLACGSDTAHLSLLGYDPREYYRGRGAFESMGAGLAMAPGDIAFKSNFATLDENTGVIISRRADRHFEEEGPILCAALDGMKLRSFPEYEVRVRYATEHRCGVVVKGPKLSGNISGTDPLKDNRLHLKAEPLDGSEEAKNTAAVVNELSMEITRILVSHPINAKRAAEGKNIANVVLLRGCGIRIEVPAFETKHGLAPCMVAPTKIIAGLGLSLGIDILEAPGATGDYRTLLTSKAKAIAKALSAPMDTPPRVFVPGEDGYKAGKENGYDFGFLHIKAIDDAGHDKAVKLKVRGLEAVDRAIGQLARLLWEAEKAGHYQYFLXVTGDHSTPVEYGDHSFEPVPFAICRLRDYAGAIGEDNIMNTQLDDFPLPSVKSGEDLLDSIESLEHKPGQLKAFSGDSVCEFNEIAAARGCLGRFPGSEMMGIIKKFIKAKND

SEQ ID NO: 26697 - protein, 406 aa, Zea mays subsp. mays
  peptide (1)..(406): Ceres Seq. ID no. 13498840
  misc_feature (221)..(332): Pfam Name: Pfam Description:  Metalloenzyme superfamily
  misc_feature (1)..(401): NCBI GI NO: 30690068 NR Description: phosphonopyruvate decarboxylase -related
  misc_feature (1)..(402): NCBI GI NO: 30681098 NR Description: expressed protein [Arabidopsis thaliana]
  misc_feature (1)..(402): NCBI GI NO: 25407505 NR Description: hypothetical protein AT4g09520
  misc_feature (1)..(211): NCBI GI NO: 28828261 NR Description: similar to Arabidopsis thaliana (Mouse-ear cress)
  misc_feature (239)..(375): NCBI GI NO: 28828261 NR Description: similar to Arabidopsis thaliana (Mouse-ear cress)
  misc_feature (367)..(401): NCBI GI NO: 28828261 NR Description: similar to Arabidopsis thaliana (Mouse-ear cress)
  misc_feature (1)..(213): NCBI GI NO: 20094629 NR Description: Predicted phosphoglycerate mutase
  misc_feature (239)..(316): NCBI GI NO: 20094629 NR Description: Predicted phosphoglycerate mutase
  misc_feature (370)..(398): NCBI GI NO: 20094629 NR Description: Predicted phosphoglycerate mutase
  misc_feature (1)..(250): NCBI GI NO: 15679586 NR Description: phosphonopyruvate decarboxylase
  misc_feature (293)..(293): Xaa is any aa, unknown or other
MGAGLAMAPGDIAFKSNFATLDENTGVIISRRADRHFEEEGPILCAALDGMKLRSFPEYEVRVRYATEHRCGVVVKGPKLSGNISGTDPLKDNRLHLKAEPLDGSEEAKNTAAVVNELSMEITRILVSHPINAKRAAEGKNIANVVLLRGCGIRIEVPAFETKHGLAPCMVAPTKIIAGLGLSLGIDILEAPGATGDYRTLLTSKAKAIAKALSAPMDTPPRVFVPGEDGYKAGKENGYDFGFLHIKAIDDAGHDKAVKLKVRGLEAVDRAIGQLARLLWEAEKAGHYQYFLXVTGDHSTPVEYGDHSFEPVPFAICRLRDYAGAIGEDNIMNTQLDDFPLPSVKSGEDLLDSIESLEHKPGQLKAFSGDSVCEFNEIAAARGCLGRFPGSEMMGIIKKFIKAKND

SEQ ID NO: 26698 - DNA, 1097 bp, Zea mays subsp. mays
  misc_feature (1)..(1097): Ceres Seq. ID no. 12409745
atcaacccacactccagcacacagcaatggcgttcacgcggcggcgtccgtgcggcatcctcctcctctccctgctggcggcatccggctcgctgtcgctggccgccaccggcccgggcgacgtggccgtcttctggggccggaacaaggacgagggcacgctgcgcgaaggcctgcgacacgggcacctacaccaccgtcatcatctccttcctccgcggcttcggccacggcgccgcctactactcgctcgacctctcgggccacccgctcgcgggcgtcggcgccgacgtcaagcactgccaggccaagggcatcctcgtgctcctctccatcggcgggccgcccaacaccaacaccggcgccggcgccggctactccctcccgtccgcgcgggcggcggcggacctcgccgcgtacctgtgggacgcctacctgggcggctcgcgcgcggggctgcgccgcccgttcggcgacgcggcgctggacggcgtcgacctgtacatcgaccagggcggcgccggcgtcgacggccactacgacgagctggccaggcgcctctacgcctacaacaggagctaccgcggcaggctcggggtgacgctgacggccacggtgcggtgcgcgtacccggacccgcgcgcgcaggcggcgctcgccacggggctcgtctcccgcgtccacgtccgcctgtaacggcgacctcaagtgcacctggtccgaccgggaggcgtgggagaagtgggccgcggcgtacccggccagccgcgtgttcgtcggcgtcgtggcgtcgcccgaggcggacaaggacgcctacatgttccagaaggacctctactacaacgtgctgcagttcgcccagaaggcgcccaactacggtggcctcatgatctgggataggtactacgacaagatgaaccactacatcagcagcagctaataattaagcttcccatccacatccatccacatccacccggtttatcacctaatatataatagtattattgtatttttcttcttaactttataatacactgtaatgtaataatgtgatgatctgatgatccaccaacggaataaaatggtcagcttcc

SEQ ID NO: 26699 - protein, 295 aa, Zea mays subsp. mays
  peptide (1)..(295): Ceres Seq. ID no. 12409746
  misc_feature (9)..(61): NCBI GI NO: 7451377 NR Description: chitinase (EC 3.2.1.14) III C00481 - rice
  misc_feature (9)..(62): NCBI GI NO: 7451381 NR Description: chitinase (EC 3.2.1.14) III C10150 - rice
  misc_feature (14)..(56): NCBI GI NO: 7451378 NR Description: chitinase (EC 3.2.1.14) III C10701 - rice
  misc_feature (8)..(61): NCBI GI NO: 34913272 NR Description: putative xylanase inhibitor protein
  misc_feature (14)..(61): NCBI GI NO: 20804336 NR Description: xylanase inhibitor protein I [Triticum aestivum]
  misc_feature (9)..(61): NCBI GI NO: 18693099 NR Description: putative xylanase inhibitor protein
  misc_feature (20)..(62): NCBI GI NO: 2425170 NR Description: basic class III chitinase OsChib3b
  misc_feature (20)..(56): NCBI GI NO: 34911368 NR Description: putative acidic chitinase SE2
  misc_feature (227)..(295): NCBI GI NO: 28574039 NR Description: Salivary gland secretion 1 CG3047-PA
  misc_feature (227)..(295): NCBI GI NO: 28574039 NR Description: Salivary gland secretion 1 CG3047-PA
QPTLQHTAMAFTRRRPCGILLLSLLAASGSLSLAATGPGDVAVFWGRNKDEGTLREGLRHGHLHHRHHLLPPRLRPRRRLLLARPLGPPARGRRRRRQALPGQGHPRAPLHRRAAQHQHRRRRRLLPPVRAGGGGPRRVPVGRLPGRLARGAAPPVRRRGAGRRRPVHRPGRRRRRRPLRRAGQAPLRLQQELPRQARGDADGHGAVRVPGPARAGGARHGARLPRPRPPVTATSSAPGPTGRRGRSGPRRTRPAACSSASWRRPRRTRTPTCSRRTSTTTCCSSPRRRPTTVAS

SEQ ID NO: 26700 - protein, 287 aa, Zea mays subsp. mays
  peptide (1)..(287): Ceres Seq. ID no. 12409747
  misc_feature (1)..(53): NCBI GI NO: 7451377 NR Description: chitinase (EC 3.2.1.14) III C00481 - rice
  misc_feature (1)..(54): NCBI GI NO: 7451381 NR Description: chitinase (EC 3.2.1.14) III C10150 - rice
  misc_feature (6)..(48): NCBI GI NO: 7451378 NR Description: chitinase (EC 3.2.1.14) III C10701 - rice
  misc_feature (1)..(53): NCBI GI NO: 34913272 NR Description: putative xylanase inhibitor protein
  misc_feature (6)..(53): NCBI GI NO: 20804336 NR Description: xylanase inhibitor protein I [Triticum aestivum]
  misc_feature (1)..(53): NCBI GI NO: 18693099 NR Description: putative xylanase inhibitor protein
  misc_feature (12)..(54): NCBI GI NO: 2425170 NR Description: basic class III chitinase OsChib3b
  misc_feature (12)..(48): NCBI GI NO: 34911368 NR Description: putative acidic chitinase SE2
  misc_feature (219)..(287): NCBI GI NO: 28574039 NR Description: Salivary gland secretion 1 CG3047-PA
  misc_feature (219)..(287): NCBI GI NO: 28574039 NR Description: Salivary gland secretion 1 CG3047-PA
MAFTRRRPCGILLLSLLAASGSLSLAATGPGDVAVFWGRNKDEGTLREGLRHGHLHHRHHLLPPRLRPRRRLLLARPLGPPARGRRRRRQALPGQGHPRAPLHRRAAQHQHRRRRRLLPPVRAGGGGPRRVPVGRLPGRLARGAAPPVRRRGAGRRRPVHRPGRRRRRRPLRRAGQAPLRLQQELPRQARGDADGHGAVRVPGPARAGGARHGARLPRPRPPVTATSSAPGPTGRRGRSGPRRTRPAACSSASWRRPRRTRTPTCSRRTSTTTCCSSPRRRPTTVAS

SEQ ID NO: 26701 - protein, 231 aa, Zea mays subsp. mays
  peptide (1)..(231): Ceres Seq. ID no. 12409748
  misc_feature (57)..(231): Pfam Name: Pfam Description:  Glycosyl hydrolases family 18
  misc_feature (57)..(231): NCBI GI NO: 7451377 NR Description: chitinase (EC 3.2.1.14) III C00481 - rice
  misc_feature (57)..(231): NCBI GI NO: 7451381 NR Description: chitinase (EC 3.2.1.14) III C10150 - rice
  misc_feature (57)..(230): NCBI GI NO: 7451378 NR Description: chitinase (EC 3.2.1.14) III C10701 - rice
  misc_feature (57)..(230): NCBI GI NO: 34913272 NR Description: putative xylanase inhibitor protein
  misc_feature (57)..(230): NCBI GI NO: 20804336 NR Description: xylanase inhibitor protein I [Triticum aestivum]
  misc_feature (57)..(230): NCBI GI NO: 18693099 NR Description: putative xylanase inhibitor protein
  misc_feature (29)..(231): NCBI GI NO: 4884518 NR Description: class III chitinase homologue (OsChib3H-c)
  misc_feature (56)..(231): NCBI GI NO: 2425170 NR Description: basic class III chitinase OsChib3b
  misc_feature (49)..(231): NCBI GI NO: 38346492 NR Description: OSJNBa0020I02.6
  misc_feature (48)..(231): NCBI GI NO: 7451379 NR Description: chitinase (EC 3.2.1.14) III C10122 - rice
INPHSSTQQWRSRGGVRAASSSSPCWRHPARCRWPPPARATWPSSGAGTRTRARCAKACDTGTYTTVIISFLRGFGHGAAYYSLDLSGHPLAGVGADVKHCQAKGILVLLSIGGPPNTNTGAGAGYSLPSARAAADLAAYLWDAYLGGSRAGLRRPFGDAALDGVDLYIDQGGAGVDGHYDELARRLYAYNRSYRGRLGVTLTATVRCAYPDPRAQAALATGLVSRVHVRL

SEQ ID NO: 26702 - DNA, 905 bp, Zea mays subsp. mays
  misc_feature (1)..(905): Ceres Seq. ID no. 12434941
aaatcgaaaaccactcgaacacaaactcaggcaaggcaaaaggaacccgcaccatccgaggctcaagcagggaagtgatcatcatcatcatcagaagaagatgtgcccaaccaagaaggggatgaccggagagccgagctcgccatgcagctcggcatcagcctcgaccttaccggagcaccaccagacggtgtggacgtcgccgccgaagcggccagcggggcggaccaagttccgggagacgcggcacccggtgttccgcggcgtccggcgccggggcagcgccgggcggtgggtgtgcgaggtgcgcgtgccggggaggcgcggctgcaggctctggctcggcaccttcgacacggccgaggcggcggcccgcgcgcacgacgccgccatgctcgccctcgccggcgcgggcgcctgctgcctcaacttcgccgactcggcctggctcctcgcggtcccggcctcgtgcgccagcctcgccgaggtccgccacgcggtcgcggacgccgtggaggacttcctccgccatcaggtggtcccggaggacgacgccctcgcggccacgccgtcgtcgccttccagcgaagacggcagcacctctgatggcggggagtcctcctctgattcctctccgcccacacggggcctcgccgttcgaattggatgtgttcaacgacatgagctgggacctgcactacgcgagcttggcgcagggattgctcgtggagccaccgtccgcggtcacggcgctcatggacgaaggcttcgccgatgtgccgctctggagctactagagactctgaaattttccgtttctttgcttggcctctggtgcctaattttggcagtgtaaaacggtttcttcttttggtaatgagatggaatcatggaacaagtttgcg

SEQ ID NO: 26703 - protein, 284 aa, Zea mays subsp. mays
  peptide (1)..(284): Ceres Seq. ID no. 12434942
  misc_feature (83)..(150): Pfam Name: Pfam Description:  AP2 domain
  misc_feature (34)..(211): NCBI GI NO: 22594969 NR Description: DRE-binding protein 1A [Oryza sativa]
  misc_feature (34)..(211): NCBI GI NO: 33321848 NR Description: apetala2 domain-containing CBF1-like protein
  misc_feature (34)..(211): NCBI GI NO: 33637698 NR Description: transcription factor RCBF3 [Oryza sativa]
  misc_feature (61)..(212): NCBI GI NO: 27228310 NR Description: putative DRE-binding protein 1B
  misc_feature (61)..(212): NCBI GI NO: 22594973 NR Description: putative DRE-binding protein 1B [Oryza sativa]
  misc_feature (61)..(212): NCBI GI NO: 32480955 NR Description: Dre-binding protein [Oryza sativa]
  misc_feature (40)..(217): NCBI GI NO: 12581489 NR Description: CRT/DRE-binding factor [Hordeum vulgare]
  misc_feature (40)..(217): NCBI GI NO: 12658321 NR Description: CBF3-like protein BCBF3 [Hordeum vulgare]
  misc_feature (51)..(201): NCBI GI NO: 17226801 NR Description: putative CRT/DRE-binding factor
  misc_feature (42)..(211): NCBI GI NO: 25991254 NR Description: DREB-like protein [Zea mays]
NRKPLEHKLRQGKRNPHHPRLKQGSDHHHHQKKMCPTKKGMTGEPSSPCSSASASTLPEHHQTVWTSPPKRPAGRTKFRETRHPVFRGVRRRGSAGRWVCEVRVPGRRGCRLWLGTFDTAEAAARAHDAAMLALAGAGACCLNFADSAWLLAVPASCASLAEVRHAVADAVEDFLRHQVVPEDDALAATPSSPSSEDGSTSDGGESSSDSSPPTRGLAVRIGCVQRHELGPALRELGAGIARGATVRGHGAHGRRLRRCAALELLETLKFSVSLLGLWCLILAV

SEQ ID NO: 26704 - protein, 251 aa, Zea mays subsp. mays
  peptide (1)..(251): Ceres Seq. ID no. 12434943
  misc_feature (50)..(117): Pfam Name: Pfam Description:  AP2 domain
  misc_feature (1)..(178): NCBI GI NO: 22594969 NR Description: DRE-binding protein 1A [Oryza sativa]
  misc_feature (1)..(178): NCBI GI NO: 33321848 NR Description: apetala2 domain-containing CBF1-like protein
  misc_feature (1)..(178): NCBI GI NO: 33637698 NR Description: transcription factor RCBF3 [Oryza sativa]
  misc_feature (28)..(179): NCBI GI NO: 27228310 NR Description: putative DRE-binding protein 1B
  misc_feature (28)..(179): NCBI GI NO: 22594973 NR Description: putative DRE-binding protein 1B [Oryza sativa]
  misc_feature (28)..(179): NCBI GI NO: 32480955 NR Description: Dre-binding protein [Oryza sativa]
  misc_feature (7)..(184): NCBI GI NO: 12581489 NR Description: CRT/DRE-binding factor [Hordeum vulgare]
  misc_feature (7)..(184): NCBI GI NO: 12658321 NR Description: CBF3-like protein BCBF3 [Hordeum vulgare]
  misc_feature (18)..(168): NCBI GI NO: 17226801 NR Description: putative CRT/DRE-binding factor
  misc_feature (9)..(178): NCBI GI NO: 25991254 NR Description: DREB-like protein [Zea mays]
MCPTKKGMTGEPSSPCSSASASTLPEHHQTVWTSPPKRPAGRTKFRETRHPVFRGVRRRGSAGRWVCEVRVPGRRGCRLWLGTFDTAEAAARAHDAAMLALAGAGACCLNFADSAWLLAVPASCASLAEVRHAVADAVEDFLRHQVVPEDDALAATPSSPSSEDGSTSDGGESSSDSSPPTRGLAVRIGCVQRHELGPALRELGAGIARGATVRGHGAHGRRLRRCAALELLETLKFSVSLLGLWCLILAV

SEQ ID NO: 26705 - protein, 244 aa, Zea mays subsp. mays
  peptide (1)..(244): Ceres Seq. ID no. 12434944
  misc_feature (43)..(110): Pfam Name: Pfam Description:  AP2 domain
  misc_feature (1)..(171): NCBI GI NO: 22594969 NR Description: DRE-binding protein 1A [Oryza sativa]
  misc_feature (1)..(171): NCBI GI NO: 33321848 NR Description: apetala2 domain-containing CBF1-like protein
  misc_feature (1)..(171): NCBI GI NO: 33637698 NR Description: transcription factor RCBF3 [Oryza sativa]
  misc_feature (21)..(172): NCBI GI NO: 27228310 NR Description: putative DRE-binding protein 1B
  misc_feature (21)..(172): NCBI GI NO: 22594973 NR Description: putative DRE-binding protein 1B [Oryza sativa]
  misc_feature (21)..(172): NCBI GI NO: 32480955 NR Description: Dre-binding protein [Oryza sativa]
  misc_feature (1)..(177): NCBI GI NO: 12581489 NR Description: CRT/DRE-binding factor [Hordeum vulgare]
  misc_feature (1)..(177): NCBI GI NO: 12658321 NR Description: CBF3-like protein BCBF3 [Hordeum vulgare]
  misc_feature (11)..(161): NCBI GI NO: 17226801 NR Description: putative CRT/DRE-binding factor
  misc_feature (2)..(171): NCBI GI NO: 25991254 NR Description: DREB-like protein [Zea mays]
MTGEPSSPCSSASASTLPEHHQTVWTSPPKRPAGRTKFRETRHPVFRGVRRRGSAGRWVCEVRVPGRRGCRLWLGTFDTAEAAARAHDAAMLALAGAGACCLNFADSAWLLAVPASCASLAEVRHAVADAVEDFLRHQVVPEDDALAATPSSPSSEDGSTSDGGESSSDSSPPTRGLAVRIGCVQRHELGPALRELGAGIARGATVRGHGAHGRRLRRCAALELLETLKFSVSLLGLWCLILAV

SEQ ID NO: 26706 - DNA, 1797 bp, Zea mays subsp. mays
  misc_feature (1)..(1797): Ceres Seq. ID no. 12349027
actagagggtcatggcatggggcatggatggactggtgcgtgtgatcctgatcttgccgagtgcaatcgagatccgtgccagcccgtccatactgcggtggcgtggcggtgacgtgccggcgcggcgcggcgcggcgccgataagaggtagagagaggaaaaaaaagaacaatcaattctccagaccctccccggcaaccgcgtccggccgtccgcttccgtttccttggataaccacgacgcccgccggcaagcgaaagcgaagcgagccaacccagccatggagaaggcgatcgatcggcagcgggtcctcctggcgcacctcctcccctccccctccgccgcctcctcgcagcctcaccttgcggcgtcggcgtgcgcggccggggacagcgccgcctaccagaggtcctcctccttcggggacgatgtcgtcgtcgtcgctgcctacaggacgccgatatgcaaggccaagcgaggaggcttcaaggacacctacccagaggacctcctcactgttgttctcaaggctgttctggacaacactagaatcaatccagctgacatcggtgacatcgtcgttgggacggtgctcggccctggttcccagcgtgcaaacgagtgcaggatggctgcgttgtttgctggcttccctgaaaccgtccctgttagaactgtcaaccgccagtgttcatctgggctacaggcagtagccgatgtcgcagctgctataaaggctggttactatgacatagggattggtgctggtttggaatccatgtccataaattccattgcttgggaaggacaagttaacccaaaaataagcgcattccagaaagcacaggattgtcttctgcccatgggaattacgtctgaaaatgttgcccatcgatatggtgtaaccaggcaagagcaagatcaggccgccgctgagtctcataggagagctgctgcagccacggcctctggaaaattcaaggatgagatcgtcccggtgccaacaaagatcgttgatcctaaaactggagaggagaaggaagttgtgatatcagttgatgatgggattaggccagggaccacagcatctggattggcgaaactgaaaccagtttttaaaaaggatggaactacaactgcaggcaattccagtcaagtgagtgatggtgctggagctgttcttctcatgaaaagatctgtggctctgaagaaagggctgcccattcttggtgttttcaggagctttgcggctgttggagtggatccagctgttatgggtgttggtcctgctgtggccattcctgctgctgtgaagtctgcaggccttgagattggcgacattgatctgtttgaactgaatgaggccttcgcctctcagtttgtctattgctgcaacaagttggggctggaccgttctaaagtaaatgtaaatggaggcgcgattgcccttggacaccctctgggtgcaacaggtgcccggtgtgtggctactcttctaaatgaaatgaagcgccggggcagagactgcagatttggtgttgtcaccatgtgtatcggatctggaatgggggcagcagctgtgttcgagcggggagacgcggtggatggactctccaacgtgagggacatgcaggcacataattttctgtctaaggatgcgaagtagaggcgcagaaaaaccatccatcctagagcagcataagcctgctgcatttgtaatatattcgaaatccgtatcttttttcttcacaagcactactctatatacgatgaataaaagggcgacaatacagtgtc

SEQ ID NO: 26707 - protein, 461 aa, Zea mays subsp. mays
  peptide (1)..(461): Ceres Seq. ID no. 12349028
  misc_feature (48)..(306): Pfam Name: Pfam Description:  Thiolase, N-terminal domain
  misc_feature (1)..(448): NCBI GI NO: 29367431 NR Description: 3-ketoacyl-CoA thiolase-like protein
  misc_feature (1)..(461): NCBI GI NO: 15225798 NR Description: 3-ketoacyl-CoA thiolase; protein id: At2g33150
  misc_feature (1)..(461): NCBI GI NO: 7433647 NR Description: acetyl-CoA C-acyltransferase (EC 2
  misc_feature (1)..(461): NCBI GI NO: 393707 NR Description: 3-ketoacyl-CoA thiolase
  misc_feature (1)..(461): NCBI GI NO: 7433644 NR Description: acetyl-CoA C-acyltransferase (EC 2
  misc_feature (1)..(460): NCBI GI NO: 37535022 NR Description: putative thiolase
  misc_feature (1)..(461): NCBI GI NO: 421810 NR Description: acetyl-CoA C-acyltransferase (EC 2
  misc_feature (1)..(448): NCBI GI NO: 15219797 NR Description: putative acetyl-CoA acyltransferase
  misc_feature (1)..(448): NCBI GI NO: 21537268 NR Description: putative acetyl-CoA acyltransferase
  misc_feature (1)..(425): NCBI GI NO: 1129145 NR Description: 3-ketoacyl-CoA thiolase B
MEKAIDRQRVLLAHLLPSPSAASSQPHLAASACAAGDSAAYQRSSSFGDDVVVVAAYRTPICKAKRGGFKDTYPEDLLTVVLKAVLDNTRINPADIGDIVVGTVLGPGSQRANECRMAALFAGFPETVPVRTVNRQCSSGLQAVADVAAAIKAGYYDIGIGAGLESMSINSIAWEGQVNPKISAFQKAQDCLLPMGITSENVAHRYGVTRQEQDQAAAESHRRAAAATASGKFKDEIVPVPTKIVDPKTGEEKEVVISVDDGIRPGTTASGLAKLKPVFKKDGTTTAGNSSQVSDGAGAVLLMKRSVALKKGLPILGVFRSFAAVGVDPAVMGVGPAVAIPAAVKSAGLEIGDIDLFELNEAFASQFVYCCNKLGLDRSKVNVNGGAIALGHPLGATGARCVATLLNEMKRRGRDCRFGVVTMCIGSGMGAAAVFERGDAVDGLSNVRDMQAHNFLSKDAK

SEQ ID NO: 26708 - protein, 345 aa, Zea mays subsp. mays
  peptide (1)..(345): Ceres Seq. ID no. 12349029
  misc_feature (1)..(190): Pfam Name: Pfam Description:  Thiolase, N-terminal domain
  misc_feature (1)..(332): NCBI GI NO: 29367431 NR Description: 3-ketoacyl-CoA thiolase-like protein
  misc_feature (1)..(345): NCBI GI NO: 15225798 NR Description: 3-ketoacyl-CoA thiolase; protein id: At2g33150
  misc_feature (1)..(345): NCBI GI NO: 7433647 NR Description: acetyl-CoA C-acyltransferase (EC 2
  misc_feature (1)..(345): NCBI GI NO: 393707 NR Description: 3-ketoacyl-CoA thiolase
  misc_feature (1)..(345): NCBI GI NO: 7433644 NR Description: acetyl-CoA C-acyltransferase (EC 2
  misc_feature (1)..(344): NCBI GI NO: 37535022 NR Description: putative thiolase
  misc_feature (1)..(345): NCBI GI NO: 421810 NR Description: acetyl-CoA C-acyltransferase (EC 2
  misc_feature (1)..(332): NCBI GI NO: 15219797 NR Description: putative acetyl-CoA acyltransferase
  misc_feature (1)..(332): NCBI GI NO: 21537268 NR Description: putative acetyl-CoA acyltransferase
  misc_feature (1)..(309): NCBI GI NO: 1129145 NR Description: 3-ketoacyl-CoA thiolase B
MAALFAGFPETVPVRTVNRQCSSGLQAVADVAAAIKAGYYDIGIGAGLESMSINSIAWEGQVNPKISAFQKAQDCLLPMGITSENVAHRYGVTRQEQDQAAAESHRRAAAATASGKFKDEIVPVPTKIVDPKTGEEKEVVISVDDGIRPGTTASGLAKLKPVFKKDGTTTAGNSSQVSDGAGAVLLMKRSVALKKGLPILGVFRSFAAVGVDPAVMGVGPAVAIPAAVKSAGLEIGDIDLFELNEAFASQFVYCCNKLGLDRSKVNVNGGAIALGHPLGATGARCVATLLNEMKRRGRDCRFGVVTMCIGSGMGAAAVFERGDAVDGLSNVRDMQAHNFLSKDAK

SEQ ID NO: 26709 - protein, 295 aa, Zea mays subsp. mays
  peptide (1)..(295): Ceres Seq. ID no. 12349030
  misc_feature (1)..(140): Pfam Name: Pfam Description:  Thiolase, N-terminal domain
  misc_feature (1)..(282): NCBI GI NO: 29367431 NR Description: 3-ketoacyl-CoA thiolase-like protein
  misc_feature (1)..(295): NCBI GI NO: 15225798 NR Description: 3-ketoacyl-CoA thiolase; protein id: At2g33150
  misc_feature (1)..(295): NCBI GI NO: 7433647 NR Description: acetyl-CoA C-acyltransferase (EC 2
  misc_feature (1)..(295): NCBI GI NO: 393707 NR Description: 3-ketoacyl-CoA thiolase
  misc_feature (1)..(295): NCBI GI NO: 7433644 NR Description: acetyl-CoA C-acyltransferase (EC 2
  misc_feature (1)..(294): NCBI GI NO: 37535022 NR Description: putative thiolase
  misc_feature (1)..(295): NCBI GI NO: 421810 NR Description: acetyl-CoA C-acyltransferase (EC 2
  misc_feature (1)..(282): NCBI GI NO: 15219797 NR Description: putative acetyl-CoA acyltransferase
  misc_feature (1)..(282): NCBI GI NO: 21537268 NR Description: putative acetyl-CoA acyltransferase
  misc_feature (1)..(259): NCBI GI NO: 1129145 NR Description: 3-ketoacyl-CoA thiolase B
MSINSIAWEGQVNPKISAFQKAQDCLLPMGITSENVAHRYGVTRQEQDQAAAESHRRAAAATASGKFKDEIVPVPTKIVDPKTGEEKEVVISVDDGIRPGTTASGLAKLKPVFKKDGTTTAGNSSQVSDGAGAVLLMKRSVALKKGLPILGVFRSFAAVGVDPAVMGVGPAVAIPAAVKSAGLEIGDIDLFELNEAFASQFVYCCNKLGLDRSKVNVNGGAIALGHPLGATGARCVATLLNEMKRRGRDCRFGVVTMCIGSGMGAAAVFERGDAVDGLSNVRDMQAHNFLSKDAK

SEQ ID NO: 26710 - DNA, 1269 bp, Zea mays subsp. mays
  misc_feature (1)..(1269): Ceres Seq. ID no. 12406782
accattccgattcggcgatttgattcccagccttccccctgctctgcccacctcccatttcccgcccctctttcctactacaataaaaatatccaaaattcccgaacagagtcacccccgcttctcagaaacccaattcccgttcccgatcctcacctcaaccccgcgccgccccctccccaccaccctcgccatggtcagcgccgccgcctcgccgccgccgtccgggaagccgacgcaggacgagctgaagcgcttggcggcgcaccgcgcggtggagctcgtggagccctgcatgacgctgggcctgggcacgggctccacggcggcgcacgcgctggaccgcctgggcgacctcctccgcgcgggcgcgctgccgggggtgtccggcgtgccgacctcgctcaagacggaggcgcacgcggcgcgcgtcggcatcccgctgctcccgctcgacgccgccagcatcgcgctgtccatcgacggcgccgacgaggtcgacccggacctcaacctcgtcaagggccgcggcggctcgctgctccgcgagaagatggtcgagggcgccggcgcccgcttcgccgtcatcgtcgacgagtccaagctcgtgccgcgcctcggctgcaccggcgccgtccccgtcgaggtcgtcccgttcggcgcgccccacacgctgggcctcatccgcggcctcttccacggcctgcccggcttccacgccaggctcaggaccaccaccgtccccgagggggagcaaggctccgagcagcagcccttcgtcaccgacaacggcaactacatcgtcgagatgttcttcgacggcggcatccgcggcgacctgcgcgacatcagcgaccgcctgctccgcataaccggcgtcgtcgagcacggcatgttcctgggcatggccaccgtcgccattgtcgccaagaaggacggcacggtcgcagtcatggaaaggaagtagttagtctacaattcatcgaagcagccatcgcctgctccccatcaacagcgtgttcctctacgtggccatcatcaccaccgtcgccaacggcgacgacaataagtaataattctgcatgtagcctgtgtctgtgcaatatccagctactcttatctaaagttggagctgttgtcgtgtccgtgcgtcatcctcccatactatactgagtgtctgctgattactatggagtatgttaatcatcatcatcatccttatgttatcatcacaaaccttgttatcagtgattctcacgctattttact

SEQ ID NO: 26711 - protein, 390 aa, Zea mays subsp. mays
  peptide (1)..(390): Ceres Seq. ID no. 12406783
  misc_feature (122)..(321): Pfam Name: Pfam Description:  HlyD family secretion protein
  misc_feature (43)..(357): NCBI GI NO: 29247944 NR Description: GLP_26_54603_52153 [Giardia lamblia ATCC 50803]
  misc_feature (3)..(362): NCBI GI NO: 6649242 NR Description: splicing coactivator subunit SRm300 [Homo sapiens]
  misc_feature (65)..(339): NCBI GI NO: 29247944 NR Description: GLP_26_54603_52153 [Giardia lamblia ATCC 50803]
TIPIRRFDSQPSPCSAHLPFPAPLSYYNKNIQNSRTESPPLLRNPIPVPDPHLNPAPPPPHHPRHGQRRRLAAAVREADAGRAEALGGAPRGGARGALHDAGPGHGLHGGARAGPPGRPPPRGRAAGGVRRADLAQDGGARGARRHPAAPARRRQHRAVHRRRRRGRPGPQPRQGPRRLAAPREDGRGRRRPLRRHRRRVQARAAPRLHRRRPRRGRPVRRAPHAGPHPRPLPRPARLPRQAQDHHRPRGGARLRAAALRHRQRQLHRRDVLRRRHPRRPARHQRPPAPHNRRRRARHVPGHGHRRHCRQEGRHGRSHGKEVVSLQFIEAAIACSPSTACSSTWPSSPPSPTATTISNNSACSLCLCNIQLLLSKVGAVVVSVRHPPILY

SEQ ID NO: 26712 - protein, 321 aa, Zea mays subsp. mays
  peptide (1)..(321): Ceres Seq. ID no. 12406784
  misc_feature (128)..(313): Pfam Name: phosphoriboisomerase A Pfam Description: Ribose 5-phosphate isomerase A
  misc_feature (58)..(321): NCBI GI NO: 38347196 NR Description: OSJNBa0023J03.8
  misc_feature (58)..(320): NCBI GI NO: 21592672 NR Description: putative ribose 5-phosphate isomerase
  misc_feature (58)..(320): NCBI GI NO: 15223936 NR Description: putative ribose 5-phosphate isomerase
  misc_feature (58)..(320): NCBI GI NO: 13430836 NR Description: putative ribose 5-phosphate isomerase
  misc_feature (62)..(313): NCBI GI NO: 15226223 NR Description: putative ribose 5-phosphate isomerase
  misc_feature (57)..(313): NCBI GI NO: 18654317 NR Description: ribose-5-phosphate isomerase [Spinacia oleracea]
  misc_feature (63)..(313): NCBI GI NO: 34393835 NR Description: putative ribose-5-phosphate isomerase
  misc_feature (67)..(313): NCBI GI NO: 34393836 NR Description: putative ribose-5-phosphate isomerase
  misc_feature (79)..(320): NCBI GI NO: 15229349 NR Description: putative ribose 5-phosphate isomerase
  misc_feature (79)..(320): NCBI GI NO: 21594002 NR Description: putative ribose 5-phosphate isomerase
PFRFGDLIPSLPPALPTSHFPPLFPTTIKISKIPEQSHPRFSETQFPFPILTSTPRRPLPTTLAMVSAAASPPPSGKPTQDELKRLAAHRAVELVEPCMTLGLGTGSTAAHALDRLGDLLRAGALPGVSGVPTSLKTEAHAARVGIPLLPLDAASIALSIDGADEVDPDLNLVKGRGGSLLREKMVEGAGARFAVIVDESKLVPRLGCTGAVPVEVVPFGAPHTLGLIRGLFHGLPGFHARLRTTTVPEGEQGSEQQPFVTDNGNYIVEMFFDGGIRGDLRDISDRLLRITGVVEHGMFLGMATVAIVAKKDGTVAVMERK

SEQ ID NO: 26713 - protein, 257 aa, Zea mays subsp. mays
  peptide (1)..(257): Ceres Seq. ID no. 12406785
  misc_feature (64)..(249): Pfam Name: phosphoriboisomerase A Pfam Description: Ribose 5-phosphate isomerase A
  misc_feature (1)..(257): NCBI GI NO: 38347196 NR Description: OSJNBa0023J03.8
  misc_feature (1)..(256): NCBI GI NO: 21592672 NR Description: putative ribose 5-phosphate isomerase
  misc_feature (1)..(256): NCBI GI NO: 15223936 NR Description: putative ribose 5-phosphate isomerase
  misc_feature (1)..(256): NCBI GI NO: 13430836 NR Description: putative ribose 5-phosphate isomerase
  misc_feature (1)..(249): NCBI GI NO: 15226223 NR Description: putative ribose 5-phosphate isomerase
  misc_feature (1)..(249): NCBI GI NO: 18654317 NR Description: ribose-5-phosphate isomerase [Spinacia oleracea]
  misc_feature (1)..(249): NCBI GI NO: 34393835 NR Description: putative ribose-5-phosphate isomerase
  misc_feature (3)..(249): NCBI GI NO: 34393836 NR Description: putative ribose-5-phosphate isomerase
  misc_feature (15)..(256): NCBI GI NO: 15229349 NR Description: putative ribose 5-phosphate isomerase
  misc_feature (15)..(256): NCBI GI NO: 21594002 NR Description: putative ribose 5-phosphate isomerase
MVSAAASPPPSGKPTQDELKRLAAHRAVELVEPCMTLGLGTGSTAAHALDRLGDLLRAGALPGVSGVPTSLKTEAHAARVGIPLLPLDAASIALSIDGADEVDPDLNLVKGRGGSLLREKMVEGAGARFAVIVDESKLVPRLGCTGAVPVEVVPFGAPHTLGLIRGLFHGLPGFHARLRTTTVPEGEQGSEQQPFVTDNGNYIVEMFFDGGIRGDLRDISDRLLRITGVVEHGMFLGMATVAIVAKKDGTVAVMERK

SEQ ID NO: 26714 - DNA, 1482 bp, Zea mays subsp. mays
  misc_feature (1)..(1482): Ceres Seq. ID no. 12409738
cccaatccaagcatccattcctgaattcctccctggccagcggcgccgccaccgccatgaaccgcgttcacagcgaggctgccgctgctgcgaaggagcagcgcaagaacgacaagagggagaagaggaagaagcacaaggatgccaaggaggatgactgcggcgcctcgatggccgaggaagaagcacccaaagagaagaagcagaagcagaagcagaggaaggataaggacgagcgggaggagaagaaaaagctgaagccgacggttagcatagccgttgccggctccatcattgacaacgcccagtccctcgagctcgccaccctcctggctggtcagatcgctcgcgccgccaccgtctttcgcatagacgaggtcgtcgtctttgacagtactcccgcggcggagaacggcagcgccggtgatggtgaagagagcggcgcgcggttccttgttcggattttggagtatctggaaactccacagtacctccgccgccgcctctttccgatgcacaagaacctgaagtttgtgggactgcttccaccgctcgatgcaccacaccatgtgcgcaagcacgaatggtccgagtttcgtgaaggtgtaacattggaaagtgatccctcaaaggggactcttgttgatgtcggattaagtaagaatgttctggttgaacaaaaactagaaccaggcaaaagagttactgtagccatgggaacaaaccgtgacctaacgacagcttgcataaggaaagtcgtccccccttcgacacccagggaacagatgggatcttattggggctacaaagtccgttatacttcaaatttaagtggtgttttcaaaaattccccattcaaggaagaatacgaccacatcattggcacctcagagcatggacaaatagttaattcttccgagcttaccttacctacttttaggcacctactgattgcatttggtggacttgctggtttggaagaaagcattgaagaagatacaaacttgaagggtaaacgtgcagatgatgtattcacatcttatttcaatacatgccccaaccaagggagcagaacaataagaacagaggaggcacttctcatttcccttcaatacttccaagatcccattaggcgagcggaacagaaattgtagaagggaatacagaaaactgcaaatctagccatggccaacaagttccagttgtaatagtggagttttctcactgagtatcttgacccttcatgtatgcgttggtgtcattggagccaagaggttgtgagccatcgaggacattttgacacaaccatttcagtttagaaaatttgatgcggagctgacttcagtggaagagtgttagcttgccatttcagtgtatccaattgttgtccactgtagtctatatcggtgtttcatacctttgaccctgtactagaacgacacggaggatcactgttaacaccagagcgtcatgcatgccttg

SEQ ID NO: 26715 - protein, 383 aa, Zea mays subsp. mays
  peptide (1)..(383): Ceres Seq. ID no. 12409739
  misc_feature (88)..(373): Pfam Name: Pfam Description:  Uncharacterized ACR, COG2106
  misc_feature (52)..(362): NCBI GI NO: 38346841 NR Description: OSJNBa0091C12.1
  misc_feature (98)..(383): NCBI GI NO: 15239710 NR Description: putative protein; protein id: At5g19300.1
  misc_feature (33)..(108): NCBI GI NO: 15239710 NR Description: putative protein; protein id: At5g19300.1
  misc_feature (12)..(379): NCBI GI NO: 34783965 NR Description: Unknown (protein for IMAGE:6142267) [Homo sapiens]
  misc_feature (35)..(379): NCBI GI NO: 7512808 NR Description: hypothetical protein DKFZp566D143
  misc_feature (35)..(379): NCBI GI NO: 38679912 NR Description: hypothetical protein HSPC109 [Homo sapiens]
  misc_feature (35)..(379): NCBI GI NO: 39794258 NR Description: Unknown (protein for MGC:75017) [Homo sapiens]
  misc_feature (59)..(373): NCBI GI NO: 27369948 NR Description: DNA segment
  misc_feature (32)..(377): NCBI GI NO: 21428350 NR Description: GM02932p [Drosophila melanogaster]
  misc_feature (32)..(377): NCBI GI NO: 20129839 NR Description: CG12128-PA [Drosophila melanogaster]
QSKHPFLNSSLASGAATAMNRVHSEAAAAAKEQRKNDKREKRKKHKDAKEDDCGASMAEEEAPKEKKQKQKQRKDKDEREEKKKLKPTVSIAVAGSIIDNAQSLELATLLAGQIARAATVFRIDEVVVFDSTPAAENGSAGDGEESGARFLVRILEYLETPQYLRRRLFPMHKNLKFVGLLPPLDAPHHVRKHEWSEFREGVTLESDPSKGTLVDVGLSKNVLVEQKLEPGKRVTVAMGTNRDLTTACIRKVVPPSTPREQMGSYWGYKVRYTSNLSGVFKNSPFKEEYDHIIGTSEHGQIVNSSELTLPTFRHLLIAFGGLAGLEESIEEDTNLKGKRADDVFTSYFNTCPNQGSRTIRTEEALLISLQYFQDPIRRAEQKL

SEQ ID NO: 26716 - protein, 365 aa, Zea mays subsp. mays
  peptide (1)..(365): Ceres Seq. ID no. 12409740
  misc_feature (70)..(355): Pfam Name: Pfam Description:  Uncharacterized ACR, COG2106
  misc_feature (34)..(344): NCBI GI NO: 38346841 NR Description: OSJNBa0091C12.1
  misc_feature (80)..(365): NCBI GI NO: 15239710 NR Description: putative protein; protein id: At5g19300.1
  misc_feature (15)..(90): NCBI GI NO: 15239710 NR Description: putative protein; protein id: At5g19300.1
  misc_feature (1)..(361): NCBI GI NO: 34783965 NR Description: Unknown (protein for IMAGE:6142267) [Homo sapiens]
  misc_feature (17)..(361): NCBI GI NO: 7512808 NR Description: hypothetical protein DKFZp566D143
  misc_feature (17)..(361): NCBI GI NO: 38679912 NR Description: hypothetical protein HSPC109 [Homo sapiens]
  misc_feature (17)..(361): NCBI GI NO: 39794258 NR Description: Unknown (protein for MGC:75017) [Homo sapiens]
  misc_feature (41)..(355): NCBI GI NO: 27369948 NR Description: DNA segment
  misc_feature (14)..(359): NCBI GI NO: 21428350 NR Description: GM02932p [Drosophila melanogaster]
  misc_feature (14)..(359): NCBI GI NO: 20129839 NR Description: CG12128-PA [Drosophila melanogaster]
MNRVHSEAAAAAKEQRKNDKREKRKKHKDAKEDDCGASMAEEEAPKEKKQKQKQRKDKDEREEKKKLKPTVSIAVAGSIIDNAQSLELATLLAGQIARAATVFRIDEVVVFDSTPAAENGSAGDGEESGARFLVRILEYLETPQYLRRRLFPMHKNLKFVGLLPPLDAPHHVRKHEWSEFREGVTLESDPSKGTLVDVGLSKNVLVEQKLEPGKRVTVAMGTNRDLTTACIRKVVPPSTPREQMGSYWGYKVRYTSNLSGVFKNSPFKEEYDHIIGTSEHGQIVNSSELTLPTFRHLLIAFGGLAGLEESIEEDTNLKGKRADDVFTSYFNTCPNQGSRTIRTEEALLISLQYFQDPIRRAEQKL

SEQ ID NO: 26717 - protein, 327 aa, Zea mays subsp. mays
  peptide (1)..(327): Ceres Seq. ID no. 12409741
  misc_feature (32)..(317): Pfam Name: Pfam Description:  Uncharacterized ACR, COG2106
  misc_feature (1)..(306): NCBI GI NO: 38346841 NR Description: OSJNBa0091C12.1
  misc_feature (42)..(327): NCBI GI NO: 15239710 NR Description: putative protein; protein id: At5g19300.1
  misc_feature (1)..(52): NCBI GI NO: 15239710 NR Description: putative protein; protein id: At5g19300.1
  misc_feature (1)..(323): NCBI GI NO: 34783965 NR Description: Unknown (protein for IMAGE:6142267) [Homo sapiens]
  misc_feature (1)..(323): NCBI GI NO: 7512808 NR Description: hypothetical protein DKFZp566D143
  misc_feature (1)..(323): NCBI GI NO: 38679912 NR Description: hypothetical protein HSPC109 [Homo sapiens]
  misc_feature (1)..(323): NCBI GI NO: 39794258 NR Description: Unknown (protein for MGC:75017) [Homo sapiens]
  misc_feature (3)..(317): NCBI GI NO: 27369948 NR Description: DNA segment
  misc_feature (1)..(321): NCBI GI NO: 21428350 NR Description: GM02932p [Drosophila melanogaster]
  misc_feature (1)..(321): NCBI GI NO: 20129839 NR Description: CG12128-PA [Drosophila melanogaster]
MAEEEAPKEKKQKQKQRKDKDEREEKKKLKPTVSIAVAGSIIDNAQSLELATLLAGQIARAATVFRIDEVVVFDSTPAAENGSAGDGEESGARFLVRILEYLETPQYLRRRLFPMHKNLKFVGLLPPLDAPHHVRKHEWSEFREGVTLESDPSKGTLVDVGLSKNVLVEQKLEPGKRVTVAMGTNRDLTTACIRKVVPPSTPREQMGSYWGYKVRYTSNLSGVFKNSPFKEEYDHIIGTSEHGQIVNSSELTLPTFRHLLIAFGGLAGLEESIEEDTNLKGKRADDVFTSYFNTCPNQGSRTIRTEEALLISLQYFQDPIRRAEQKL

SEQ ID NO: 26718 - DNA, 1426 bp, Zea mays subsp. mays
  misc_feature (1)..(1426): Ceres Seq. ID no. 12358815
aagacatcagcctctgttatcctggcccacacatcagcctccctggagtaagcgtggtagttgccactgccgtcccctccagaagtgcgatacagttcggattcagatcgcggccggtgcgaacccacgaaggcacgaacggtagaacccgaccgagcgcggcagcgcaaacctccgatccctgctgcgagcaagggatggcggcggcatgggcagtgctggcggcggtcctcgtcgcggcgcaggtggcgtctgcggcgccggtcacggcgccagcgttcctctgggcgcctaagaactacggattccgctctgatgatgctaaggaggtagtccattatcaaacaatctcaccaaagaacttagctaaatctgttcttgaggaaggtggctggtcaacctttatgtgttcaagggaggatactgagaagcatgttgatgttgccattgtttttattggctcaaagctacaatcatcagacatatcgaaagataagcaagttgatccagctttagcagatacattgaagctctccttcacagaatcagagttttctatggcattcccctacgtttccacatcagacgatgagaaactggaggagtcattgctatcaggcttcactgagaactgtaaaagtggttttggaagaaaccgtatcacctacacagacacgtgcgccgtgagtggccaagatctgaagacgtatcacaacatggatgctatcaatgacttggtagtgtcaggaagaaccaacccgagtggacagactgatgtaatcgtcttctgcagcggcgggttcgagaagttaggcaccacggaatcggaaggggagctgctttcccagcttgtcgacttgctgaagctgtctggggctagacacacgattctctacgcttcccagccatctggttatctactggagaacccttccggctcgccagtggctaggcaccttgcggagaggactaacggtacaaaaactggcctactgagcaaatgtgacggagagtgcctagtcaaatcaactcttcttgaaggaacctttgtcggaatagtgctccttatcatcttgatatcagggctcatgtgtatgatgggaatcgatactccctccaagtttgaagctccccaggagtcttgatctcccttcgaagcagaacccttgttttgttggtctgcactgtggatagatattattcagtttccccctttgaaagcgcctttcgtataattattattatttttttactgagccatctgttatttacgatgtgctcaaacttttgacaccaaacgaatgcatgtgtgtgaggcttgtgctgtgaccagacatagcattgcctccaggtgttttctgtgaataacctggaatttcaggtgggtactgtgcatcaaataaaaaagatgaaatcttgctgttgc

SEQ ID NO: 26719 - protein, 380 aa, Zea mays subsp. mays
  peptide (1)..(380): Ceres Seq. ID no. 12358816
  misc_feature (67)..(380): NCBI GI NO: 24417230 NR Description: unknown [Arabidopsis thaliana]
  misc_feature (67)..(380): NCBI GI NO: 30682651 NR Description: expressed protein [Arabidopsis thaliana]
  misc_feature (179)..(380): NCBI GI NO: 21618303 NR Description: unknown [Arabidopsis thaliana]
  misc_feature (116)..(184): NCBI GI NO: 25405838 NR Description: hypothetical protein T5A14.4
DISLCYPGPHISLPGVSVVVATAVPSRSAIQFGFRSRPVRTHEGTNGRTRPSAAAQTSDPCCEQGMAAAWAVLAAVLVAAQVASAAPVTAPAFLWAPKNYGFRSDDAKEVVHYQTISPKNLAKSVLEEGGWSTFMCSREDTEKHVDVAIVFIGSKLQSSDISKDKQVDPALADTLKLSFTESEFSMAFPYVSTSDDEKLEESLLSGFTENCKSGFGRNRITYTDTCAVSGQDLKTYHNMDAINDLVVSGRTNPSGQTDVIVFCSGGFEKLGTTESEGELLSQLVDLLKLSGARHTILYASQPSGYLLENPSGSPVARHLAERTNGTKTGLLSKCDGECLVKSTLLEGTFVGIVLLIILISGLMCMMGIDTPSKFEAPQES

SEQ ID NO: 26720 - protein, 315 aa, Zea mays subsp. mays
  peptide (1)..(315): Ceres Seq. ID no. 12358817
  misc_feature (2)..(315): NCBI GI NO: 24417230 NR Description: unknown [Arabidopsis thaliana]
  misc_feature (2)..(315): NCBI GI NO: 30682651 NR Description: expressed protein [Arabidopsis thaliana]
  misc_feature (114)..(315): NCBI GI NO: 21618303 NR Description: unknown [Arabidopsis thaliana]
  misc_feature (51)..(119): NCBI GI NO: 25405838 NR Description: hypothetical protein T5A14.4
MAAAWAVLAAVLVAAQVASAAPVTAPAFLWAPKNYGFRSDDAKEVVHYQTISPKNLAKSVLEEGGWSTFMCSREDTEKHVDVAIVFIGSKLQSSDISKDKQVDPALADTLKLSFTESEFSMAFPYVSTSDDEKLEESLLSGFTENCKSGFGRNRITYTDTCAVSGQDLKTYHNMDAINDLVVSGRTNPSGQTDVIVFCSGGFEKLGTTESEGELLSQLVDLLKLSGARHTILYASQPSGYLLENPSGSPVARHLAERTNGTKTGLLSKCDGECLVKSTLLEGTFVGIVLLIILISGLMCMMGIDTPSKFEAPQES

SEQ ID NO: 26721 - protein, 246 aa, Zea mays subsp. mays
  peptide (1)..(246): Ceres Seq. ID no. 12358818
  misc_feature (1)..(246): NCBI GI NO: 24417230 NR Description: unknown [Arabidopsis thaliana]
  misc_feature (1)..(246): NCBI GI NO: 30682651 NR Description: expressed protein [Arabidopsis thaliana]
  misc_feature (45)..(246): NCBI GI NO: 21618303 NR Description: unknown [Arabidopsis thaliana]
  misc_feature (1)..(50): NCBI GI NO: 25405838 NR Description: hypothetical protein T5A14.4
MCSREDTEKHVDVAIVFIGSKLQSSDISKDKQVDPALADTLKLSFTESEFSMAFPYVSTSDDEKLEESLLSGFTENCKSGFGRNRITYTDTCAVSGQDLKTYHNMDAINDLVVSGRTNPSGQTDVIVFCSGGFEKLGTTESEGELLSQLVDLLKLSGARHTILYASQPSGYLLENPSGSPVARHLAERTNGTKTGLLSKCDGECLVKSTLLEGTFVGIVLLIILISGLMCMMGIDTPSKFEAPQES

SEQ ID NO: 26722 - DNA, 1323 bp, Zea mays subsp. mays
  misc_feature (1)..(1323): Ceres Seq. ID no. 12406959
ctcccgcggcctcggctgcaccgctctgcatactctccggtgaatcgctcccagtcccaagtccggatcgcaccgccaagcgttcagccatgagctccgctgcagccgccgccaatgtcgccgtcatcggaggcggaatatccggctccgtgtgcgcgtcgctcctcgccgcgcggggcgtggccgtgacgctcttcgactccggccgcggcgccggcggccgcatggcgcagcggagggaggtgatggaggatggctcggagctgcggttcgaccacggtgcgccctacttcaccgtcaccaacggcgaggttgcccgggtcgttggtgggtgggaggcgcgggggatcgtcgccgagtggaaggcaacgttcgcgtgcttcgatctggccaccggaaaatttacggacttcgagaaggagggaacagctaaaaagtatgtgggagtgccagccatgaactcgatatgcaaatcactctgtctagaggatggtgtggtggccaaatttggtgtcactgtgggcaagatggattggcttcaagatcggagttcgtggtcactagctagcctggatgggaaagatctaggctattttgattatgttgtggcgacagataagaacatagcgtcaccagcattttctgggttgactggaagaccgccacctcttgatttgtcgtcatttccacgcctgcctacagcacttcaagatatcccagttcgtccatgttttgctcttatggtagcattctcggagccattggctacggtacctgttcatggtttctctttcaacaattccaattctctgagctgggccttctgtaacagcagtaagccagggcgtgcttgcgtgcctcctaacagacaatcttgggtgctgcattcgacaactgagtacgcttccaaggtaataaataatattggtccacgcaaaccttcggcggaggcgcttgctaaggtggcagaggaattgttcagagaattccaggcgactggattaagcattccacggccaatttttatgaaagctcacagatggggtgctgctttcccagccattgcaattagtggagatgataagtgcgtttgggacaagagcacgaacttggcgatttgtggagatttctgtacaagcccaagtgtcgaaggagcagtccttagtgctacgagaggggtttccaaaatccttgaatgtttaaggtgcccctcaagtatctaacgttattgttaccatccccagggcccccctctctgtgattggttgtatttatgcctgcattctcttacacaaataaacaattcaagccttatttggaggc

SEQ ID NO: 26723 - protein, 406 aa, Zea mays subsp. mays
  peptide (1)..(406): Ceres Seq. ID no. 12406960
  misc_feature (2)..(303): NCBI GI NO: 34897122 NR Description: hypothetical protein [Oryza sativa]
  misc_feature (25)..(402): NCBI GI NO: 22330276 NR Description: hypothetical protein; protein id: At1g56000
  misc_feature (25)..(402): NCBI GI NO: 25404082 NR Description: hypothetical protein T6H22.20
  misc_feature (25)..(223): NCBI GI NO: 8778316 NR Description: F14J16.31 [Arabidopsis thaliana]
  misc_feature (224)..(402): NCBI GI NO: 8778316 NR Description: F14J16.31 [Arabidopsis thaliana]
  misc_feature (25)..(347): NCBI GI NO: 15222815 NR Description: hypothetical protein; protein id: At1g55980.1
  misc_feature (25)..(223): NCBI GI NO: 8778321 NR Description: F14J16.28 [Arabidopsis thaliana]
  misc_feature (224)..(347): NCBI GI NO: 8778321 NR Description: F14J16.28 [Arabidopsis thaliana]
  misc_feature (44)..(347): NCBI GI NO: 25404080 NR Description: hypothetical protein T6H22.21
  misc_feature (38)..(401): NCBI GI NO: 18396966 NR Description: expressed protein; protein id: At3g04650
PAASAAPLCILSGESLPVPSPDRTAKRSAMSSAAAAANVAVIGGGISGSVCASLLAARGVAVTLFDSGRGAGGRMAQRREVMEDGSELRFDHGAPYFTVTNGEVARVVGGWEARGIVAEWKATFACFDLATGKFTDFEKEGTAKKYVGVPAMNSICKSLCLEDGVVAKFGVTVGKMDWLQDRSSWSLASLDGKDLGYFDYVVATDKNIASPAFSGLTGRPPPLDLSSFPRLPTALQDIPVRPCFALMVAFSEPLATVPVHGFSFNNSNSLSWAFCNSSKPGRACVPPNRQSWVLHSTTEYASKVINNIGPRKPSAEALAKVAEELFREFQATGLSIPRPIFMKAHRWGAAFPAIAISGDDKCVWDKSTNLAICGDFCTSPSVEGAVLSATRGVSKILECLRCPSSI

SEQ ID NO: 26724 - protein, 377 aa, Zea mays subsp. mays
  peptide (1)..(377): Ceres Seq. ID no. 12406961
  misc_feature (1)..(274): NCBI GI NO: 34897122 NR Description: hypothetical protein [Oryza sativa]
  misc_feature (1)..(373): NCBI GI NO: 22330276 NR Description: hypothetical protein; protein id: At1g56000
  misc_feature (1)..(373): NCBI GI NO: 25404082 NR Description: hypothetical protein T6H22.20
  misc_feature (1)..(194): NCBI GI NO: 8778316 NR Description: F14J16.31 [Arabidopsis thaliana]
  misc_feature (195)..(373): NCBI GI NO: 8778316 NR Description: F14J16.31 [Arabidopsis thaliana]
  misc_feature (1)..(318): NCBI GI NO: 15222815 NR Description: hypothetical protein; protein id: At1g55980.1
  misc_feature (1)..(194): NCBI GI NO: 8778321 NR Description: F14J16.28 [Arabidopsis thaliana]
  misc_feature (195)..(318): NCBI GI NO: 8778321 NR Description: F14J16.28 [Arabidopsis thaliana]
  misc_feature (15)..(318): NCBI GI NO: 25404080 NR Description: hypothetical protein T6H22.21
  misc_feature (9)..(372): NCBI GI NO: 18396966 NR Description: expressed protein; protein id: At3g04650
MSSAAAAANVAVIGGGISGSVCASLLAARGVAVTLFDSGRGAGGRMAQRREVMEDGSELRFDHGAPYFTVTNGEVARVVGGWEARGIVAEWKATFACFDLATGKFTDFEKEGTAKKYVGVPAMNSICKSLCLEDGVVAKFGVTVGKMDWLQDRSSWSLASLDGKDLGYFDYVVATDKNIASPAFSGLTGRPPPLDLSSFPRLPTALQDIPVRPCFALMVAFSEPLATVPVHGFSFNNSNSLSWAFCNSSKPGRACVPPNRQSWVLHSTTEYASKVINNIGPRKPSAEALAKVAEELFREFQATGLSIPRPIFMKAHRWGAAFPAIAISGDDKCVWDKSTNLAICGDFCTSPSVEGAVLSATRGVSKILECLRCPSSI

SEQ ID NO: 26725 - protein, 332 aa, Zea mays subsp. mays
  peptide (1)..(332): Ceres Seq. ID no. 12406962
  misc_feature (1)..(229): NCBI GI NO: 34897122 NR Description: hypothetical protein [Oryza sativa]
  misc_feature (1)..(328): NCBI GI NO: 22330276 NR Description: hypothetical protein; protein id: At1g56000
  misc_feature (1)..(328): NCBI GI NO: 25404082 NR Description: hypothetical protein T6H22.20
  misc_feature (1)..(149): NCBI GI NO: 8778316 NR Description: F14J16.31 [Arabidopsis thaliana]
  misc_feature (150)..(328): NCBI GI NO: 8778316 NR Description: F14J16.31 [Arabidopsis thaliana]
  misc_feature (1)..(273): NCBI GI NO: 15222815 NR Description: hypothetical protein; protein id: At1g55980.1
  misc_feature (1)..(149): NCBI GI NO: 8778321 NR Description: F14J16.28 [Arabidopsis thaliana]
  misc_feature (150)..(273): NCBI GI NO: 8778321 NR Description: F14J16.28 [Arabidopsis thaliana]
  misc_feature (1)..(273): NCBI GI NO: 25404080 NR Description: hypothetical protein T6H22.21
  misc_feature (1)..(327): NCBI GI NO: 18396966 NR Description: expressed protein; protein id: At3g04650
MAQRREVMEDGSELRFDHGAPYFTVTNGEVARVVGGWEARGIVAEWKATFACFDLATGKFTDFEKEGTAKKYVGVPAMNSICKSLCLEDGVVAKFGVTVGKMDWLQDRSSWSLASLDGKDLGYFDYVVATDKNIASPAFSGLTGRPPPLDLSSFPRLPTALQDIPVRPCFALMVAFSEPLATVPVHGFSFNNSNSLSWAFCNSSKPGRACVPPNRQSWVLHSTTEYASKVINNIGPRKPSAEALAKVAEELFREFQATGLSIPRPIFMKAHRWGAAFPAIAISGDDKCVWDKSTNLAICGDFCTSPSVEGAVLSATRGVSKILECLRCPSSI

SEQ ID NO: 26726 - DNA, 1624 bp, Zea mays subsp. mays
  misc_feature (1)..(1624): Ceres Seq. ID no. 12407075
aaaaaatttccccatctccgacctcccccttcctctccccctgccgctccccgcgccgagaaggagaaccccagccgccgcgcagcgcgccgcccatggcctcctcgtcggagaacgcggctgtgccgccggaggaggagccccaggccccgccgccgccggacacagagcctaccgaggcggcgcccggcgaggcggaggatgagccgcaaaccctagagcgggcgcaggagctcttcgacaggggttccaaggccatcgaggatgaggacttcgtcgacgccgtagactgtctcagccgagcgctcgagatcagggcttcacattatggagatctcgcaccggagtgtgccagcacatacttcaaatatgcatgtgccctgctatacaaagctcaggaggagagtgatgttttgggaaatgttcccaagagcttgccaaatgaagactcagtgaagagtacagctactaaagatgacagtggaacctcaaaggtctctggtaccgatgcggaggatgctgcgtcatcagaaaaagttgatgctgaagaaggtcacaactcaaatggcaaaaatcaggagaatgggaatggtgaagttgagaaagatgatgacgacgtcgacgatgatgagaagatgggagatgaagaggataatgatttggatctttcttggaaaatgttggacattgctagggcaatagttgagaagagccaagataacactatggagaaagtaaaaatatattctgctcttgctgaagtggcaacggaaagagaggacatggacaactcactcagtgactatatgaaagctttatccatgttggagcatttggttgagcctgaccatcgtcgagttgtggaattaaacttccgcatttgtttggtttatgaactagtttccaagatcggagaagcaatttcatactgtgcaaaagcaatttcgctatgcaagtcacgcatacagagcctgaaaagttccaaggatgctttgttggctggtatagatggtgatgcatctgctgctgaagctgaaggaggctcagaaaaatctgccattgaaaaagagctagagcagcttactagcatattgcctgatcttgagaagaagcttgaggacctgtctgaagcaaacccaagcgctgacatggatgagatggtgaaggcaatcgtgtccagggtaactgatgtgatgccaaaagctgcatcttttacttcttcccagatggcaacctcaagcaatggattcgactcctcggttatgtctacggcagcgacaaccggaagctctggaagcaccgtgactgaccttggggttgtaggcagaggcgtcaaacgagctagcatcaagccgatctctgctgaacctgctgctaagaaacctgcacttgattcaccatctcaacaaggtgacagcagcatcaactctgaggttgttcctgcaacgcagactggagacgagtcagtatctaagtaaattacaatttcattagccctactgtaatgttaacttgctggaacatattagctgctatgtaaacgcttaagaagggactgctggggccatagactcatcgtgagctgaccattgaaatgttaaattgctgagatcatcatggcggt

SEQ ID NO: 26727 - protein, 491 aa, Zea mays subsp. mays
  peptide (1)..(491): Ceres Seq. ID no. 12407076
  misc_feature (75)..(108): Pfam Name: Pfam Description:  TPR Domain
  misc_feature (32)..(491): NCBI GI NO: 38175649 NR Description: tetratricopeptide repeat-containing protein-like
  misc_feature (140)..(491): NCBI GI NO: 32352192 NR Description: hypothetical protein
  misc_feature (54)..(432): NCBI GI NO: 18419996 NR Description: putative protein; protein id: At4g37210.1
  misc_feature (54)..(375): NCBI GI NO: 25407799 NR Description: hypothetical protein AT4g37210
  misc_feature (61)..(330): NCBI GI NO: 4104353 NR Description: nuclear autoantigenic sperm protein autosomalvariant
  misc_feature (59)..(136): NCBI GI NO: 18129310 NR Description: hypothetical protein [Pinus pinaster]
  misc_feature (52)..(482): NCBI GI NO: 123127 NR Description: HISTONE-BINDING PROTEIN N1/N2
  misc_feature (32)..(330): NCBI GI NO: 13435642 NR Description: Unknown (protein for MGC:5829) [Mus musculus]
  misc_feature (61)..(330): NCBI GI NO: 27262630 NR Description: nuclear autoantigenic sperm protein isoform 3
  misc_feature (61)..(330): NCBI GI NO: 30584691 NR Description: Homo sapiens nuclear autoantigenic sperm protein
KISPSPTSPFLSPCRSPRREGEPQPPRSAPPMASSSENAAVPPEEEPQAPPPPDTEPTEAAPGEAEDEPQTLERAQELFDRGSKAIEDEDFVDAVDCLSRALEIRASHYGDLAPECASTYFKYACALLYKAQEESDVLGNVPKSLPNEDSVKSTATKDDSGTSKVSGTDAEDAASSEKVDAEEGHNSNGKNQENGNGEVEKDDDDVDDDEKMGDEEDNDLDLSWKMLDIARAIVEKSQDNTMEKVKIYSALAEVATEREDMDNSLSDYMKALSMLEHLVEPDHRRVVELNFRICLVYELVSKIGEAISYCAKAISLCKSRIQSLKSSKDALLAGIDGDASAAEAEGGSEKSAIEKELEQLTSILPDLEKKLEDLSEANPSADMDEMVKAIVSRVTDVMPKAASFTSSQMATSSNGFDSSVMSTAATTGSSGSTVTDLGVVGRGVKRASIKPISAEPAAKKPALDSPSQQGDSSINSEVVPATQTGDESVSK

SEQ ID NO: 26728 - protein, 460 aa, Zea mays subsp. mays
  peptide (1)..(460): Ceres Seq. ID no. 12407077
  misc_feature (44)..(77): Pfam Name: Pfam Description:  TPR Domain
  misc_feature (1)..(460): NCBI GI NO: 38175649 NR Description: tetratricopeptide repeat-containing protein-like
  misc_feature (109)..(460): NCBI GI NO: 32352192 NR Description: hypothetical protein
  misc_feature (23)..(401): NCBI GI NO: 18419996 NR Description: putative protein; protein id: At4g37210.1
  misc_feature (23)..(344): NCBI GI NO: 25407799 NR Description: hypothetical protein AT4g37210
  misc_feature (30)..(299): NCBI GI NO: 4104353 NR Description: nuclear autoantigenic sperm protein autosomalvariant
  misc_feature (28)..(105): NCBI GI NO: 18129310 NR Description: hypothetical protein [Pinus pinaster]
  misc_feature (21)..(451): NCBI GI NO: 123127 NR Description: HISTONE-BINDING PROTEIN N1/N2
  misc_feature (1)..(299): NCBI GI NO: 13435642 NR Description: Unknown (protein for MGC:5829) [Mus musculus]
  misc_feature (30)..(299): NCBI GI NO: 27262630 NR Description: nuclear autoantigenic sperm protein isoform 3
  misc_feature (30)..(299): NCBI GI NO: 30584691 NR Description: Homo sapiens nuclear autoantigenic sperm protein
MASSSENAAVPPEEEPQAPPPPDTEPTEAAPGEAEDEPQTLERAQELFDRGSKAIEDEDFVDAVDCLSRALEIRASHYGDLAPECASTYFKYACALLYKAQEESDVLGNVPKSLPNEDSVKSTATKDDSGTSKVSGTDAEDAASSEKVDAEEGHNSNGKNQENGNGEVEKDDDDVDDDEKMGDEEDNDLDLSWKMLDIARAIVEKSQDNTMEKVKIYSALAEVATEREDMDNSLSDYMKALSMLEHLVEPDHRRVVELNFRICLVYELVSKIGEAISYCAKAISLCKSRIQSLKSSKDALLAGIDGDASAAEAEGGSEKSAIEKELEQLTSILPDLEKKLEDLSEANPSADMDEMVKAIVSRVTDVMPKAASFTSSQMATSSNGFDSSVMSTAATTGSSGSTVTDLGVVGRGVKRASIKPISAEPAAKKPALDSPSQQGDSSINSEVVPATQTGDESVSK

SEQ ID NO: 26729 - protein, 280 aa, Zea mays subsp. mays; identical to SEQ ID NO: 24336
  peptide (1)..(280): Ceres Seq. ID no. 12407078
  misc_feature (1)..(280): NCBI GI NO: 38175649 NR Description: tetratricopeptide repeat-containing protein-like
  misc_feature (1)..(280): NCBI GI NO: 32352192 NR Description: hypothetical protein
  misc_feature (1)..(221): NCBI GI NO: 18419996 NR Description: putative protein; protein id: At4g37210.1
  misc_feature (1)..(164): NCBI GI NO: 25407799 NR Description: hypothetical protein AT4g37210
  misc_feature (1)..(119): NCBI GI NO: 4104353 NR Description: nuclear autoantigenic sperm protein autosomalvariant
  misc_feature (1)..(271): NCBI GI NO: 123127 NR Description: HISTONE-BINDING PROTEIN N1/N2
  misc_feature (1)..(119): NCBI GI NO: 13435642 NR Description: Unknown (protein for MGC:5829) [Mus musculus]
  misc_feature (1)..(119): NCBI GI NO: 27262630 NR Description: nuclear autoantigenic sperm protein isoform 3
  misc_feature (1)..(119): NCBI GI NO: 30584691 NR Description: Homo sapiens nuclear autoantigenic sperm protein
  misc_feature (1)..(268): NCBI GI NO: 28277791 NR Description: Unknown (protein for MGC:56007) [Danio rerio]

SEQ ID NO: 26730 - DNA, 1249 bp, Zea mays subsp. mays
  misc_feature (1)..(1249): Ceres Seq. ID no. 12343376
aaccccagcgtagcggagccggcagccaagcagaaaaatacgagtatcgcacgcgcaaggcgattccgtccccattctccacccaatagggagctagagctacgagagggggaaacggggggacgggaataggcgtcgtcggccatgtcgtcgtcgtggaactcggtgggtctggcgatcctgtaccaggtgctgggctgggtcgccttcgccgcgtggtccttcagcttctacccgcaggtcctcctcaactacaagcgcaagagtgttgtgggcctgaatttcgattttctggtgttgaacttgacaaagcactcgtcctacctcatatacaatgctgctctcttcttcagcccattcattcagcaacagtatcatgacaaatatggtgacaaagagatgattccagttgctgcaaatgatgttgctttttcactgcatgctgtagcattgacagcctttaccgtttttcaagtattcatatatgagcgaggaacacagaaagtctccaaagtttgcatatcaatttctgctattgtctggatcgcggctcttgtttgcctcattattgcttggccaaaaagtgactggctttggcttattgatgtattcaattcaatacaagttggcatgacagcaatcaagtacatccctcaggccatcatgaacttcaggcggaagagcacaattggttggagcgttggcaatatattacttgatctcacaggaggggtgctgaatttttgtcagatgggtgtgcagtctatagatcaacatactttggtgaatttctatggaaacattgggaaaacccttctttcattggagacggttttctttgatgtcctgttcattatccaacactacgtgttgtaccctgtcaagaaggacgagaatggtaaggcaatcatttctgaaagggtagccccccttatcaggccttcggacaagcctgaagaagataacgtatgatctagctgtagttatattgcgcacattgcattcacgcgctgtttgcacacaggccacacacgcatgcgaattatttgttcaaaaggaattgctagcgcgtcttgattatattgctacttataacttttactacttggtgcactggcgagagatgtctcatataccaggttgcgggtttcaagtggccccgtttttattatcgtgatttgtgaaggttattagatatcatctcggccaacatttacgatcaatgctcatgtaaatatttggttgcatt

SEQ ID NO: 26731 - protein, 275 aa, Zea mays subsp. mays
  peptide (1)..(275): Ceres Seq. ID no. 12343377
  misc_feature (10)..(76): Pfam Name: Pfam Description:  PQ loop repeat
  misc_feature (3)..(267): NCBI GI NO: 15237468 NR Description: putative protein; protein id: At5g40670
  misc_feature (3)..(267): NCBI GI NO: 21553944 NR Description: unknown [Arabidopsis thaliana]
  misc_feature (6)..(244): NCBI GI NO: 31208055 NR Description: ENSANGP00000020402 [Anopheles gambiae]
  misc_feature (7)..(275): NCBI GI NO: 23273064 NR Description: cystinosis, nephropathic [Homo sapiens]
  misc_feature (10)..(247): NCBI GI NO: 34872731 NR Description: similar to cystinosin [Rattus norvegicus]
  misc_feature (10)..(247): NCBI GI NO: 13752577 NR Description: cystinosis, nephropathic [Mus musculus]
  misc_feature (7)..(244): NCBI GI NO: 4826682 NR Description: cystinosis, nephropathic; Cystinosis
  misc_feature (1)..(244): NCBI GI NO: 31208053 NR Description: ENSANGP00000020331 [Anopheles gambiae]
  misc_feature (10)..(245): NCBI GI NO: 17532373 NR Description: Cystinosis nephropathic (45.4 kD)
  misc_feature (10)..(245): NCBI GI NO: 32565006 NR Description: Cystinosin/ERS1p repeat (42.2 kD) (2I426)
MSSSWNSVGLAILYQVLGWVAFAAWSFSFYPQVLLNYKRKSVVGLNFDFLVLNLTKHSSYLIYNAALFFSPFIQQQYHDKYGDKEMIPVAANDVAFSLHAVALTAFTVFQVFIYERGTQKVSKVCISISAIVWIAALVCLIIAWPKSDWLWLIDVFNSIQVGMTAIKYIPQAIMNFRRKSTIGWSVGNILLDLTGGVLNFCQMGVQSIDQHTLVNFYGNIGKTLLSLETVFFDVLFIIQHYVLYPVKKDENGKAIISERVAPLIRPSDKPEEDNV

SEQ ID NO: 26732 - protein, 190 aa, Zea mays subsp. mays
  peptide (1)..(190): Ceres Seq. ID no. 12343378
  misc_feature (1)..(182): NCBI GI NO: 15237468 NR Description: putative protein; protein id: At5g40670
  misc_feature (1)..(182): NCBI GI NO: 21553944 NR Description: unknown [Arabidopsis thaliana]
  misc_feature (1)..(159): NCBI GI NO: 31208055 NR Description: ENSANGP00000020402 [Anopheles gambiae]
  misc_feature (1)..(190): NCBI GI NO: 23273064 NR Description: cystinosis, nephropathic [Homo sapiens]
  misc_feature (1)..(162): NCBI GI NO: 34872731 NR Description: similar to cystinosin [Rattus norvegicus]
  misc_feature (1)..(162): NCBI GI NO: 13752577 NR Description: cystinosis, nephropathic [Mus musculus]
  misc_feature (1)..(159): NCBI GI NO: 4826682 NR Description: cystinosis, nephropathic; Cystinosis
  misc_feature (1)..(159): NCBI GI NO: 31208053 NR Description: ENSANGP00000020331 [Anopheles gambiae]
  misc_feature (1)..(160): NCBI GI NO: 17532373 NR Description: Cystinosis nephropathic (45.4 kD)
  misc_feature (1)..(160): NCBI GI NO: 32565006 NR Description: Cystinosin/ERS1p repeat (42.2 kD) (2I426)
MIPVAANDVAFSLHAVALTAFTVFQVFIYERGTQKVSKVCISISAIVWIAALVCLIIAWPKSDWLWLIDVFNSIQVGMTAIKYIPQAIMNFRRKSTIGWSVGNILLDLTGGVLNFCQMGVQSIDQHTLVNFYGNIGKTLLSLETVFFDVLFIIQHYVLYPVKKDENGKAIISERVAPLIRPSDKPEEDNV

SEQ ID NO: 26733 - DNA, 1567 bp, Zea mays subsp. mays
  misc_feature (1)..(1567): Ceres Seq. ID no. 12373692
accagttccgcagaataaacgagcgtgcaagcgctgctgggctggtgtcagtcacctgagcaaggaagagagatggccacgctgcctcgcgagggcgccgcggcggcggactccgaccagcttttggtagaagcacatggctctacacgaacgctgattttgaataggccaaagcagctcaatgcactctcctctgaaatgattaaaggtctcctatggtatttcacagcttttgagaaagatgatggagtcagattgttgattatgaaggggaatagaagagtattttgctctggaggtgatattgctcaatgtgcccggtgtttatataatggaaactggaaatgggtcgatgatttcttccaaaatgaatatttgctaaattacatcattgcgacttacataaaacctcaggtttccattcttagtggaattgtcatgggtggaggagctggtgtttcaatacatggaagatttcgagttgccactgataacacgatttttgcaatgccagaaacagctctaggcctctttccagatgtaggggcctcttattttctatctcggctaccagggttctatggagaatatgttggtctaactggtgccagattggatggtgcggaaatgcttgcctgtggcctggcaactcattttgtcccgtcaaagaggttgccattgcttgaggaatcgcttaaaaagctggacacgtccagtacttttgctgtgtcgggtattatcgaccagttttcacagaggccattagtgaaagatagcagctctttaaataggatggaaaccatcaacaaatgcttctccaaaaggacagttgaagaaatcatagatgctcttgaacaagaaatctcaaatgtttcagacaaatgggttgctgcaacaatcaagtccctgaaaaaggcttcccccaccagcctaaaaatttctctgagatcgataagagaagggagaacacaaactcttggggagtgcctgcgtcgggaatatagagtggtttgccatgtcctgcgtggcaccttcagccgagacttgtctgagggatttagggctgtgctactagaaaaagacaacaagccagagtggattcctccaaggttggaacaagttcctgacgaggcagttgagcaatatttcttgagaattgatgatccccagtgcaagatctgaacctgcctgcgagacttccccaccgaagaaatattgagtccaagatttgattgaggtcttggacgaagagtgagcctcggtcaggataactcgtcaactcatgtttgaagttgtgtgcggaatgttgacgacgattgataaataataaacgcggactgaatatatgtcttataagttcacatttatcgctaaataatttttgttgcttttgtgtgaagttgtacctgttagccttgttcggttacagggatgaaattctaccatagatataattcgggtctagattggatgaatcgatacctcacccaatcatatggtaagattaaatccatcatttaatacatacacctcccaaaactagttattcttttcatttatggattcc

SEQ ID NO: 26734 - protein, 369 aa, Zea mays subsp. mays
  peptide (1)..(369): Ceres Seq. ID no. 12373693
  misc_feature (26)..(197): Pfam Name: Pfam Description:  Enoyl-CoA hydratase/isomerase family
  misc_feature (12)..(363): NCBI GI NO: 15239206 NR Description: 3-hydroxyisobutyryl-coenzyme A hydrolase
  misc_feature (12)..(366): NCBI GI NO: 15224549 NR Description: 3-hydroxyisobutyryl-coenzyme A hydrolase
  misc_feature (43)..(364): NCBI GI NO: 6014701 NR Description: enoyl-CoA-hydratase [Avicennia marina]
  misc_feature (16)..(366): NCBI GI NO: 15224539 NR Description: 3-hydroxyisobutyryl-coenzyme A hydrolase
  misc_feature (1)..(369): NCBI GI NO: 22329062 NR Description: enoyl-CoA hydratase - like protein
  misc_feature (9)..(359): NCBI GI NO: 37536724 NR Description: putative enoyl-CoA-hydratase
  misc_feature (113)..(369): NCBI GI NO: 2688820 NR Description: enoyl-CoA hydratase [Prunus armeniaca]
  misc_feature (13)..(369): NCBI GI NO: 30679729 NR Description: 3-hydroxyisobutyryl-coenzyme A hydrolase
  misc_feature (1)..(369): NCBI GI NO: 7484947 NR Description: enoyl-CoA hydratase homolog F11C18
  misc_feature (13)..(368): NCBI GI NO: 22122625 NR Description: RIKEN cDNA 2610509I15 [Mus musculus]
MATLPREGAAAADSDQLLVEAHGSTRTLILNRPKQLNALSSEMIKGLLWYFTAFEKDDGVRLLIMKGNRRVFCSGGDIAQCARCLYNGNWKWVDDFFQNEYLLNYIIATYIKPQVSILSGIVMGGGAGVSIHGRFRVATDNTIFAMPETALGLFPDVGASYFLSRLPGFYGEYVGLTGARLDGAEMLACGLATHFVPSKRLPLLEESLKKLDTSSTFAVSGIIDQFSQRPLVKDSSSLNRMETINKCFSKRTVEEIIDALEQEISNVSDKWVAATIKSLKKASPTSLKISLRSIREGRTQTLGECLRREYRVVCHVLRGTFSRDLSEGFRAVLLEKDNKPEWIPPRLEQVPDEAVEQYFLRIDDPQCKI

SEQ ID NO: 26735 - protein, 327 aa, Zea mays subsp. mays
  peptide (1)..(327): Ceres Seq. ID no. 12373694
  misc_feature (1)..(155): Pfam Name: Pfam Description:  Enoyl-CoA hydratase/isomerase family
  misc_feature (1)..(321): NCBI GI NO: 15239206 NR Description: 3-hydroxyisobutyryl-coenzyme A hydrolase
  misc_feature (1)..(324): NCBI GI NO: 15224549 NR Description: 3-hydroxyisobutyryl-coenzyme A hydrolase
  misc_feature (1)..(322): NCBI GI NO: 6014701 NR Description: enoyl-CoA-hydratase [Avicennia marina]
  misc_feature (1)..(324): NCBI GI NO: 15224539 NR Description: 3-hydroxyisobutyryl-coenzyme A hydrolase
  misc_feature (1)..(327): NCBI GI NO: 22329062 NR Description: enoyl-CoA hydratase - like protein
  misc_feature (1)..(317): NCBI GI NO: 37536724 NR Description: putative enoyl-CoA-hydratase
  misc_feature (71)..(327): NCBI GI NO: 2688820 NR Description: enoyl-CoA hydratase [Prunus armeniaca]
  misc_feature (1)..(327): NCBI GI NO: 30679729 NR Description: 3-hydroxyisobutyryl-coenzyme A hydrolase
  misc_feature (1)..(327): NCBI GI NO: 7484947 NR Description: enoyl-CoA hydratase homolog F11C18
  misc_feature (1)..(326): NCBI GI NO: 22122625 NR Description: RIKEN cDNA 2610509I15 [Mus musculus]
MIKGLLWYFTAFEKDDGVRLLIMKGNRRVFCSGGDIAQCARCLYNGNWKWVDDFFQNEYLLNYIIATYIKPQVSILSGIVMGGGAGVSIHGRFRVATDNTIFAMPETALGLFPDVGASYFLSRLPGFYGEYVGLTGARLDGAEMLACGLATHFVPSKRLPLLEESLKKLDTSSTFAVSGIIDQFSQRPLVKDSSSLNRMETINKCFSKRTVEEIIDALEQEISNVSDKWVAATIKSLKKASPTSLKISLRSIREGRTQTLGECLRREYRVVCHVLRGTFSRDLSEGFRAVLLEKDNKPEWIPPRLEQVPDEAVEQYFLRIDDPQCKI

SEQ ID NO: 26736 - protein, 305 aa, Zea mays subsp. mays
  peptide (1)..(305): Ceres Seq. ID no. 12373695
  misc_feature (1)..(133): Pfam Name: Pfam Description:  Enoyl-CoA hydratase/isomerase family
  misc_feature (1)..(299): NCBI GI NO: 15239206 NR Description: 3-hydroxyisobutyryl-coenzyme A hydrolase
  misc_feature (1)..(302): NCBI GI NO: 15224549 NR Description: 3-hydroxyisobutyryl-coenzyme A hydrolase
  misc_feature (1)..(300): NCBI GI NO: 6014701 NR Description: enoyl-CoA-hydratase [Avicennia marina]
  misc_feature (1)..(302): NCBI GI NO: 15224539 NR Description: 3-hydroxyisobutyryl-coenzyme A hydrolase
  misc_feature (1)..(305): NCBI GI NO: 22329062 NR Description: enoyl-CoA hydratase - like protein
  misc_feature (1)..(295): NCBI GI NO: 37536724 NR Description: putative enoyl-CoA-hydratase
  misc_feature (49)..(305): NCBI GI NO: 2688820 NR Description: enoyl-CoA hydratase [Prunus armeniaca]
  misc_feature (1)..(305): NCBI GI NO: 30679729 NR Description: 3-hydroxyisobutyryl-coenzyme A hydrolase
  misc_feature (1)..(305): NCBI GI NO: 7484947 NR Description: enoyl-CoA hydratase homolog F11C18
  misc_feature (1)..(304): NCBI GI NO: 22122625 NR Description: RIKEN cDNA 2610509I15 [Mus musculus]
MKGNRRVFCSGGDIAQCARCLYNGNWKWVDDFFQNEYLLNYIIATYIKPQVSILSGIVMGGGAGVSIHGRFRVATDNTIFAMPETALGLFPDVGASYFLSRLPGFYGEYVGLTGARLDGAEMLACGLATHFVPSKRLPLLEESLKKLDTSSTFAVSGIIDQFSQRPLVKDSSSLNRMETINKCFSKRTVEEIIDALEQEISNVSDKWVAATIKSLKKASPTSLKISLRSIREGRTQTLGECLRREYRVVCHVLRGTFSRDLSEGFRAVLLEKDNKPEWIPPRLEQVPDEAVEQYFLRIDDPQCKI

SEQ ID NO: 26737 - DNA, 1317 bp, Zea mays subsp. mays
  misc_feature (1)..(1317): Ceres Seq. ID no. 12349036
aatttttcctcacgtattatcctcttgcttgttcgtccggttcttcgccctcgccgcgcgggactaccaatccaaactggcgacgaccctgctgccaccccacagcagatttgaggagcggacgcccgtttaaatggctattggagtcccatccatggagctccaccgctcctcaccgttgctctcgggtggccgaggaggaaatacatgcctacagaagaagcccttctttgtccaagcaaagagactagtggggatggagaaagcaagtacgaggccaggaacacaagagtctggacagacaaagaaaagagcacccctggttcgtggaactgttagcccacctcttccagtaccaggaaacatacctcggcctccttatgtcggcacagaatatgtaccagagatagcaaaagagatacaaatgcatgacaaagagggcattgtccacatgagagctgcttgcgagctcgcggctcgtgttcttgactatgcaggaacgttagtgaaaccctctgtaacaacagacgaaattgataaagcagtgcacaagatgatcatcgatgctggagcctatccatcaccacttggatatggtgggtttccaaaaagtgtatgcacctcagtgaatgagtgcatgtgccatggaattcctgattcacgcgagctacaggatggagacataattaacattgatgtcactgtctacttgaatggttatcatggggatacctcaaaaacatttctttgtggagaagtcgatgaagccagtaaacgacttgtgaaggttactgaagagtgcttgctcaggggcatatcaacatgcaaacatggtaccagctttaagaagattggcagaagaataagtgagcatgctgagaggaacggttttggtgttgtggagtgttttgttgggcatggagtcggcagggtatttcactcagaaccaattatctatcaccagaggaacaacagaccgggccagatgattgaagggcagactttcacaatagagccgatcatatcgatggggagcatcgagtgcgacatgtgggacgacggctggactgccgtgacgacggacggcagcttggcggcgcagttcgagcacaccatactgatcaccaggaccggagccgagatcctcaccaagtgctaggaggaaaggaaatcgcatgtgcccgatagccgacggtaggtaatctgtattcgtgaggtggtgaggatgcttgaggtgacctattttgtctcgcaaaatgggcgtgctacagaatagtgaagaaaagggttgagagattgcaaatggcaggtttggcc

SEQ ID NO: 26738 - protein, 341 aa, Zea mays subsp. mays
  peptide (1)..(341): Ceres Seq. ID no. 12349037
  misc_feature (8)..(341): NCBI GI NO: 38345794 NR Description: OSJNBa0085I10.11
  misc_feature (13)..(341): NCBI GI NO: 15222218 NR Description: methionine aminopeptidase I
  misc_feature (3)..(341): NCBI GI NO: 11320956 NR Description: methionine aminopeptidase-like protein
  misc_feature (14)..(340): NCBI GI NO: 34394646 NR Description: putative methionine aminopeptidase I (MAP1)
  misc_feature (52)..(339): NCBI GI NO: 7939560 NR Description: methionine aminopeptidase-like protein
  misc_feature (59)..(341): NCBI GI NO: 18419957 NR Description: methionyl aminopeptidase-like protein
  misc_feature (59)..(341): NCBI GI NO: 25289731 NR Description: methionyl aminopeptidase-like protein
  misc_feature (52)..(339): NCBI GI NO: 15230872 NR Description: methionine aminopeptidase, putative
  misc_feature (52)..(339): NCBI GI NO: 11320958 NR Description: methionine aminopeptidase-like protein
  misc_feature (62)..(339): NCBI GI NO: 23018702 NR Description: hypothetical protein [Thermobifida fusca]
MAIGVPSMELHRSSPLLSGGRGGNTCLQKKPFFVQAKRLVGMEKASTRPGTQESGQTKKRAPLVRGTVSPPLPVPGNIPRPPYVGTEYVPEIAKEIQMHDKEGIVHMRAACELAARVLDYAGTLVKPSVTTDEIDKAVHKMIIDAGAYPSPLGYGGFPKSVCTSVNECMCHGIPDSRELQDGDIINIDVTVYLNGYHGDTSKTFLCGEVDEASKRLVKVTEECLLRGISTCKHGTSFKKIGRRISEHAERNGFGVVECFVGHGVGRVFHSEPIIYHQRNNRPGQMIEGQTFTIEPIISMGSIECDMWDDGWTAVTTDGSLAAQFEHTILITRTGAEILTKC

SEQ ID NO: 26739 - protein, 334 aa, Zea mays subsp. mays
  peptide (1)..(334): Ceres Seq. ID no. 12349038
  misc_feature (1)..(334): NCBI GI NO: 38345794 NR Description: OSJNBa0085I10.11
  misc_feature (6)..(334): NCBI GI NO: 15222218 NR Description: methionine aminopeptidase I
  misc_feature (1)..(334): NCBI GI NO: 11320956 NR Description: methionine aminopeptidase-like protein
  misc_feature (7)..(333): NCBI GI NO: 34394646 NR Description: putative methionine aminopeptidase I (MAP1)
  misc_feature (45)..(332): NCBI GI NO: 7939560 NR Description: methionine aminopeptidase-like protein
  misc_feature (52)..(334): NCBI GI NO: 18419957 NR Description: methionyl aminopeptidase-like protein
  misc_feature (52)..(334): NCBI GI NO: 25289731 NR Description: methionyl aminopeptidase-like protein
  misc_feature (45)..(332): NCBI GI NO: 15230872 NR Description: methionine aminopeptidase, putative
  misc_feature (45)..(332): NCBI GI NO: 11320958 NR Description: methionine aminopeptidase-like protein
  misc_feature (55)..(332): NCBI GI NO: 23018702 NR Description: hypothetical protein [Thermobifida fusca]
MELHRSSPLLSGGRGGNTCLQKKPFFVQAKRLVGMEKASTRPGTQESGQTKKRAPLVRGTVSPPLPVPGNIPRPPYVGTEYVPEIAKEIQMHDKEGIVHMRAACELAARVLDYAGTLVKPSVTTDEIDKAVHKMIIDAGAYPSPLGYGGFPKSVCTSVNECMCHGIPDSRELQDGDIINIDVTVYLNGYHGDTSKTFLCGEVDEASKRLVKVTEECLLRGISTCKHGTSFKKIGRRISEHAERNGFGVVECFVGHGVGRVFHSEPIIYHQRNNRPGQMIEGQTFTIEPIISMGSIECDMWDDGWTAVTTDGSLAAQFEHTILITRTGAEILTKC

SEQ ID NO: 26740 - protein, 300 aa, Zea mays subsp. mays
  peptide (1)..(300): Ceres Seq. ID no. 12349039
  misc_feature (1)..(300): NCBI GI NO: 38345794 NR Description: OSJNBa0085I10.11
  misc_feature (1)..(300): NCBI GI NO: 15222218 NR Description: methionine aminopeptidase I
  misc_feature (1)..(300): NCBI GI NO: 11320956 NR Description: methionine aminopeptidase-like protein
  misc_feature (1)..(299): NCBI GI NO: 34394646 NR Description: putative methionine aminopeptidase I (MAP1)
  misc_feature (11)..(298): NCBI GI NO: 7939560 NR Description: methionine aminopeptidase-like protein
  misc_feature (18)..(300): NCBI GI NO: 18419957 NR Description: methionyl aminopeptidase-like protein
  misc_feature (18)..(300): NCBI GI NO: 25289731 NR Description: methionyl aminopeptidase-like protein
  misc_feature (11)..(298): NCBI GI NO: 15230872 NR Description: methionine aminopeptidase, putative
  misc_feature (11)..(298): NCBI GI NO: 11320958 NR Description: methionine aminopeptidase-like protein
  misc_feature (21)..(298): NCBI GI NO: 23018702 NR Description: hypothetical protein [Thermobifida fusca]
MEKASTRPGTQESGQTKKRAPLVRGTVSPPLPVPGNIPRPPYVGTEYVPEIAKEIQMHDKEGIVHMRAACELAARVLDYAGTLVKPSVTTDEIDKAVHKMIIDAGAYPSPLGYGGFPKSVCTSVNECMCHGIPDSRELQDGDIINIDVTVYLNGYHGDTSKTFLCGEVDEASKRLVKVTEECLLRGISTCKHGTSFKKIGRRISEHAERNGFGVVECFVGHGVGRVFHSEPIIYHQRNNRPGQMIEGQTFTIEPIISMGSIECDMWDDGWTAVTTDGSLAAQFEHTILITRTGAEILTKC

SEQ ID NO: 26741 - DNA, 717 bp, Zea mays subsp. mays
  misc_feature (1)..(717): Ceres Seq. ID no. 13493634
taatcgaaaagcacacactactacactaggctacacactgtacgtacacttctctccctcccctccccctttcccggagcctttgcttcactcgcgtcgccgagctggctagcgacaagcgcgacaccgtcggcggcggcgacgccggcccgcgcctcgatgacggcgaggactcgtccgccgtgagcagcaaggcggtggtcgaggagctgtaccgcgcgctggagcgcggcgacgtggacgccgtgcgccgcctgctgaacccggacgtggactggtggttccacggcccgcgcgcgcaccagcacctggtgctcatgcgcctgctcaccggcaccggcgccggcgccggcctcccgttcaagatccggtccctggacgccttcgggccgacggtgctggccgagggcgccgacgcgacgggcgcgctctactgggtgcacgcgtggaccgtgggccccggcggccgcgtcaccggggtgcgcgagtactgcaacaccgcgctcgtcgtcgccgtcgaagcaggtgtggcagagccggctgcccgaccgggctcgcaggaacctccctggcctcgtgcttgcgatctgaccggatcggatgcgaatcatgcgacatataggttgttgcccagccaactggcggtgtggcttattatgcttgtgcatgtctgcaatgtggttacaattggacatgaatgaatcaaatgcgccacac

SEQ ID NO: 26742 - protein, 127 aa, Zea mays subsp. mays
  peptide (1)..(127): Ceres Seq. ID no. 13493635
  misc_feature (1)..(89): NCBI GI NO: 15228414 NR Description: expressed protein [Arabidopsis thaliana]
  misc_feature (1)..(65): NCBI GI NO: 34898184 NR Description: P0034A04.2
  misc_feature (1)..(65): NCBI GI NO: 15241041 NR Description: expressed protein [Arabidopsis thaliana]
  misc_feature (1)..(65): NCBI GI NO: 10241935 NR Description: elicitor inducible protein [Nicotiana tabacum]
  misc_feature (1)..(84): NCBI GI NO: 4574320 NR Description: wound-induced protein WI12
  misc_feature (1)..(65): NCBI GI NO: 139780 NR Description: WOUND-INDUCED PROTEIN 1
  misc_feature (1)..(89): NCBI GI NO: 15028339 NR Description: unknown protein [Arabidopsis thaliana]
MRLLTGTGAGAGLPFKIRSLDAFGPTVLAEGADATGALYWVHAWTVGPGGRVTGVREYCNTALVVAVEAGVAEPAARPGSQEPPWPRACDLTGSDANHATYRLLPSQLAVWLIMLVHVCNVVTIGHE

SEQ ID NO: 26743 - DNA, 1447 bp, Zea mays subsp. mays
  misc_feature (1)..(1447): Ceres Seq. ID no. 12407271
aagaactaaggcttgtccctttccctctcctctcctcccctcccctccgtctccaactcccatcttctctcctggaagccgcctcggtcggacccggacaagatggccgccttcttcggtgctgcaccgccgccggctctcgcttcgttccgccacgaggaggaggagcagcagcatcaggacgccgccgaggaggtgtaccacgtggacgatgtcgacgagggcagcggtgacggccgtggccacggcggcgccggccaggggaagctgtgcgccaggggccactggcgccccgccgaggacgccaagctcaaggagctcgtcgcgcagttcgggccccagaactggaacctcatcgccgagaggctggacggcagatcagggaagagctgccgcctgcggtggttcaaccagctggacccgcggatcaaccggcgcgccttctcggaggaggaggaggagcggctcctggcggcgcaccgcgcgtacggcaacaagtgggctctcatcgcgcgcctcttcccgggccgcaccgacaacgccgtcaagaaccactggcacgtcctcatggcgcgcaggcagcgggagcactcgggcgcgctccgccgccgcaagccctcctcgacctcgccctcgccggcgccggcgccggcgccgcacctggcgcccgtcgtcgtcctccaccaccaccaccactacgccggcggctcccctcccatgccgccgttgcacgccgccgacgcccacacgcagtacacggcagcggcggcggcagcggacacccgcgcgcacagcggcggcgagtccgacgagaccgcctccacgtgcaccaccgacctctccctcgcttccgccgccccctgcttctaccagagtggctacgacgtggccccgccgcgccgcggcgttcgcaccgagcgcgcgctccgccttctccgcgccgccggcgacggcgcgctccgacgacaaggtctcgctgcccttcttcgacttcctcggcgtcggcgcggcgtgatgggggggccggcccgggccggccaggcggcggtgtacaggagggcggaggcggtcaaaggacgagagccccggcggcggtgaatccgtgcccgcgcgtagtttagctttagagcccgagttaaatcatcgagaacagaacatggcctgagcctgagagaggaggagaatggcgatccaccattgaactggtgcccgtggcattgcagactaacagctccgcatccgttcggctgctgatgttgctagtagtaatggtacggtgattactctctgctttgggttgggagagacgagtttgcaagcaccaccagaccaagcaagggcgacgatgggtatgggtggatgtttgcagaagaagaaaaaaccgcttgtaacacaaactgcaggacaaaggcagatcagagatcctctgctaactctctttttaccc

SEQ ID NO: 26744 - protein, 337 aa, Zea mays subsp. mays
  peptide (1)..(337): Ceres Seq. ID no. 12407272
  misc_feature (67)..(307): Pfam Name: Pfam Description:  Equine herpesvirus glycoprotein gp2
  misc_feature (6)..(318): NCBI GI NO: 11360318 NR Description: probable mucin DKFZp434C196.1 - human (fragment)
  misc_feature (67)..(337): NCBI GI NO: 30313663 NR Description: sublingual apomucin [Mus musculus]
  misc_feature (2)..(337): NCBI GI NO: 30313663 NR Description: sublingual apomucin [Mus musculus]
  misc_feature (12)..(337): NCBI GI NO: 25408663 NR Description: En/Spm-like transposon protein
  misc_feature (12)..(337): NCBI GI NO: 30688133 NR Description: En/Spm-related transposon protein
  misc_feature (14)..(318): NCBI GI NO: 11360318 NR Description: probable mucin DKFZp434C196.1 - human (fragment)
  misc_feature (23)..(319): NCBI GI NO: 34868816 NR Description: similar to splicing coactivator subunit SRm300
  misc_feature (2)..(325): NCBI GI NO: 11360318 NR Description: probable mucin DKFZp434C196.1 - human (fragment)
  misc_feature (47)..(318): NCBI GI NO: 30313663 NR Description: sublingual apomucin [Mus musculus]
  misc_feature (23)..(317): NCBI GI NO: 34868816 NR Description: similar to splicing coactivator subunit SRm300
RTKACPFPSPLLPSPPSPTPIFSPGSRLGRTRTRWPPSSVLHRRRLSLRSATRRRSSSIRTPPRRCTTWTMSTRAAVTAVATAAPARGSCAPGATGAPPRTPSSRSSSRSSGPRTGTSSPRGWTADQGRAAACGGSTSWTRGSTGAPSRRRRRSGSWRRTARTATSGLSSRASSRAAPTTPSRTTGTSSWRAGSGSTRARSAAASPPRPRPRRRRRRRRTWRPSSSSTTTTTTPAAPLPCRRCTPPTPTRSTRQRRRQRTPARTAAASPTRPPPRAPPTSPSLPPPPASTRVATTWPRRAAAFAPSARSAFSAPPATARSDDKVSLPFFDFLGVGAA

SEQ ID NO: 26745 - protein, 331 aa, Zea mays subsp. mays
  peptide (1)..(331): Ceres Seq. ID no. 12407273
  misc_feature (59)..(105): Pfam Name: Pfam Description:  Myb-like DNA-binding domain
  misc_feature (1)..(281): NCBI GI NO: 34903242 NR Description: unnamed protein product
  misc_feature (18)..(196): NCBI GI NO: 18396049 NR Description: myb-related protein, putative
  misc_feature (18)..(196): NCBI GI NO: 25403271 NR Description: protein T24P13.16
  misc_feature (58)..(187): NCBI GI NO: 15222362 NR Description: MYB-family transcription factor, putative
  misc_feature (46)..(176): NCBI GI NO: 9759057 NR Description: Myb-like transcription factor-like protein
  misc_feature (46)..(176): NCBI GI NO: 15238028 NR Description: MYB56 R2R3-MYB factor family member
  misc_feature (42)..(187): NCBI GI NO: 6979341 NR Description: myb-like protein [Oryza sativa]
  misc_feature (56)..(178): NCBI GI NO: 11358543 NR Description: myb-related transcription factor MYB54
  misc_feature (56)..(178): NCBI GI NO: 15219462 NR Description: myb family transcription factor
  misc_feature (56)..(170): NCBI GI NO: 21321780 NR Description: putative Myb/Myb-related protein
MAAFFGAAPPPALASFRHEEEEQQHQDAAEEVYHVDDVDEGSGDGRGHGGAGQGKLCARGHWRPAEDAKLKELVAQFGPQNWNLIAERLDGRSGKSCRLRWFNQLDPRINRRAFSEEEEERLLAAHRAYGNKWALIARLFPGRTDNAVKNHWHVLMARRQREHSGALRRRKPSSTSPSPAPAPAPHLAPVVVLHHHHHYAGGSPPMPPLHAADAHTQYTAAAAAADTRAHSGGESDETASTCTTDLSLASAAPCFYQSGYDVAPPRRGVRTERALRLLRAAGDGALRRQGLAALLRLPRRRRGVMGGPARAGQAAVYRRAEAVKGREPRRR

SEQ ID NO: 26746 - protein, 267 aa, Zea mays subsp. mays
  peptide (1)..(267): Ceres Seq. ID no. 12407274
  misc_feature (1)..(237): Pfam Name: Pfam Description:  Equine herpesvirus glycoprotein gp2
  misc_feature (1)..(248): NCBI GI NO: 11360318 NR Description: probable mucin DKFZp434C196.1 - human (fragment)
  misc_feature (1)..(267): NCBI GI NO: 30313663 NR Description: sublingual apomucin [Mus musculus]
  misc_feature (1)..(267): NCBI GI NO: 30313663 NR Description: sublingual apomucin [Mus musculus]
  misc_feature (1)..(267): NCBI GI NO: 25408663 NR Description: En/Spm-like transposon protein
  misc_feature (1)..(267): NCBI GI NO: 30688133 NR Description: En/Spm-related transposon protein
  misc_feature (1)..(248): NCBI GI NO: 11360318 NR Description: probable mucin DKFZp434C196.1 - human (fragment)
  misc_feature (1)..(249): NCBI GI NO: 34868816 NR Description: similar to splicing coactivator subunit SRm300
  misc_feature (1)..(255): NCBI GI NO: 11360318 NR Description: probable mucin DKFZp434C196.1 - human (fragment)
  misc_feature (1)..(248): NCBI GI NO: 30313663 NR Description: sublingual apomucin [Mus musculus]
  misc_feature (1)..(247): NCBI GI NO: 34868816 NR Description: similar to splicing coactivator subunit SRm300
MSTRAAVTAVATAAPARGSCAPGATGAPPRTPSSRSSSRSSGPRTGTSSPRGWTADQGRAAACGGSTSWTRGSTGAPSRRRRRSGSWRRTARTATSGLSSRASSRAAPTTPSRTTGTSSWRAGSGSTRARSAAASPPRPRPRRRRRRRRTWRPSSSSTTTTTTPAAPLPCRRCTPPTPTRSTRQRRRQRTPARTAAASPTRPPPRAPPTSPSLPPPPASTRVATTWPRRAAAFAPSARSAFSAPPATARSDDKVSLPFFDFLGVGAA

SEQ ID NO: 26747 - DNA, 1892 bp, Zea mays subsp. mays
  misc_feature (1)..(1892): Ceres Seq. ID no. 12344080
aaagcaacggacccccattcgcatccgcctccttttccttggagccgaagaagagggaaaggaagggaggacagccgccgccgccgccatcaccaccgtcaggatgcattccacgaacctcctgctcgaggagcccatccggatggcctccatcctcgagccctccaagcccagctacttcccggcgatgaccaagatcgtcggcactctcggccccaagtcgcgctccgtcgacacgatctccgcctgcctcaaggccggcatgtccgtcgcccggttcgatttctcgtggggggacgccgcgtaccaccaggagacgctggagaacctcaagctctccatcaagtccaccaagaagctctgcgcgtgtcatgctcgacaccgtgggcccggagctgcaggtggtgaacaagagcgagaccccgatctccctcgaggagaatggcacggtcgttctcacccctcaccgggggccaagacgcctcctccagcttgctgcccatcaacttctctggactcgccaaggcggtgacaccaggggcaacaatattcgtgggacaatacttgttcactggcagtgagaccacctcagtttggttggaggtttctgaagtgaaaggagatgatgtggtgtgtataatcaagaacacagccaccttggctgggtcactgttcacgctgcattgctcccagattcacattgacttgcccaccctgtctgatgaggataaggatgtcattagaaaatggggtactcccaataagattgacttcctttctctgtcctacacaagacatgcagaggatgtgcgccaggcacgggaattcctgtcaaaattgggcgatctaagccagactctgatttttgccaaaattgagaatgtcgagggcctgaaccaatttgatgaaatactggctgaggcagatggtatcattttatcaagagggaacctgggaattgatcttccacctgagaaggtctttttgtttcaaaaatctgctcttcacaagtgcaacatggctggaaagcctgctgttgtcactcgtgttgtggacagtatgactgacaacctcaggcctactcgggcggaggcaactgatgtggccaatgcagtacttgacgggagtgatgccattctccttggtgctgagactcttcgaggtttatatccagttgagactatttcgacagtgggcagaatttgtgctgaggctgagaaggtattcaaccaagatttatacttcaagcaaactgtgaaatatgtcggagaacccatgacccacttggagtccattgcttcctcagcggtgcgagctgctatcaaagttaaggcttcggtgatcatttgcttcacctcttctgggagggctgcaaggctcatcgccaagtacaggcccaccatgcctgttctttctgttgtcattcctcgtctgaagacaaaccaactgagatggagtttcactggtgcttttgaggcaagacagtcgctgatagttagaggcctctttccgatgcttgctgatcctcggcatccagccgaatcaaccagtaatacaaatgagtcagttctgaaggttgctctagaccatggcaaggcatgtggtgtgatcaagtcccatgaccgtgttgtcgtttgccagaaggtgggagattcatcggttgtgaagatcattgagctggacgactagggcatactttgccgattttttttttttgacgaggccggaatttgttggctatatgtataatcctatagctttctttacaaatgagcagtttttccctatggtgccatcataggacttgcttagcgatttaaaactcgattatgtgccacctaaaatgggcagatggaacaatgaaatcatactgtgccctttatccgttgctt

SEQ ID NO: 26748 - protein, 415 aa, Zea mays subsp. mays
  peptide (1)..(415): Ceres Seq. ID no. 12344081
  misc_feature (282)..(412): Pfam Name: Pfam Description:  Pyruvate kinase, alpha/beta domain
  misc_feature (11)..(415): NCBI GI NO: 20562907 NR Description: pyruvate kinase-like [Deschampsia antarctica]
  misc_feature (12)..(415): NCBI GI NO: 18409740 NR Description: pyruvate kinase - like protein
  misc_feature (12)..(415): NCBI GI NO: 18404169 NR Description: putative pyruvate kinase; protein id: At2g36580
  misc_feature (12)..(415): NCBI GI NO: 21537122 NR Description: putative pyruvate kinase [Arabidopsis thaliana]
  misc_feature (12)..(415): NCBI GI NO: 23308151 NR Description: At2g36580/F1O11.21 [Arabidopsis thaliana]
  misc_feature (12)..(415): NCBI GI NO: 11260409 NR Description: pyruvate kinase-like protein
  misc_feature (12)..(415): NCBI GI NO: 25287747 NR Description: probable pyruvate kinase
  misc_feature (17)..(411): NCBI GI NO: 2497543 NR Description: Pyruvate kinase, cytosolic isozyme
  misc_feature (17)..(411): NCBI GI NO: 34903274 NR Description: unnamed protein product
  misc_feature (15)..(410): NCBI GI NO: 125606 NR Description: Pyruvate kinase, cytosolic isozyme
MARSFSPLTGGQDASSSLLPINFSGLAKAVTPGATIFVGQYLFTGSETTSVWLEVSEVKGDDVVCIIKNTATLAGSLFTLHCSQIHIDLPTLSDEDKDVIRKWGTPNKIDFLSLSYTRHAEDVRQAREFLSKLGDLSQTLIFAKIENVEGLNQFDEILAEADGIILSRGNLGIDLPPEKVFLFQKSALHKCNMAGKPAVVTRVVDSMTDNLRPTRAEATDVANAVLDGSDAILLGAETLRGLYPVETISTVGRICAEAEKVFNQDLYFKQTVKYVGEPMTHLESIASSAVRAAIKVKASVIICFTSSGRAARLIAKYRPTMPVLSVVIPRLKTNQLRWSFTGAFEARQSLIVRGLFPMLADPRHPAESTSNTNESVLKVALDHGKACGVIKSHDRVVVCQKVGDSSVVKIIELDD

SEQ ID NO: 26749 - protein, 223 aa, Zea mays subsp. mays
  peptide (1)..(223): Ceres Seq. ID no. 12344082
  misc_feature (90)..(220): Pfam Name: Pfam Description:  Pyruvate kinase, alpha/beta domain
  misc_feature (1)..(223): NCBI GI NO: 20562907 NR Description: pyruvate kinase-like [Deschampsia antarctica]
  misc_feature (1)..(223): NCBI GI NO: 18409740 NR Description: pyruvate kinase - like protein
  misc_feature (1)..(223): NCBI GI NO: 18404169 NR Description: putative pyruvate kinase; protein id: At2g36580
  misc_feature (1)..(223): NCBI GI NO: 21537122 NR Description: putative pyruvate kinase [Arabidopsis thaliana]
  misc_feature (1)..(223): NCBI GI NO: 23308151 NR Description: At2g36580/F1O11.21 [Arabidopsis thaliana]
  misc_feature (1)..(223): NCBI GI NO: 11260409 NR Description: pyruvate kinase-like protein
  misc_feature (1)..(223): NCBI GI NO: 25287747 NR Description: probable pyruvate kinase
  misc_feature (1)..(219): NCBI GI NO: 2497543 NR Description: Pyruvate kinase, cytosolic isozyme
  misc_feature (1)..(219): NCBI GI NO: 34903274 NR Description: unnamed protein product
  misc_feature (1)..(218): NCBI GI NO: 125606 NR Description: Pyruvate kinase, cytosolic isozyme
MAGKPAVVTRVVDSMTDNLRPTRAEATDVANAVLDGSDAILLGAETLRGLYPVETISTVGRICAEAEKVFNQDLYFKQTVKYVGEPMTHLESIASSAVRAAIKVKASVIICFTSSGRAARLIAKYRPTMPVLSVVIPRLKTNQLRWSFTGAFEARQSLIVRGLFPMLADPRHPAESTSNTNESVLKVALDHGKACGVIKSHDRVVVCQKVGDSSVVKIIELDD

SEQ ID NO: 26750 - protein, 209 aa, Zea mays subsp. mays
  peptide (1)..(209): Ceres Seq. ID no. 12344083
  misc_feature (76)..(206): Pfam Name: Pfam Description:  Pyruvate kinase, alpha/beta domain
  misc_feature (1)..(209): NCBI GI NO: 20562907 NR Description: pyruvate kinase-like [Deschampsia antarctica]
  misc_feature (1)..(209): NCBI GI NO: 18409740 NR Description: pyruvate kinase - like protein
  misc_feature (1)..(209): NCBI GI NO: 18404169 NR Description: putative pyruvate kinase; protein id: At2g36580
  misc_feature (1)..(209): NCBI GI NO: 21537122 NR Description: putative pyruvate kinase [Arabidopsis thaliana]
  misc_feature (1)..(209): NCBI GI NO: 23308151 NR Description: At2g36580/F1O11.21 [Arabidopsis thaliana]
  misc_feature (1)..(209): NCBI GI NO: 11260409 NR Description: pyruvate kinase-like protein
  misc_feature (1)..(209): NCBI GI NO: 25287747 NR Description: probable pyruvate kinase
  misc_feature (1)..(205): NCBI GI NO: 2497543 NR Description: Pyruvate kinase, cytosolic isozyme
  misc_feature (1)..(205): NCBI GI NO: 34903274 NR Description: unnamed protein product
  misc_feature (1)..(204): NCBI GI NO: 125606 NR Description: Pyruvate kinase, cytosolic isozyme
MTDNLRPTRAEATDVANAVLDGSDAILLGAETLRGLYPVETISTVGRICAEAEKVFNQDLYFKQTVKYVGEPMTHLESIASSAVRAAIKVKASVIICFTSSGRAARLIAKYRPTMPVLSVVIPRLKTNQLRWSFTGAFEARQSLIVRGLFPMLADPRHPAESTSNTNESVLKVALDHGKACGVIKSHDRVVVCQKVGDSSVVKIIELDD

SEQ ID NO: 26751 - DNA, 991 bp, Zea mays subsp. mays
  misc_feature (1)..(991): Ceres Seq. ID no. 12343786
gttgtgcgtcttttcctcagcagcaaccggagagcggctgctcgcctgctcctcctcctagggaaaggacagcggcggcggcggcggcggcgagaagttgggcctgaagcccggacgctttctcccgagataccgcaatactgctagagcactgtcactaatgtttgcttatgacaatggagtcacctacaactgccgctggtggtgaactggagagctacttctccttgggtttgacagtatcccactcacagaaagataatgctgaatttccaaaggttctgttgcttctctcagcgtatcttgacaagacagttcagcagaatgaagagttactagactccagtaaaataaaggagtcgaccactatctttcatggtcagagggtgcctgaacttagtataaagctgtatgcagagcgtattttcaagtatgcaaagtgcagcccatcttgctttgtgctagcacttatctacatggagagatatctacaacaaccaaacatttacatgacgtcatttagtgttcatcgcctgcttattacaagtgttgttgttgctgccaaattcatagatgatgcgtttttcaataatgcatactacgggagagttggaggaattagcacaagagagatgaatatgcttgaactggatttattgttcggtctggacttcaggctcaaagtggatatagagactttcgaaagctactgcttacagttggaggaagcactggttcttgttttggagagaccaattcaggtccaagaggccaacgtaactaaacacttgatttgtaacagcagcgccgatgagacttgcaaacacgagctcgggcttgaaaggtacagcagtcaggctgtccaagggtgtagttggtaaatgtgattgggcagatagttttgaaaaaagtgtatgggtccgagtattggtaattcttttatttgacatttaagttgttcagttggccttgtttagtagggccgttattc

SEQ ID NO: 26752 - protein, 236 aa, Zea mays subsp. mays
  peptide (1)..(236): Ceres Seq. ID no. 12343787
  misc_feature (41)..(170): Pfam Name: Pfam Description:  Cyclin, N-terminal domain
  misc_feature (36)..(220): NCBI GI NO: 15224950 NR Description: putative PREG1-like negative regulator
  misc_feature (21)..(189): NCBI GI NO: 25493992 NR Description: PREG-like protein
  misc_feature (3)..(186): NCBI GI NO: 15229382 NR Description: putative protein; protein id: At3g63120
  misc_feature (3)..(186): NCBI GI NO: 21593009 NR Description: unknown [Arabidopsis thaliana]
  misc_feature (26)..(190): NCBI GI NO: 15240794 NR Description: putative protein; protein id: At5g07450.1
  misc_feature (8)..(190): NCBI GI NO: 15233185 NR Description: PREG-like protein, putative; protein id:At3g21870
  misc_feature (28)..(219): NCBI GI NO: 15240306 NR Description: PREG-like - like protein; protein id: At5g61650.1
  misc_feature (35)..(232): NCBI GI NO: 37536902 NR Description: hypothetical protein
  misc_feature (25)..(221): NCBI GI NO: 15232360 NR Description: regulatory protein - like; protein id: At3g60550.1
  misc_feature (28)..(216): NCBI GI NO: 32488963 NR Description: OSJNBb0038F03.8
MTMESPTTAAGGELESYFSLGLTVSHSQKDNAEFPKVLLLLSAYLDKTVQQNEELLDSSKIKESTTIFHGQRVPELSIKLYAERIFKYAKCSPSCFVLALIYMERYLQQPNIYMTSFSVHRLLITSVVVAAKFIDDAFFNNAYYGRVGGISTREMNMLELDLLFGLDFRLKVDIETFESYCLQLEEALVLVLERPIQVQEANVTKHLICNSSADETCKHELGLERYSSQAVQGCSW

SEQ ID NO: 26753 - protein, 234 aa, Zea mays subsp. mays
  peptide (1)..(234): Ceres Seq. ID no. 12343788
  misc_feature (39)..(168): Pfam Name: Pfam Description:  Cyclin, N-terminal domain
  misc_feature (34)..(218): NCBI GI NO: 15224950 NR Description: putative PREG1-like negative regulator
  misc_feature (19)..(187): NCBI GI NO: 25493992 NR Description: PREG-like protein
  misc_feature (1)..(184): NCBI GI NO: 15229382 NR Description: putative protein; protein id: At3g63120
  misc_feature (1)..(184): NCBI GI NO: 21593009 NR Description: unknown [Arabidopsis thaliana]
  misc_feature (24)..(188): NCBI GI NO: 15240794 NR Description: putative protein; protein id: At5g07450.1
  misc_feature (6)..(188): NCBI GI NO: 15233185 NR Description: PREG-like protein, putative; protein id:At3g21870
  misc_feature (26)..(217): NCBI GI NO: 15240306 NR Description: PREG-like - like protein; protein id: At5g61650.1
  misc_feature (33)..(230): NCBI GI NO: 37536902 NR Description: hypothetical protein
  misc_feature (23)..(219): NCBI GI NO: 15232360 NR Description: regulatory protein - like; protein id: At3g60550.1
  misc_feature (26)..(214): NCBI GI NO: 32488963 NR Description: OSJNBb0038F03.8
MESPTTAAGGELESYFSLGLTVSHSQKDNAEFPKVLLLLSAYLDKTVQQNEELLDSSKIKESTTIFHGQRVPELSIKLYAERIFKYAKCSPSCFVLALIYMERYLQQPNIYMTSFSVHRLLITSVVVAAKFIDDAFFNNAYYGRVGGISTREMNMLELDLLFGLDFRLKVDIETFESYCLQLEEALVLVLERPIQVQEANVTKHLICNSSADETCKHELGLERYSSQAVQGCSW

SEQ ID NO: 26754 - protein, 134 aa, Zea mays subsp. mays
  peptide (1)..(134): Ceres Seq. ID no. 12343789
  misc_feature (1)..(68): Pfam Name: Pfam Description:  Cyclin, N-terminal domain
  misc_feature (1)..(118): NCBI GI NO: 15224950 NR Description: putative PREG1-like negative regulator
  misc_feature (1)..(87): NCBI GI NO: 25493992 NR Description: PREG-like protein
  misc_feature (1)..(84): NCBI GI NO: 15229382 NR Description: putative protein; protein id: At3g63120
  misc_feature (1)..(84): NCBI GI NO: 21593009 NR Description: unknown [Arabidopsis thaliana]
  misc_feature (1)..(88): NCBI GI NO: 15240794 NR Description: putative protein; protein id: At5g07450.1
  misc_feature (1)..(88): NCBI GI NO: 15233185 NR Description: PREG-like protein, putative; protein id:At3g21870
  misc_feature (1)..(117): NCBI GI NO: 15240306 NR Description: PREG-like - like protein; protein id: At5g61650.1
  misc_feature (1)..(130): NCBI GI NO: 37536902 NR Description: hypothetical protein
  misc_feature (1)..(119): NCBI GI NO: 15232360 NR Description: regulatory protein - like; protein id: At3g60550.1
  misc_feature (1)..(114): NCBI GI NO: 32488963 NR Description: OSJNBb0038F03.8
MERYLQQPNIYMTSFSVHRLLITSVVVAAKFIDDAFFNNAYYGRVGGISTREMNMLELDLLFGLDFRLKVDIETFESYCLQLEEALVLVLERPIQVQEANVTKHLICNSSADETCKHELGLERYSSQAVQGCSW

SEQ ID NO: 26755 - DNA, 1084 bp, Zea mays subsp. mays
  misc_feature (1)..(1084): Ceres Seq. ID no. 12407764
ctgctccttctctggtgaggaggcgtggtgagagactgcgactgcgcgatggaggcgtcgtcgtcggcgttggcgctcgtggccgccgtgctcctcctctcctccccgctcgctgcgtcagatttctgcgtgtgccgttcggaccagccgacggcggtgctgcagaaggcgatcgacttcgcgtgcggcccgcagggcggcgccgactgcacgcccatcctgcagggcggcgggtgctacagcccggacaccgccgccgcgcactgctcctgggccgccaacacctactaccagaacaacaaggccaggggcgccacctgcgacttcggcggcgcagccaccgtctccaccaccgacccgagtttctccgggtgcactttcgcttccagtgccaccagcgccggtgctgggactggaaccgggacggcgggcagcagcaccttcagccccagcgcgggcaccggcttcaacggcaccgggaacgggatgggcggcagcactactaccggcctgggacccacgggcaacgcctttgacgccgccgccgccgccgcgccgggcctgctccccagcgccgcgtccctcggcctcgcactcgccgtcctctccttcctaacctagccctgccgcgccattaacggcagcctcccctcgtcttatgtctggtcgtgttcagtaccatacctctctgaacatgagccagctgctgctgctacttggcttgctccatggcggaaggggacgggccggggagctgtacgtactgcgacgaagaagagtgcggtggaactggctggttggttggttttggttccagcttcattttcacctcacaccccacactgctagtggcgacggtggttggggttgcggggtgcggtgcgtgccttttttgatgaatcctagctacacgacgggatggcgtgtggtttattcgctggtaggatggctgtctcttttcctccgaggaccattcatgtcttccttgtttgtacgtacctctcttcttttcttgttttatgtacaagacttgtcgctagccctttgtttgtttgtttctaatcaaactctttgttctgctgtc

SEQ ID NO: 26756 - protein, 190 aa, Zea mays subsp. mays
  peptide (1)..(190): Ceres Seq. ID no. 12407765
  misc_feature (7)..(189): NCBI GI NO: 22775658 NR Description: contains ESTs C91599
  misc_feature (6)..(183): NCBI GI NO: 21592859 NR Description: unknown [Arabidopsis thaliana]
  misc_feature (8)..(183): NCBI GI NO: 15241485 NR Description: glycosyl hydrolase family 17; protein id:At5g08000
  misc_feature (10)..(115): NCBI GI NO: 34909796 NR Description: P0403C05.4
  misc_feature (8)..(178): NCBI GI NO: 21553768 NR Description: unknown [Arabidopsis thaliana]
  misc_feature (8)..(178): NCBI GI NO: 18409239 NR Description: unknown protein; protein id: At1g69295
  misc_feature (3)..(136): NCBI GI NO: 21326118 NR Description: putative expressed protein [Sorghum bicolor]
  misc_feature (9)..(187): NCBI GI NO: 30697478 NR Description: glycosyl hydrolase family 17
  misc_feature (8)..(180): NCBI GI NO: 15222715 NR Description: glycosyl hydrolase family 17; protein id:At1g26450
  misc_feature (8)..(178): NCBI GI NO: 25404810 NR Description: unknown protein, 45065-49536
MEASSSALALVAAVLLLSSPLAASDFCVCRSDQPTAVLQKAIDFACGPQGGADCTPILQGGGCYSPDTAAAHCSWAANTYYQNNKARGATCDFGGAATVSTTDPSFSGCTFASSATSAGAGTGTGTAGSSTFSPSAGTGFNGTGNGMGGSTTTGLGPTGNAFDAAAAAAPGLLPSAASLGLALAVLSFLT

SEQ ID NO: 26757 - protein, 177 aa, Zea mays subsp. mays
  peptide (1)..(177): Ceres Seq. ID no. 12407766
APSLVRRRGERLRLRDGGVVVGVGARGRRAPPLLPARCVRFLRVPFGPADGGAAEGDRLRVRPAGRRRLHAHPAGRRVLQPGHRRRALLLGRQHLLPEQQGQGRHLRLRRRSHRLHHRPEFLRVHFRFQCHQRRCWDWNRDGGQQHLQPQRGHRLQRHRERDGRQHYYRPGTHGQRL

SEQ ID NO: 26758 - protein, 142 aa, Zea mays subsp. mays
  peptide (1)..(142): Ceres Seq. ID no. 12407767
  misc_feature (1)..(77): NCBI GI NO: 9630030 NR Description: unknown
MSGRVQYHTSLNMSQLLLLLGLLHGGRGRAGELYVLRRRRVRWNWLVGWFWFQLHFHLTPHTASGDGGWGCGVRCVPFLMNPSYTTGWRVVYSLVGWLSLFLRGPFMSSLFVRTSLLFLFYVQDLSLALCLFVSNQTLCSAV

SEQ ID NO: 26759 - DNA, 1561 bp, Zea mays subsp. mays
  misc_feature (1)..(1561): Ceres Seq. ID no. 13494774
aagaaccccgacccgaccgccgatagctacctagctcccaccccgcacccctgactccaccttctccattcttgatcccttcgccgcgcggagatccaagaacaggggcagcctgacaggggaacgggcggctatgggaggaagcagcgcgatgctcgccgtgttggcggtggtggttcttgcggcggtcggcggcgctgacgccgcggcggaatcgagtgaggcgtcggccaaggggaggtaccacgcgctcttcaatttcggggactcgctagccgacgctggcaacctcatccagaacggcaccccggacatcctggccaccgcgcgcctgccctacggccagacctacttcggcagggccaccggccgctgctccgacggacgcctcgtcatcgaccacctcgcacaagagtttggcctgccgctgctgccgccgtccaaggccacgaacgccagcttcgcgtacggcgccaatttcgccatcaccggcgccaccgcgctcgacacgccctacttcgaggccaaggggctcggtgccgtcatctggaactccggagcgctcatgacccaaatccagtggttccgtgatctcaagcctttcttctgcaacacaacgcaggcatgcaagaaattctttgccaaggcgctgtttgtggtcggtgagtttggcggcaatgactacaatgcacccctctttgcgggcatgggcatcccagaggtttacaaattcatgccggatgtcatccagggcatctctgacggtattgaggcactgattgctgagggggctgtggagatgattgtgcctggtgttatgcccactggctgcttcccagtgtacttgaacatgcttgatgagcccaaagagggatatggctcccgcagtgggtgtgtccgccggtacaacacattctcctgggtgcacaatgcacatctcaaggccatgcttaagaagctccgggctaagcatcccaatgtgaggatcatatatggcgattactacactccagttgtccagttcatgcttcagcctgagaagtttggttttgccaaacaactgcctagggcatgttgtggggctccatcgactcctgagaaagcagcttacaacttcaatgtcacggccaaatgcggtgagcctggtgcgactgcctgtgctgatccgacaacccattggagctgggatggcattcacctgacggaggctgcgtaccgccatatcgctaaaggctggttatacgggccttttgcggaccaaccaatcatccaatcctcatgatcacgccactcctgctgtagagtttcatcaaagtagcgcactggaaaaaaaatggagcgggggaaagtagttcttccatacagtttcaatgtttgcatacatgtacatctccattttgattgtattcatttaacttgggtggtacaaaggtgggatagggaggctgcacaaaggcctgatttcttgatttgtcagggggtataaatatgaaaaatataacgtacatataatcatgtatattgtgtcctggaaatgtgatacagactgtctgcttgagct

SEQ ID NO: 26760 - protein, 382 aa, Zea mays subsp. mays
  peptide (1)..(382): Ceres Seq. ID no. 13494775
  misc_feature (40)..(368): Pfam Name: Pfam Description:  GDSL-like Lipase/Acylhydrolase
  misc_feature (14)..(381): NCBI GI NO: 34903958 NR Description: OSJNBa0038J17.24
  misc_feature (1)..(379): NCBI GI NO: 34903956 NR Description: OSJNBa0038J17.23
  misc_feature (4)..(379): NCBI GI NO: 34903994 NR Description: unnamed protein product
  misc_feature (32)..(379): NCBI GI NO: 34903986 NR Description: unnamed protein product
  misc_feature (36)..(373): NCBI GI NO: 15242538 NR Description: GDSL-motif lipase/hydrolase protein
  misc_feature (36)..(373): NCBI GI NO: 21553708 NR Description: GDSL-motif lipase/hydrolase-like protein
  misc_feature (32)..(382): NCBI GI NO: 34903970 NR Description: OSJNBa0038J17.30
  misc_feature (2)..(382): NCBI GI NO: 34911800 NR Description: lipase-like protein
  misc_feature (1)..(377): NCBI GI NO: 10764858 NR Description: F1K23.17 [Arabidopsis thaliana]
  misc_feature (28)..(381): NCBI GI NO: 10764858 NR Description: F1K23.17 [Arabidopsis thaliana]
MGGSSAMLAVLAVVVLAAVGGADAAAESSEASAKGRYHALFNFGDSLADAGNLIQNGTPDILATARLPYGQTYFGRATGRCSDGRLVIDHLAQEFGLPLLPPSKATNASFAYGANFAITGATALDTPYFEAKGLGAVIWNSGALMTQIQWFRDLKPFFCNTTQACKKFFAKALFVVGEFGGNDYNAPLFAGMGIPEVYKFMPDVIQGISDGIEALIAEGAVEMIVPGVMPTGCFPVYLNMLDEPKEGYGSRSGCVRRYNTFSWVHNAHLKAMLKKLRAKHPNVRIIYGDYYTPVVQFMLQPEKFGFAKQLPRACCGAPSTPEKAAYNFNVTAKCGEPGATACADPTTHWSWDGIHLTEAAYRHIAKGWLYGPFADQPIIQSS

SEQ ID NO: 26761 - protein, 376 aa, Zea mays subsp. mays
  peptide (1)..(376): Ceres Seq. ID no. 13494776
  misc_feature (34)..(362): Pfam Name: Pfam Description:  GDSL-like Lipase/Acylhydrolase
  misc_feature (8)..(375): NCBI GI NO: 34903958 NR Description: OSJNBa0038J17.24
  misc_feature (1)..(373): NCBI GI NO: 34903956 NR Description: OSJNBa0038J17.23
  misc_feature (1)..(373): NCBI GI NO: 34903994 NR Description: unnamed protein product
  misc_feature (26)..(373): NCBI GI NO: 34903986 NR Description: unnamed protein product
  misc_feature (30)..(367): NCBI GI NO: 15242538 NR Description: GDSL-motif lipase/hydrolase protein
  misc_feature (30)..(367): NCBI GI NO: 21553708 NR Description: GDSL-motif lipase/hydrolase-like protein
  misc_feature (26)..(376): NCBI GI NO: 34903970 NR Description: OSJNBa0038J17.30
  misc_feature (1)..(376): NCBI GI NO: 34911800 NR Description: lipase-like protein
  misc_feature (1)..(371): NCBI GI NO: 10764858 NR Description: F1K23.17 [Arabidopsis thaliana]
  misc_feature (22)..(375): NCBI GI NO: 10764858 NR Description: F1K23.17 [Arabidopsis thaliana]
MLAVLAVVVLAAVGGADAAAESSEASAKGRYHALFNFGDSLADAGNLIQNGTPDILATARLPYGQTYFGRATGRCSDGRLVIDHLAQEFGLPLLPPSKATNASFAYGANFAITGATALDTPYFEAKGLGAVIWNSGALMTQIQWFRDLKPFFCNTTQACKKFFAKALFVVGEFGGNDYNAPLFAGMGIPEVYKFMPDVIQGISDGIEALIAEGAVEMIVPGVMPTGCFPVYLNMLDEPKEGYGSRSGCVRRYNTFSWVHNAHLKAMLKKLRAKHPNVRIIYGDYYTPVVQFMLQPEKFGFAKQLPRACCGAPSTPEKAAYNFNVTAKCGEPGATACADPTTHWSWDGIHLTEAAYRHIAKGWLYGPFADQPIIQSS

SEQ ID NO: 26762 - protein, 238 aa, Zea mays subsp. mays
  peptide (1)..(238): Ceres Seq. ID no. 13494777
  misc_feature (1)..(224): Pfam Name: Pfam Description:  GDSL-like Lipase/Acylhydrolase
  misc_feature (1)..(237): NCBI GI NO: 34903958 NR Description: OSJNBa0038J17.24
  misc_feature (1)..(235): NCBI GI NO: 34903956 NR Description: OSJNBa0038J17.23
  misc_feature (1)..(235): NCBI GI NO: 34903994 NR Description: unnamed protein product
  misc_feature (1)..(235): NCBI GI NO: 34903986 NR Description: unnamed protein product
  misc_feature (1)..(229): NCBI GI NO: 15242538 NR Description: GDSL-motif lipase/hydrolase protein
  misc_feature (1)..(229): NCBI GI NO: 21553708 NR Description: GDSL-motif lipase/hydrolase-like protein
  misc_feature (1)..(238): NCBI GI NO: 34903970 NR Description: OSJNBa0038J17.30
  misc_feature (1)..(238): NCBI GI NO: 34911800 NR Description: lipase-like protein
  misc_feature (1)..(233): NCBI GI NO: 10764858 NR Description: F1K23.17 [Arabidopsis thaliana]
  misc_feature (1)..(237): NCBI GI NO: 10764858 NR Description: F1K23.17 [Arabidopsis thaliana]
MTQIQWFRDLKPFFCNTTQACKKFFAKALFVVGEFGGNDYNAPLFAGMGIPEVYKFMPDVIQGISDGIEALIAEGAVEMIVPGVMPTGCFPVYLNMLDEPKEGYGSRSGCVRRYNTFSWVHNAHLKAMLKKLRAKHPNVRIIYGDYYTPVVQFMLQPEKFGFAKQLPRACCGAPSTPEKAAYNFNVTAKCGEPGATACADPTTHWSWDGIHLTEAAYRHIAKGWLYGPFADQPIIQSS

SEQ ID NO: 26763 - DNA, 1232 bp, Zea mays subsp. mays; identical to SEQ ID NO: 23885
  misc_feature (1)..(1232): Ceres Seq. ID no. 13635672
  misc_feature (258)..(258): n is a, c, t, g, unknown, or other

SEQ ID NO: 26764 - protein, 247 aa, Zea mays subsp. mays; identical to SEQ ID NO: 23886
  peptide (1)..(247): Ceres Seq. ID no. 15220349
  misc_feature (55)..(86): NCBI GI NO: 34898416 NR Description: ESTs AU058081
  misc_feature (55)..(86): NCBI GI NO: 34898458 NR Description: ESTs AU058081
  misc_feature (55)..(86): NCBI GI NO: 1709761 NR Description: Proteasome subunit alpha type 4
  misc_feature (55)..(86): NCBI GI NO: 15233268 NR Description: 20S proteasome alpha subunit C (PAC1)
  misc_feature (55)..(86): NCBI GI NO: 2511584 NR Description: multicatalytic endopeptidase
  misc_feature (55)..(86): NCBI GI NO: 12229904 NR Description: Proteasome subunit alpha type 4
  misc_feature (63)..(88): NCBI GI NO: 6984140 NR Description: proteasome 27 kDa subunit [Euphorbia esula]
  misc_feature (55)..(86): NCBI GI NO: 23394356 NR Description: proteasome subunit [Phytophthora infestans]
  misc_feature (55)..(88): NCBI GI NO: 32410633 NR Description: hypothetical protein [Neurospora crassa]
  misc_feature (55)..(88): NCBI GI NO: 40744887 NR Description: conserved hypothetical protein
  misc_feature (86)..(86): Xaa is any aa, unknown or other

SEQ ID NO: 26765 - protein, 246 aa, Zea mays subsp. mays; identical to SEQ ID NO: 23887
  peptide (1)..(246): Ceres Seq. ID no. 15220350
  misc_feature (29)..(211): Pfam Name: Pfam Description:  Proteasome A-type and B-type
  misc_feature (29)..(246): NCBI GI NO: 34898416 NR Description: ESTs AU058081
  misc_feature (29)..(246): NCBI GI NO: 34898458 NR Description: ESTs AU058081
  misc_feature (29)..(245): NCBI GI NO: 1709761 NR Description: Proteasome subunit alpha type 4
  misc_feature (29)..(245): NCBI GI NO: 15233268 NR Description: 20S proteasome alpha subunit C (PAC1)
  misc_feature (29)..(245): NCBI GI NO: 2511584 NR Description: multicatalytic endopeptidase
  misc_feature (29)..(245): NCBI GI NO: 12229904 NR Description: Proteasome subunit alpha type 4
  misc_feature (29)..(246): NCBI GI NO: 6984140 NR Description: proteasome 27 kDa subunit [Euphorbia esula]
  misc_feature (55)..(246): NCBI GI NO: 14039743 NR Description: 20S proteasome subunit alpha 3 [Lolium perenne]
  misc_feature (29)..(237): NCBI GI NO: 23394356 NR Description: proteasome subunit [Phytophthora infestans]
  misc_feature (29)..(241): NCBI GI NO: 32410633 NR Description: hypothetical protein [Neurospora crassa]
  misc_feature (28)..(28): Xaa is any aa, unknown or other

SEQ ID NO: 26766 - protein, 193 aa, Zea mays subsp. mays; identical to SEQ ID NO: 23888
  peptide (1)..(193): Ceres Seq. ID no. 15220351
  misc_feature (1)..(32): NCBI GI NO: 34898416 NR Description: ESTs AU058081
  misc_feature (1)..(32): NCBI GI NO: 34898458 NR Description: ESTs AU058081
  misc_feature (1)..(32): NCBI GI NO: 1709761 NR Description: Proteasome subunit alpha type 4
  misc_feature (1)..(32): NCBI GI NO: 15233268 NR Description: 20S proteasome alpha subunit C (PAC1)
  misc_feature (1)..(32): NCBI GI NO: 2511584 NR Description: multicatalytic endopeptidase
  misc_feature (1)..(32): NCBI GI NO: 12229904 NR Description: Proteasome subunit alpha type 4
  misc_feature (9)..(34): NCBI GI NO: 6984140 NR Description: proteasome 27 kDa subunit [Euphorbia esula]
  misc_feature (1)..(32): NCBI GI NO: 23394356 NR Description: proteasome subunit [Phytophthora infestans]
  misc_feature (1)..(34): NCBI GI NO: 32410633 NR Description: hypothetical protein [Neurospora crassa]
  misc_feature (1)..(34): NCBI GI NO: 40744887 NR Description: conserved hypothetical protein
  misc_feature (32)..(32): Xaa is any aa, unknown or other

SEQ ID NO: 26767 - DNA, 1560 bp, Zea mays subsp. mays
  misc_feature (1)..(1560): Ceres Seq. ID no. 12373262
gaaccccgagtcccgaccagagagagacacggagaggagcagacctgcccgtcgcaatggcgatgccaccgaagcccggcgacccgccgcagcgctcgccggcacgtagcccaaacctcaatctcccctgcccgctgccgccggtcccgggcggggcgccgccaccgccgcagcagcagccgggcgccgggctgcccccgccgcgcgtgggccaccaccgccgcgccagatctgaggtggccttccgcttcccggacgacctgcccggcggcgggggcggcggcttcgacgagatcggctccgaggacgacctcttctccaccttcatggacatggacaagatcgccggcgccgaccgcgaccgcgccgccgagacctcctcgccgccgcgcccagccaagcaccgccacagcgtctcctttgacggcttcggcatgggggctgccgccggcggcccgggcggccagcaggacgggggtggaggcgtgttcggagaggtgatggaggccaagaaggccatgtgcttccgagcagctctccgagctcgccgccatcgatcccaagcgcgccaaaagaattattgcaaacaggcaatctgcagcacggtcaaaggaaagaaaagctcgatatataacagaattggagcggaaggttcaaactcttcagacagaggctactactctttcagcacagctgacactattccagagagacacaactggactttcagcagaaaatgctgagctcaagataaggttgcaggccatggagcagcaggctcagctgcgtgacgctctaaatgatgcactgaggcaagaagtggagaggcttaagatagcaacgggcgagatgtcgaagtccaataacgagcatttcaatatgggaatgcagcacgtctcctacagcccttcattcttccagctctcggagcaacacacaatgcagcagcatggaaacattcagctgccgcatcatttccaacagcctccgctgactgtcccgagccaccagatgctatcccaccccaactccctctcgaacatggtgcagccaagactcgcttgggcggctccaggggctggacattgggaaaggatccatggctgtgaagtcggaggctgaggtcgtggtgaagtcggagggcagctctatatctgcgggtgaaagcaacaccaccttctagctatacaatacgtctgccttccaagaagcctttgtttggtttagagttcttcttttgttcatagtctgacatccttgaactgcttcctccttccctgtagtttttttattccattcgttatatctagttaccattgatcggttgtgtcgatcgttgttgtcgtggtggctgattttatagggacattggtgtgttggttttgagtttgttatgtgtgtggtatggttggttgtttcgagctagtgactgagagggcaccgagtgattttttggcagattttcttttctccacctgtcttagttttgttatagaacaaccatgatttctccttctgggaatgtgtacattgcgtgaagtgtgttgtttcaggctatct

SEQ ID NO: 26768 - protein, 246 aa, Zea mays subsp. mays
  peptide (1)..(246): Ceres Seq. ID no. 12373263
  misc_feature (27)..(173): NCBI GI NO: 25453519 NR Description: b-Zip DNA binding protein
  misc_feature (27)..(173): NCBI GI NO: 15226727 NR Description: bZip DNA binding protein; protein id: At2g40620
  misc_feature (42)..(157): NCBI GI NO: 8777512 NR Description: bZIP transcriptional activator RSG
  misc_feature (109)..(173): NCBI GI NO: 34394739 NR Description: putative transcription activator RF2a
  misc_feature (68)..(173): NCBI GI NO: 39579226 NR Description: bZIP transcription factor RF2b
  misc_feature (12)..(67): NCBI GI NO: 27375632 NR Description: blr0521 [Bradyrhizobium japonicum]
  misc_feature (3)..(75): NCBI GI NO: 27375632 NR Description: blr0521 [Bradyrhizobium japonicum]
TPSPDQRETRRGADLPVAMAMPPKPGDPPQRSPARSPNLNLPCPLPPVPGGAPPPPQQQPGAGLPPPRVGHHRRARSEVAFRFPDDLPGGGGGGFDEIGSEDDLFSTFMDMDKIAGADRDRAAETSSPPRPAKHRHSVSFDGFGMGAAAGGPGGQQDGGGGVFGEVMEAKKAMCFRAALRARRHRSQARQKNYCKQAICSTVKGKKSSIYNRIGAEGSNSSDRGYYSFSTADTIPERHNWTFSRKC

SEQ ID NO: 26769 - protein, 228 aa, Zea mays subsp. mays
  peptide (1)..(228): Ceres Seq. ID no. 12373264
  misc_feature (9)..(155): NCBI GI NO: 25453519 NR Description: b-Zip DNA binding protein
  misc_feature (9)..(155): NCBI GI NO: 15226727 NR Description: bZip DNA binding protein; protein id: At2g40620
  misc_feature (24)..(139): NCBI GI NO: 8777512 NR Description: bZIP transcriptional activator RSG
  misc_feature (91)..(155): NCBI GI NO: 34394739 NR Description: putative transcription activator RF2a
  misc_feature (50)..(155): NCBI GI NO: 39579226 NR Description: bZIP transcription factor RF2b
  misc_feature (1)..(49): NCBI GI NO: 27375632 NR Description: blr0521 [Bradyrhizobium japonicum]
  misc_feature (1)..(57): NCBI GI NO: 27375632 NR Description: blr0521 [Bradyrhizobium japonicum]
MAMPPKPGDPPQRSPARSPNLNLPCPLPPVPGGAPPPPQQQPGAGLPPPRVGHHRRARSEVAFRFPDDLPGGGGGGFDEIGSEDDLFSTFMDMDKIAGADRDRAAETSSPPRPAKHRHSVSFDGFGMGAAAGGPGGQQDGGGGVFGEVMEAKKAMCFRAALRARRHRSQARQKNYCKQAICSTVKGKKSSIYNRIGAEGSNSSDRGYYSFSTADTIPERHNWTFSRKC

SEQ ID NO: 26770 - protein, 226 aa, Zea mays subsp. mays
  peptide (1)..(226): Ceres Seq. ID no. 12373265
  misc_feature (7)..(153): NCBI GI NO: 25453519 NR Description: b-Zip DNA binding protein
  misc_feature (7)..(153): NCBI GI NO: 15226727 NR Description: bZip DNA binding protein; protein id: At2g40620
  misc_feature (22)..(137): NCBI GI NO: 8777512 NR Description: bZIP transcriptional activator RSG
  misc_feature (89)..(153): NCBI GI NO: 34394739 NR Description: putative transcription activator RF2a
  misc_feature (48)..(153): NCBI GI NO: 39579226 NR Description: bZIP transcription factor RF2b
  misc_feature (1)..(47): NCBI GI NO: 27375632 NR Description: blr0521 [Bradyrhizobium japonicum]
  misc_feature (1)..(55): NCBI GI NO: 27375632 NR Description: blr0521 [Bradyrhizobium japonicum]
MPPKPGDPPQRSPARSPNLNLPCPLPPVPGGAPPPPQQQPGAGLPPPRVGHHRRARSEVAFRFPDDLPGGGGGGFDEIGSEDDLFSTFMDMDKIAGADRDRAAETSSPPRPAKHRHSVSFDGFGMGAAAGGPGGQQDGGGGVFGEVMEAKKAMCFRAALRARRHRSQARQKNYCKQAICSTVKGKKSSIYNRIGAEGSNSSDRGYYSFSTADTIPERHNWTFSRKC

SEQ ID NO: 26771 - DNA, 1414 bp, Zea mays subsp. mays
  misc_feature (1)..(1414): Ceres Seq. ID no. 12373258
aactgaaactgtgtcattgtctgtcagtgctcgccgcgcggatctagggggaggggggccgtgcccggcgcggacgccgggatgccgatctgcgcgccgtcgtccgactcctcggcctcggcctcgtcgggcttgggcgcccgcgtctgggtgctccacgggctagcgctcggcgcggcggccgcggccgctgccgttgcgtacctgtaccggcggccgaccgggttccgcagccgcgcggtggggatcatacccgcgcgcttcgcctccacgcgcttcgagggcaagccgctcgttcccatcctcggcaagcccatgatccagagaacatgggaaagagttatgctagcttcttcgttggaccatgttgttgtggcaacggatgatgagagaattgcagaatgctgtcgaggatttggagctgatgttataatgacatcagcatcttgcaaaaacggatctgaacgctgctgtgaggcactaaagaagcttgataagcactatgatattgttgtcaatattcaaggagatgagcctctcattgaaccagagataatagatggtgtagttatgtcactgcagcgagctcctgatgcagtcttcagcacagctgttacttcactgaaaccagaagatgcattcgatacaaacagggtgaagtgtgttgtggataatctgggctacgcaatatacttttcaagagggctgattccattcaataaatcagggaacgccaatccaaaatatccatatcttcttcatcttggaatcgcgggctttgattcaaaatttttgaagatatatccagaacttccaccaacaccattacaaatggaagaggacctagagcaactaaaagttcttgaaaatggctataggatgaaggtgatcaaagtggaccatgatgcccatggtgtggatgcacccgaggacgttgagaaaatcgaagcactgatgcgaacgagaaacattcagtagaaaacgaagagaaagcaagtgctttgcattgctatcggcgttggcttggtgggatacttttggttgtgctttcccgtcttctgaatagcatgataccaagtgaagttggtgcatcacttcttgaagttttgtgcttgctaaaacgttcagtgattggatatgtcacttgcattagtcctcaatcagcagttcagcgcgcaggtggattgtatctgtacttcagtagttagtagcattactttcagtcttctttacattgaaaaacaaatcgtttctggagatgaagcaattggacagtgtaaaacaaaaggctaaagacccatccatgccgcgaggcgtgattgatataaggccagactcatcggaactttcattagacttccatttacatgtaataagttttcatatatacaatgttgatgatgtatacaatttt

SEQ ID NO: 26772 - protein, 298 aa, Zea mays subsp. mays
  peptide (1)..(298): Ceres Seq. ID no. 12373259
  misc_feature (54)..(269): Pfam Name: Pfam Description:  Cytidylyltransferase
  misc_feature (1)..(298): NCBI GI NO: 7688435 NR Description: CMP-KDO synthetase [Zea mays]
  misc_feature (57)..(292): NCBI GI NO: 7688437 NR Description: CMP-KDO synthetase [Zea mays]
  misc_feature (11)..(297): NCBI GI NO: 30695393 NR Description: CMP-KDO synthetase -related [Arabidopsis thaliana]
  misc_feature (51)..(289): NCBI GI NO: 14194887 NR Description: 3-DEOXY-MANNO-OCTULOSONATE CYTIDYLYLTRANSFERASE
  misc_feature (51)..(289): NCBI GI NO: 15835072 NR Description: 3-deoxy-manno-octulosonate cytidylyltransferase
  misc_feature (51)..(289): NCBI GI NO: 1361311 NR Description: CMP-2-keto-3-deoxyoctulosonic acid synthetase homolog
  misc_feature (51)..(289): NCBI GI NO: 15604902 NR Description: CMP-2-keto-3-deoxyoctulosonic acid synthetase
  misc_feature (49)..(289): NCBI GI NO: 29840354 NR Description: 3-deoxy-D-manno-octulosonate cytidylyltransferase
  misc_feature (48)..(288): NCBI GI NO: 39996994 NR Description: 3-deoxy-D-manno-octulosonate cytidylyltransferase
  misc_feature (54)..(298): NCBI GI NO: 19704142 NR Description: 3-deoxy-manno-octulosonate cytidylyltransferase
MPICAPSSDSSASASSGLGARVWVLHGLALGAAAAAAAVAYLYRRPTGFRSRAVGIIPARFASTRFEGKPLVPILGKPMIQRTWERVMLASSLDHVVVATDDERIAECCRGFGADVIMTSASCKNGSERCCEALKKLDKHYDIVVNIQGDEPLIEPEIIDGVVMSLQRAPDAVFSTAVTSLKPEDAFDTNRVKCVVDNLGYAIYFSRGLIPFNKSGNANPKYPYLLHLGIAGFDSKFLKIYPELPPTPLQMEEDLEQLKVLENGYRMKVIKVDHDAHGVDAPEDVEKIEALMRTRNIQ

SEQ ID NO: 26773 - protein, 220 aa, Zea mays subsp. mays
  peptide (1)..(220): Ceres Seq. ID no. 12373260
  misc_feature (1)..(191): Pfam Name: Pfam Description:  Cytidylyltransferase
  misc_feature (1)..(220): NCBI GI NO: 7688435 NR Description: CMP-KDO synthetase [Zea mays]
  misc_feature (1)..(214): NCBI GI NO: 7688437 NR Description: CMP-KDO synthetase [Zea mays]
  misc_feature (1)..(219): NCBI GI NO: 30695393 NR Description: CMP-KDO synthetase -related [Arabidopsis thaliana]
  misc_feature (1)..(211): NCBI GI NO: 14194887 NR Description: 3-DEOXY-MANNO-OCTULOSONATE CYTIDYLYLTRANSFERASE
  misc_feature (1)..(211): NCBI GI NO: 15835072 NR Description: 3-deoxy-manno-octulosonate cytidylyltransferase
  misc_feature (1)..(211): NCBI GI NO: 1361311 NR Description: CMP-2-keto-3-deoxyoctulosonic acid synthetase homolog
  misc_feature (1)..(211): NCBI GI NO: 15604902 NR Description: CMP-2-keto-3-deoxyoctulosonic acid synthetase
  misc_feature (1)..(211): NCBI GI NO: 29840354 NR Description: 3-deoxy-D-manno-octulosonate cytidylyltransferase
  misc_feature (1)..(210): NCBI GI NO: 39996994 NR Description: 3-deoxy-D-manno-octulosonate cytidylyltransferase
  misc_feature (1)..(220): NCBI GI NO: 19704142 NR Description: 3-deoxy-manno-octulosonate cytidylyltransferase
MIQRTWERVMLASSLDHVVVATDDERIAECCRGFGADVIMTSASCKNGSERCCEALKKLDKHYDIVVNIQGDEPLIEPEIIDGVVMSLQRAPDAVFSTAVTSLKPEDAFDTNRVKCVVDNLGYAIYFSRGLIPFNKSGNANPKYPYLLHLGIAGFDSKFLKIYPELPPTPLQMEEDLEQLKVLENGYRMKVIKVDHDAHGVDAPEDVEKIEALMRTRNIQ

SEQ ID NO: 26774 - protein, 211 aa, Zea mays subsp. mays
  peptide (1)..(211): Ceres Seq. ID no. 12373261
  misc_feature (1)..(182): Pfam Name: Pfam Description:  Cytidylyltransferase
  misc_feature (1)..(211): NCBI GI NO: 7688435 NR Description: CMP-KDO synthetase [Zea mays]
  misc_feature (1)..(205): NCBI GI NO: 7688437 NR Description: CMP-KDO synthetase [Zea mays]
  misc_feature (1)..(210): NCBI GI NO: 30695393 NR Description: CMP-KDO synthetase -related [Arabidopsis thaliana]
  misc_feature (1)..(202): NCBI GI NO: 14194887 NR Description: 3-DEOXY-MANNO-OCTULOSONATE CYTIDYLYLTRANSFERASE
  misc_feature (1)..(202): NCBI GI NO: 15835072 NR Description: 3-deoxy-manno-octulosonate cytidylyltransferase
  misc_feature (1)..(202): NCBI GI NO: 1361311 NR Description: CMP-2-keto-3-deoxyoctulosonic acid synthetase homolog
  misc_feature (1)..(202): NCBI GI NO: 15604902 NR Description: CMP-2-keto-3-deoxyoctulosonic acid synthetase
  misc_feature (1)..(202): NCBI GI NO: 29840354 NR Description: 3-deoxy-D-manno-octulosonate cytidylyltransferase
  misc_feature (1)..(201): NCBI GI NO: 39996994 NR Description: 3-deoxy-D-manno-octulosonate cytidylyltransferase
  misc_feature (1)..(211): NCBI GI NO: 19704142 NR Description: 3-deoxy-manno-octulosonate cytidylyltransferase
MLASSLDHVVVATDDERIAECCRGFGADVIMTSASCKNGSERCCEALKKLDKHYDIVVNIQGDEPLIEPEIIDGVVMSLQRAPDAVFSTAVTSLKPEDAFDTNRVKCVVDNLGYAIYFSRGLIPFNKSGNANPKYPYLLHLGIAGFDSKFLKIYPELPPTPLQMEEDLEQLKVLENGYRMKVIKVDHDAHGVDAPEDVEKIEALMRTRNIQ

SEQ ID NO: 26775 - DNA, 1153 bp, Zea mays subsp. mays
  misc_feature (1)..(1153): Ceres Seq. ID no. 12344416
aacctcaccaactcccctacaagccgccgggccgaacgaccgaagcatccacttccaaagtgtactgtttgctgcccgcctggcgcctgcccccataactactctgccaccaatccggggaggaatcaacctagcggtaagcggacatggcggcggcgaagatagcgccgtcgatgctctcgtcggactttgccaacctcgcttcggaggctgagcgcatggtccgcctaggcgccgactggctacatatggacatcatggatgggcacttcgttcctaacctgactattggggctccggtgatccagagcttgaggaaacataccaaagcatatttggactgccatcttatggtcacaaagccttcagattacgtagaaccatttggaaaggctggcgcttctggattcacattccatatagaagttgctagagacaactggcaagatctcatccaaagcattaaatcaaagggtatgcggcctggtgtatcattgaggccaggtactccagtggaggaagtttttcccctggtggaagcagaaaatccggtagaattggttcttgtgatgacagtcgagcctggttttggtggtcagaaatttatgccagaaatgatggataaggtgcgcacactgagaaagaagtacccttcccttgacatagaggttgatggtggtctaggtccttcaaccatagacgtggccgcatctgctggggccaattgcatcgtcgctggaagctctatatttggcgctgcggacccaggagccatcatatctgtgctgaggaagagcgtcgagggctctcagaacaaaaactgattttggtgtttctgctgtaaagtactccctccgtttttttttattcgtcgcgttttagttcaaacatgaactagcggacgactgatattcgagaatggagggagtacttcgaccctgcacgtcagatgagctgatcctcacattgcaccggaactgttcggcgagaataaaatttgatgttagaccttgaacgtcttttgcaatatgcttttttgtctgccctgattatattctaccccttcatataacgcttgatgtgccgtcaagaaatggcgaaacattggcatgactgtaaacaagaaactaaatacgggtataaaaatcgtgtc

SEQ ID NO: 26776 - protein, 225 aa, Zea mays subsp. mays
  peptide (1)..(225): Ceres Seq. ID no. 12344417
  misc_feature (5)..(205): Pfam Name: Pfam Description:  Ribulose-phosphate 3 epimerase family
  misc_feature (1)..(225): NCBI GI NO: 28373310 NR Description: Chain A
  misc_feature (1)..(222): NCBI GI NO: 18395962 NR Description: putative D-ribulose-5-phosphate 3-epimerase
  misc_feature (5)..(222): NCBI GI NO: 15221735 NR Description: putative D-ribulose-5-phosphate-3-epimerase
  misc_feature (1)..(222): NCBI GI NO: 6091725 NR Description: putative D-ribulose-5-phosphate 3-epimerase
  misc_feature (1)..(222): NCBI GI NO: 19114917 NR Description: putative ribulose phosphate 3-epimerase
  misc_feature (6)..(224): NCBI GI NO: 17552948 NR Description: D-ribulose-5-Phosphate 3-epimerase (24.4 kD)
  misc_feature (2)..(225): NCBI GI NO: 40385883 NR Description: ribulose-5-phosphate-3-epimerase isoform 1
  misc_feature (2)..(225): NCBI GI NO: 27532955 NR Description: RIKEN cDNA 5730518J08 [Mus musculus]
  misc_feature (6)..(218): NCBI GI NO: 6322341 NR Description: D-ribulose-5-Phosphate 3-epimerase; Rpe1p
  misc_feature (6)..(224): NCBI GI NO: 7498654 NR Description: hypothetical protein F08F8
MAAAKIAPSMLSSDFANLASEAERMVRLGADWLHMDIMDGHFVPNLTIGAPVIQSLRKHTKAYLDCHLMVTKPSDYVEPFGKAGASGFTFHIEVARDNWQDLIQSIKSKGMRPGVSLRPGTPVEEVFPLVEAENPVELVLVMTVEPGFGGQKFMPEMMDKVRTLRKKYPSLDIEVDGGLGPSTIDVAASAGANCIVAGSSIFGAADPGAIISVLRKSVEGSQNKN

SEQ ID NO: 26777 - protein, 216 aa, Zea mays subsp. mays
  peptide (1)..(216): Ceres Seq. ID no. 12344418
  misc_feature (1)..(196): Pfam Name: Pfam Description:  Ribulose-phosphate 3 epimerase family
  misc_feature (1)..(216): NCBI GI NO: 28373310 NR Description: Chain A
  misc_feature (1)..(213): NCBI GI NO: 18395962 NR Description: putative D-ribulose-5-phosphate 3-epimerase
  misc_feature (1)..(213): NCBI GI NO: 15221735 NR Description: putative D-ribulose-5-phosphate-3-epimerase
  misc_feature (1)..(213): NCBI GI NO: 6091725 NR Description: putative D-ribulose-5-phosphate 3-epimerase
  misc_feature (1)..(213): NCBI GI NO: 19114917 NR Description: putative ribulose phosphate 3-epimerase
  misc_feature (1)..(215): NCBI GI NO: 17552948 NR Description: D-ribulose-5-Phosphate 3-epimerase (24.4 kD)
  misc_feature (1)..(216): NCBI GI NO: 40385883 NR Description: ribulose-5-phosphate-3-epimerase isoform 1
  misc_feature (1)..(216): NCBI GI NO: 27532955 NR Description: RIKEN cDNA 5730518J08 [Mus musculus]
  misc_feature (1)..(209): NCBI GI NO: 6322341 NR Description: D-ribulose-5-Phosphate 3-epimerase; Rpe1p
  misc_feature (1)..(215): NCBI GI NO: 7498654 NR Description: hypothetical protein F08F8
MLSSDFANLASEAERMVRLGADWLHMDIMDGHFVPNLTIGAPVIQSLRKHTKAYLDCHLMVTKPSDYVEPFGKAGASGFTFHIEVARDNWQDLIQSIKSKGMRPGVSLRPGTPVEEVFPLVEAENPVELVLVMTVEPGFGGQKFMPEMMDKVRTLRKKYPSLDIEVDGGLGPSTIDVAASAGANCIVAGSSIFGAADPGAIISVLRKSVEGSQNKN

SEQ ID NO: 26778 - protein, 201 aa, Zea mays subsp. mays
  peptide (1)..(201): Ceres Seq. ID no. 12344419
  misc_feature (1)..(181): Pfam Name: Pfam Description:  Ribulose-phosphate 3 epimerase family
  misc_feature (1)..(201): NCBI GI NO: 28373310 NR Description: Chain A
  misc_feature (1)..(198): NCBI GI NO: 18395962 NR Description: putative D-ribulose-5-phosphate 3-epimerase
  misc_feature (1)..(198): NCBI GI NO: 15221735 NR Description: putative D-ribulose-5-phosphate-3-epimerase
  misc_feature (1)..(198): NCBI GI NO: 6091725 NR Description: putative D-ribulose-5-phosphate 3-epimerase
  misc_feature (1)..(198): NCBI GI NO: 19114917 NR Description: putative ribulose phosphate 3-epimerase
  misc_feature (1)..(200): NCBI GI NO: 17552948 NR Description: D-ribulose-5-Phosphate 3-epimerase (24.4 kD)
  misc_feature (1)..(201): NCBI GI NO: 40385883 NR Description: ribulose-5-phosphate-3-epimerase isoform 1
  misc_feature (1)..(201): NCBI GI NO: 27532955 NR Description: RIKEN cDNA 5730518J08 [Mus musculus]
  misc_feature (1)..(194): NCBI GI NO: 6322341 NR Description: D-ribulose-5-Phosphate 3-epimerase; Rpe1p
  misc_feature (1)..(200): NCBI GI NO: 7498654 NR Description: hypothetical protein F08F8
MVRLGADWLHMDIMDGHFVPNLTIGAPVIQSLRKHTKAYLDCHLMVTKPSDYVEPFGKAGASGFTFHIEVARDNWQDLIQSIKSKGMRPGVSLRPGTPVEEVFPLVEAENPVELVLVMTVEPGFGGQKFMPEMMDKVRTLRKKYPSLDIEVDGGLGPSTIDVAASAGANCIVAGSSIFGAADPGAIISVLRKSVEGSQNKN

SEQ ID NO: 26779 - DNA, 883 bp, Zea mays subsp. mays
  misc_feature (1)..(883): Ceres Seq. ID no. 12403563
actagttgtcgctgctgccctgttgcggcgacgactccgtgactcctagtccctacccagatcggcgcccgacgcaaggccgagcaggcgatggccgcagcggcgtcaatggggcacccttacgcgccagccgagctggaccttccgggtttcgtgccgctgaagctgtcccaggtcgagatcctcgtgtcctacctcggcgcctccgtcttcgttttcctcgccgtctggctcgtctccggaagatgtgtcagattatccaagaccgaccgtctgctcatgtgctggtgggcattcacagggttgacccacataatgatcgaggggcccttcgtcttcactcctgatttcttcaagaaggagaaccccaatttctttgatgaagtttggaaagagtatagtaagggagactctaggtatgttgctagggacactgcaactgttacggtcgaagggatcaccgctgtattggaaggccctgcatcactacttgctgtctacgctattgcatccaggaagtccttcagccacattctccagttcgccgtctgtctgggccagctctacggatgcctggtttacttcatcaccgcgtacttggacggcttcaacttctgggtcggcccgttctacttctgggcgtatttcattggcgcaaacagcttctggatctggataccgatgctcatcgccataaggtcctggaagaaaacttgcgccgcgtttcaagctgagaaggtgaagaagaccaaataaaagctgtctttagctaccgttttattggagaccgtcattttgatggcttaaattcttgtgttggttggtactggaaactgcatgatgtactctttgctcaaacaaatgaagaccggtttacaaattc

SEQ ID NO: 26780 - protein, 221 aa, Zea mays subsp. mays
  peptide (1)..(221): Ceres Seq. ID no. 12403564
  misc_feature (23)..(218): Pfam Name: Pfam Description:  Emopamil binding protein
  misc_feature (9)..(221): NCBI GI NO: 34894044 NR Description: putative C-8,7 sterol isomerase
  misc_feature (7)..(211): NCBI GI NO: 15223758 NR Description: C-8,7 sterol isomerase; protein id: At1g20050
  misc_feature (7)..(211): NCBI GI NO: 21554213 NR Description: C-8,7 sterol isomerase [Arabidopsis thaliana]
  misc_feature (7)..(211): NCBI GI NO: 4098989 NR Description: phenylalkylamine binding protein homolog
  misc_feature (3)..(221): NCBI GI NO: 18202586 NR Description: 3-beta-hydroxysteroid-delta
  misc_feature (1)..(219): NCBI GI NO: 33417065 NR Description: Unknown (protein for MGC:68833) [Xenopus laevis]
  misc_feature (1)..(221): NCBI GI NO: 5729810 NR Description: emopamil-binding protein
  misc_feature (9)..(221): NCBI GI NO: 16923992 NR Description: phenylalkylamine Ca2+ antagonist
  misc_feature (9)..(221): NCBI GI NO: 6681255 NR Description: phenylalkylamine Ca2+ antagonist
  misc_feature (9)..(206): NCBI GI NO: 12848900 NR Description: unnamed protein product [Mus musculus]
MAAAASMGHPYAPAELDLPGFVPLKLSQVEILVSYLGASVFVFLAVWLVSGRCVRLSKTDRLLMCWWAFTGLTHIMIEGPFVFTPDFFKKENPNFFDEVWKEYSKGDSRYVARDTATVTVEGITAVLEGPASLLAVYAIASRKSFSHILQFAVCLGQLYGCLVYFITAYLDGFNFWVGPFYFWAYFIGANSFWIWIPMLIAIRSWKKTCAAFQAEKVKKTK

SEQ ID NO: 26781 - protein, 215 aa, Zea mays subsp. mays
  peptide (1)..(215): Ceres Seq. ID no. 12403565
  misc_feature (17)..(212): Pfam Name: Pfam Description:  Emopamil binding protein
  misc_feature (3)..(215): NCBI GI NO: 34894044 NR Description: putative C-8,7 sterol isomerase
  misc_feature (1)..(205): NCBI GI NO: 15223758 NR Description: C-8,7 sterol isomerase; protein id: At1g20050
  misc_feature (1)..(205): NCBI GI NO: 21554213 NR Description: C-8,7 sterol isomerase [Arabidopsis thaliana]
  misc_feature (1)..(205): NCBI GI NO: 4098989 NR Description: phenylalkylamine binding protein homolog
  misc_feature (1)..(215): NCBI GI NO: 18202586 NR Description: 3-beta-hydroxysteroid-delta
  misc_feature (1)..(213): NCBI GI NO: 33417065 NR Description: Unknown (protein for MGC:68833) [Xenopus laevis]
  misc_feature (1)..(215): NCBI GI NO: 5729810 NR Description: emopamil-binding protein
  misc_feature (3)..(215): NCBI GI NO: 16923992 NR Description: phenylalkylamine Ca2+ antagonist
  misc_feature (3)..(215): NCBI GI NO: 6681255 NR Description: phenylalkylamine Ca2+ antagonist
  misc_feature (3)..(200): NCBI GI NO: 12848900 NR Description: unnamed protein product [Mus musculus]
MGHPYAPAELDLPGFVPLKLSQVEILVSYLGASVFVFLAVWLVSGRCVRLSKTDRLLMCWWAFTGLTHIMIEGPFVFTPDFFKKENPNFFDEVWKEYSKGDSRYVARDTATVTVEGITAVLEGPASLLAVYAIASRKSFSHILQFAVCLGQLYGCLVYFITAYLDGFNFWVGPFYFWAYFIGANSFWIWIPMLIAIRSWKKTCAAFQAEKVKKTK

SEQ ID NO: 26782 - protein, 158 aa, Zea mays subsp. mays
  peptide (1)..(158): Ceres Seq. ID no. 12403566
  misc_feature (1)..(155): Pfam Name: Pfam Description:  Emopamil binding protein
  misc_feature (1)..(158): NCBI GI NO: 34894044 NR Description: putative C-8,7 sterol isomerase
  misc_feature (1)..(148): NCBI GI NO: 15223758 NR Description: C-8,7 sterol isomerase; protein id: At1g20050
  misc_feature (1)..(148): NCBI GI NO: 21554213 NR Description: C-8,7 sterol isomerase [Arabidopsis thaliana]
  misc_feature (1)..(148): NCBI GI NO: 4098989 NR Description: phenylalkylamine binding protein homolog
  misc_feature (1)..(158): NCBI GI NO: 18202586 NR Description: 3-beta-hydroxysteroid-delta
  misc_feature (1)..(156): NCBI GI NO: 33417065 NR Description: Unknown (protein for MGC:68833) [Xenopus laevis]
  misc_feature (1)..(158): NCBI GI NO: 5729810 NR Description: emopamil-binding protein
  misc_feature (1)..(158): NCBI GI NO: 16923992 NR Description: phenylalkylamine Ca2+ antagonist
  misc_feature (1)..(158): NCBI GI NO: 6681255 NR Description: phenylalkylamine Ca2+ antagonist
  misc_feature (1)..(143): NCBI GI NO: 12848900 NR Description: unnamed protein product [Mus musculus]
MCWWAFTGLTHIMIEGPFVFTPDFFKKENPNFFDEVWKEYSKGDSRYVARDTATVTVEGITAVLEGPASLLAVYAIASRKSFSHILQFAVCLGQLYGCLVYFITAYLDGFNFWVGPFYFWAYFIGANSFWIWIPMLIAIRSWKKTCAAFQAEKVKKTK

SEQ ID NO: 26783 - DNA, 2805 bp, Zea mays subsp. mays; identical to SEQ ID NO: 19692
  misc_feature (1)..(2805): Ceres Seq. ID no. 13600310

SEQ ID NO: 26784 - protein, 849 aa, Zea mays subsp. mays; identical to SEQ ID NO: 19693
  peptide (1)..(849): Ceres Seq. ID no. 13600311
  misc_feature (50)..(336): Pfam Name: Pfam Description:  Myosin tail
  misc_feature (33)..(697): NCBI GI NO: 25404429 NR Description: kinesin-like protein, 73641-79546
  misc_feature (33)..(697): NCBI GI NO: 30696876 NR Description: kinesin-related protein [Arabidopsis thaliana]
  misc_feature (33)..(386): NCBI GI NO: 6633835 NR Description: F2K11.1 [Arabidopsis thaliana]
  misc_feature (388)..(697): NCBI GI NO: 6633835 NR Description: F2K11.1 [Arabidopsis thaliana]
  misc_feature (94)..(832): NCBI GI NO: 12324217 NR Description: kinesin-related protein; 103921-99132
  misc_feature (94)..(832): NCBI GI NO: 22330608 NR Description: kinesin-related protein [Arabidopsis thaliana]
  misc_feature (94)..(751): NCBI GI NO: 25406299 NR Description: protein kinesin F2P9.27
  misc_feature (92)..(474): NCBI GI NO: 6714287 NR Description: F15H18.10 [Arabidopsis thaliana]
  misc_feature (482)..(846): NCBI GI NO: 6714287 NR Description: F15H18.10 [Arabidopsis thaliana]
  misc_feature (153)..(842): NCBI GI NO: 22329655 NR Description: kinesin-related protein [Arabidopsis thaliana]

SEQ ID NO: 26785 - protein, 842 aa, Zea mays subsp. mays; identical to SEQ ID NO: 19694
  peptide (1)..(842): Ceres Seq. ID no. 13600312
  misc_feature (43)..(329): Pfam Name: Pfam Description:  Myosin tail
  misc_feature (26)..(690): NCBI GI NO: 25404429 NR Description: kinesin-like protein, 73641-79546
  misc_feature (26)..(690): NCBI GI NO: 30696876 NR Description: kinesin-related protein [Arabidopsis thaliana]
  misc_feature (26)..(379): NCBI GI NO: 6633835 NR Description: F2K11.1 [Arabidopsis thaliana]
  misc_feature (381)..(690): NCBI GI NO: 6633835 NR Description: F2K11.1 [Arabidopsis thaliana]
  misc_feature (87)..(825): NCBI GI NO: 12324217 NR Description: kinesin-related protein; 103921-99132
  misc_feature (87)..(825): NCBI GI NO: 22330608 NR Description: kinesin-related protein [Arabidopsis thaliana]
  misc_feature (87)..(744): NCBI GI NO: 25406299 NR Description: protein kinesin F2P9.27
  misc_feature (85)..(467): NCBI GI NO: 6714287 NR Description: F15H18.10 [Arabidopsis thaliana]
  misc_feature (475)..(839): NCBI GI NO: 6714287 NR Description: F15H18.10 [Arabidopsis thaliana]
  misc_feature (146)..(835): NCBI GI NO: 22329655 NR Description: kinesin-related protein [Arabidopsis thaliana]

SEQ ID NO: 26786 - protein, 799 aa, Zea mays subsp. mays; identical to SEQ ID NO: 19695
  peptide (1)..(799): Ceres Seq. ID no. 13600313
  misc_feature (1)..(286): Pfam Name: Pfam Description:  Myosin tail
  misc_feature (1)..(647): NCBI GI NO: 25404429 NR Description: kinesin-like protein, 73641-79546
  misc_feature (1)..(647): NCBI GI NO: 30696876 NR Description: kinesin-related protein [Arabidopsis thaliana]
  misc_feature (1)..(336): NCBI GI NO: 6633835 NR Description: F2K11.1 [Arabidopsis thaliana]
  misc_feature (338)..(647): NCBI GI NO: 6633835 NR Description: F2K11.1 [Arabidopsis thaliana]
  misc_feature (44)..(782): NCBI GI NO: 12324217 NR Description: kinesin-related protein; 103921-99132
  misc_feature (44)..(782): NCBI GI NO: 22330608 NR Description: kinesin-related protein [Arabidopsis thaliana]
  misc_feature (44)..(701): NCBI GI NO: 25406299 NR Description: protein kinesin F2P9.27
  misc_feature (42)..(424): NCBI GI NO: 6714287 NR Description: F15H18.10 [Arabidopsis thaliana]
  misc_feature (432)..(796): NCBI GI NO: 6714287 NR Description: F15H18.10 [Arabidopsis thaliana]
  misc_feature (103)..(792): NCBI GI NO: 22329655 NR Description: kinesin-related protein [Arabidopsis thaliana]

SEQ ID NO: 26787 - DNA, 1844 bp, Zea mays subsp. mays
  misc_feature (1)..(1844): Ceres Seq. ID no. 12409726
atgtgcgggagccttatggtcatctgcctcctctaaaatatctgtcttgcaaacgaaaatagatggacggcagtccgtaggccactccacctccacgatacaccacggcaccactcaacctgtcaggtagacttctctctcccgcggaagctcttacctccggctccgcaagcaagacttcatggagaagacggtcgttctgtaccccggcctatccgtcagccatttcgtcccgatgatgcagctcgccgacatgttcctagaggagggttacgctgttgcggtcgcgctcatcgacctcaccttggaccaagacgccgccttggcagacgccgtcgaccgcgtcgcctccgccaagccgtccgtcgccttccacaggctccttcggatccagaatcctcccactgtcacagacgacgggggagccgttcctctggtacttccagatactgaaacgctacaacgaccgcctccgtgagttcctctgctccctgcctccccgaagcgtccacgcggtgatcgtggacgcgctttccgtcgacgcgctcgacgtcaccaaggagcttgggctcccggcctacaccttctgcgccgccaacgcctccgcgctcgccgtgttcctccagcttccttggatccgcgcggaaggccaaccaagcttcaaggagctcggagacgcccccgtcaacttctccggcgtgcctcccattccggcgtcacacctcgtgcgccagatgctggacccggagagcgagatatacaccgcgatgatgaacgcgatgcgaaggggagcggaggaccccgacggcatcttggtgaacacgttcgcgtcgctggaagctcgggcggtgggagctctccgggacccacagctggttcctcctagcagcggcagagcacgcaggacgcctccggtgtactgcgtcgggccactggtcgccggtgccggcgcagaggcaaaagagaagcacgaatgcctggcgtggctcgacgggcaaccagagcgcagcgtggtgttgctctgcttcgggagcataggcgcggccacccactcggaagagcagctcagggaggttgccgtcggcctgcagagatccggccaccgtttcctgtgggtggtgcgagccccgctgcgcggtgacaccgagaggctgttcgatccccgtgcggacaccgacctcgacgcccttctgccggacgggttcctcgaggccacaagagaccgcggcctggtcgtcaagcactgggcgccgcaggtggaagtgctcaaccatagggcgacaggcgttcgtgacgcactgtgggtggaactcggtgctggaaggtatcacggctggcgtgccgatgctttgctggccgatgtacgcggagcagaaaatgaacaagctgttcatggtggaggaagccatggtcggcgtggaaatggttggatggcagcaggggctggtcagtgctgaggaggtggaggccaaggtaaggttggtgttggaggagtccgaggaaggcaaccagctcaggacgcgggtggccgcgcataggaatgccgcgaccatggcccggaggggcggcggctcatcgcgcgctgcgtttggccagttcttgtcggacgccgccaaactcgcacgggagtagacgcgtacgcgctggatgcattgccgattgctgaatttcaccatcatcggttgtgattcgatgttgagaattgagatgaaactgcgatgcttgcatgtactctgtggtaacttttatttctatatctgtgagtgctcggcgttgcaacaggaccactatattacaacctttaatatcatacagacttctatatatgatagtacaatacttgc

SEQ ID NO: 26788 - protein, 240 aa, Zea mays subsp. mays
  peptide (1)..(240): Ceres Seq. ID no. 12409727
  misc_feature (1)..(184): Pfam Name: Pfam Description:  UDP-glucoronosyl and UDP-glucosyl transferase
  misc_feature (1)..(184): NCBI GI NO: 34908644 NR Description: putative flavonol 3-O-glucosyltransferase
  misc_feature (1)..(184): NCBI GI NO: 34910206 NR Description: putative flavonol glucosyltransferase
  misc_feature (1)..(184): NCBI GI NO: 34910204 NR Description: putative flavonol glucosyltransferase
  misc_feature (1)..(184): NCBI GI NO: 22535568 NR Description: putative glucosyltransferase
  misc_feature (1)..(141): NCBI GI NO: 34910222 NR Description: putative flavonol glucosyltransferase
  misc_feature (1)..(183): NCBI GI NO: 34910228 NR Description: putative flavonol glucosyltransferase
  misc_feature (1)..(184): NCBI GI NO: 34910218 NR Description: putative flavonol glucosyltransferase
  misc_feature (1)..(184): NCBI GI NO: 34910208 NR Description: putative flavonol glucosyltransferase
  misc_feature (25)..(184): NCBI GI NO: 34910222 NR Description: putative flavonol glucosyltransferase
  misc_feature (1)..(200): NCBI GI NO: 34394688 NR Description: putative glucosyltransferase
MLDPESEIYTAMMNAMRRGAEDPDGILVNTFASLEARAVGALRDPQLVPPSSGRARRTPPVYCVGPLVAGAGAEAKEKHECLAWLDGQPERSVVLLCFGSIGAATHSEEQLREVAVGLQRSGHRFLWVVRAPLRGDTERLFDPRADTDLDALLPDGFLEATRDRGLVVKHWAPQVEVLNHRATGVRDALWVELGAGRYHGWRADALLADVRGAENEQAVHGGGSHGRRGNGWMAAGAGQC

SEQ ID NO: 26789 - protein, 229 aa, Zea mays subsp. mays
  peptide (1)..(229): Ceres Seq. ID no. 12409728
  misc_feature (1)..(173): Pfam Name: Pfam Description:  UDP-glucoronosyl and UDP-glucosyl transferase
  misc_feature (1)..(173): NCBI GI NO: 34908644 NR Description: putative flavonol 3-O-glucosyltransferase
  misc_feature (1)..(173): NCBI GI NO: 34910206 NR Description: putative flavonol glucosyltransferase
  misc_feature (1)..(173): NCBI GI NO: 34910204 NR Description: putative flavonol glucosyltransferase
  misc_feature (1)..(173): NCBI GI NO: 22535568 NR Description: putative glucosyltransferase
  misc_feature (1)..(130): NCBI GI NO: 34910222 NR Description: putative flavonol glucosyltransferase
  misc_feature (1)..(172): NCBI GI NO: 34910228 NR Description: putative flavonol glucosyltransferase
  misc_feature (1)..(173): NCBI GI NO: 34910218 NR Description: putative flavonol glucosyltransferase
  misc_feature (1)..(173): NCBI GI NO: 34910208 NR Description: putative flavonol glucosyltransferase
  misc_feature (14)..(173): NCBI GI NO: 34910222 NR Description: putative flavonol glucosyltransferase
  misc_feature (1)..(189): NCBI GI NO: 34394688 NR Description: putative glucosyltransferase
MMNAMRRGAEDPDGILVNTFASLEARAVGALRDPQLVPPSSGRARRTPPVYCVGPLVAGAGAEAKEKHECLAWLDGQPERSVVLLCFGSIGAATHSEEQLREVAVGLQRSGHRFLWVVRAPLRGDTERLFDPRADTDLDALLPDGFLEATRDRGLVVKHWAPQVEVLNHRATGVRDALWVELGAGRYHGWRADALLADVRGAENEQAVHGGGSHGRRGNGWMAAGAGQC

SEQ ID NO: 26790 - protein, 228 aa, Zea mays subsp. mays
  peptide (1)..(228): Ceres Seq. ID no. 12409729
  misc_feature (1)..(172): Pfam Name: Pfam Description:  UDP-glucoronosyl and UDP-glucosyl transferase
  misc_feature (1)..(172): NCBI GI NO: 34908644 NR Description: putative flavonol 3-O-glucosyltransferase
  misc_feature (1)..(172): NCBI GI NO: 34910206 NR Description: putative flavonol glucosyltransferase
  misc_feature (1)..(172): NCBI GI NO: 34910204 NR Description: putative flavonol glucosyltransferase
  misc_feature (1)..(172): NCBI GI NO: 22535568 NR Description: putative glucosyltransferase
  misc_feature (1)..(129): NCBI GI NO: 34910222 NR Description: putative flavonol glucosyltransferase
  misc_feature (1)..(171): NCBI GI NO: 34910228 NR Description: putative flavonol glucosyltransferase
  misc_feature (1)..(172): NCBI GI NO: 34910218 NR Description: putative flavonol glucosyltransferase
  misc_feature (1)..(172): NCBI GI NO: 34910208 NR Description: putative flavonol glucosyltransferase
  misc_feature (13)..(172): NCBI GI NO: 34910222 NR Description: putative flavonol glucosyltransferase
  misc_feature (1)..(188): NCBI GI NO: 34394688 NR Description: putative glucosyltransferase
MNAMRRGAEDPDGILVNTFASLEARAVGALRDPQLVPPSSGRARRTPPVYCVGPLVAGAGAEAKEKHECLAWLDGQPERSVVLLCFGSIGAATHSEEQLREVAVGLQRSGHRFLWVVRAPLRGDTERLFDPRADTDLDALLPDGFLEATRDRGLVVKHWAPQVEVLNHRATGVRDALWVELGAGRYHGWRADALLADVRGAENEQAVHGGGSHGRRGNGWMAAGAGQC

SEQ ID NO: 26791 - DNA, 1277 bp, Zea mays subsp. mays
  misc_feature (1)..(1277): Ceres Seq. ID no. 12406953
agagccggccggtcgtcgtcgatccacatcaccattactccatctcctgataccgatcgagagctcctccctcgctccgggctgagtcgccggccggacggactcctccgatccgtgcggcgtcaggccggcccgccagctgggacatcccgtttgattcatcagccgtagtaggagccatggtcgaagctatttgatctatctctgagctgagctgggccggtaatttgatgatgcttgccggtgtgatcatgagtggatgataagagatgataagcggcaacctcaccaatgaagacctgggggccgggcgcaccaaggccgaggggccgacgaccgcggccggggccgtcgtcgcaaagagtcccgtgctgccgagctcccggcactggccgccgtcgacggagtccaggatcgtgcgcgtgtcgcgggtcttcggcggcaaggaccggcacagcaaggtgaggacggtcaaggggctgcgcgaccggcgcgtgcggctgtccgtgccgacggcgatacagctctacgacctccaggaccggctgggcctcagccagccgagcaaggtggtggactggctgctcgacgccgcgcagcacgagatcgacaagctgcctccgcttcagttcccaccgcaagcggcgcaggacctcgtcgcccatctgccgccgccatccatggtggcgcccttcgcagccgaccgagccgacggcgacaaacgccactgccacggcggcgtcaaagggctcatgggcctcaacaattccatccgcctcgtcaacgccaccatgccgctggctcacggcttgtactacacgcccgctcgtcttctactcgccggaaggcggcggattcaccatgaaagaagaagccaccggttatcagttcccagtacaaaatagcctcgaccactcgcaaggccagctctcactgagctcagctagaagcttccttcgccccggcaaccagggatgattaggtcactgatctctactgctccaagaaggtacgtagaagaataaagcttggtgtagtagtaatcaagtactcatttgaaggttccgtaacggttgtaactgcagttttgagatgctattgtttggtatgatcgagtagagggtctctagcatgcataattgaggttatttttgcaggacatgcaatgcaattcgttgcttcttttttatacaaggaagcaacgacaggtcatatgggtgtgtgtttttgtttgtattgtaataacaattttaataatccattcttgattttgtgtt

SEQ ID NO: 26792 - protein, 211 aa, Zea mays subsp. mays
  peptide (1)..(211): Ceres Seq. ID no. 12406954
  misc_feature (45)..(153): Pfam Name: Pfam Description:  TCP family transcription factor
  misc_feature (1)..(153): NCBI GI NO: 34909780 NR Description: P0512C01.32
  misc_feature (37)..(122): NCBI GI NO: 15239489 NR Description: DNA binding protein - like; protein id: At5g60970
  misc_feature (1)..(124): NCBI GI NO: 18396089 NR Description: expressed protein; protein id: At3g02150
  misc_feature (1)..(124): NCBI GI NO: 30678498 NR Description: TCP family transcription factor TFPD
  misc_feature (31)..(123): NCBI GI NO: 15241512 NR Description: putative helix-loop-helix DNA binding protein
  misc_feature (39)..(119): NCBI GI NO: 18397402 NR Description: expressed protein; protein id: At1g30210
  misc_feature (41)..(136): NCBI GI NO: 33146716 NR Description: putative transcription factor PCF6
  misc_feature (47)..(119): NCBI GI NO: 25369264 NR Description: probable basic helix-loop-helix DNA binding proteinTCP2
  misc_feature (47)..(119): NCBI GI NO: 7486304 NR Description: hypothetical protein F28J12
  misc_feature (47)..(119): NCBI GI NO: 18415079 NR Description: teosinte branched1 - like protein
MISGNLTNEDLGAGRTKAEGPTTAAGAVVAKSPVLPSSRHWPPSTESRIVRVSRVFGGKDRHSKVRTVKGLRDRRVRLSVPTAIQLYDLQDRLGLSQPSKVVDWLLDAAQHEIDKLPPLQFPPQAAQDLVAHLPPPSMVAPFAADRADGDKRHCHGGVKGLMGLNNSIRLVNATMPLAHGLYYTPARLLLAGRRRIHHERRSHRLSVPSTK

SEQ ID NO: 26793 - DNA, 1492 bp, Zea mays subsp. mays
  misc_feature (1)..(1492): Ceres Seq. ID no. 13498770
aaaacctaggaggagcctagtggccacctagggtgaggaaaactgaggacgcgaggcgagagcgagatccaatctgcacccccccaccaaagaaagattcttccccgccggcctcgctctctcaacatccgtctcgctccttccaccctcgctgcgcctcaggcagcgagcgagcatatagcagcccaccacccacatgccgcagggccctcacccgtcgagccaattgagtggcagccagaaaaacccagagcgcgagcagcgagcgcgagcgactcggcagcgagcgcgggctcctgtgtgcagtgtgtctgcgctagagggcgaagggcacggaccgccttcgtcaataattgcggtacgaacggggcaaatccgtcgtttaaagaggtcgctgatagcgcctgctggtggcgagagagaaagcagcagaatcgctgagggatcgtcgatccggagaggcaaaaaagccgagagatcaggcagggcaccatggggcgcgggaaggtggtgctgcagcggatcgagaacaagatcagccggcaggtgaccttcgccaagcgccggaacggcctgctcaagaaggcgtacgagctctccgtcctctgcgacgccgaggtcgcgctcgtcctcttctcccacgccggccgcctctaccagttctcatcctcctccaatctgcttaagactctagagcggtaccagaggtacatctatgcttcagccgatgctgcagtgccatctagcgatcagatgcagaataactatcaagaatatgtgaagctgaaggcacgagttgaggttttacagcactcacaaaggaatcttcttggtgaagatctggccctacttagcccaagtgaacttgaccagcttgagaatcaagtagacaagaccttgaagcaaataagatcaagaaagactcaagtgttacttgatgaactttgtgacttaaagagaaaggaacaaatgctgcaagatgcaaacagggttctgaaaaggaagctgggcgagtttgaggcagaggcggcttctcccccgcagttagcgtggcaaggcgaaggcggcatgttgtcccatgaccctccacagccagaacacttcttccaggctctggagagcaacccatgtctgcaacctacataccatacgatggacatgaaccagcagccagtgccagcgccgggcggctgctatcctgcatggatgtcttagccagtgcttcattccattgccttgagaagtgtcctgaccttcacagatccctacgagctttattactgcttttgcctgcccctttgctgcttgcggtgcttactgaactgtccaaatgaccacatggtcatatataggttattgctgtctttatcttatgttgatcacggcctgctcagctgctttagcgccatgcaaaatggcttgggcgatgcacgcttgaatgggtcgaactgcttatgttttgggagtataaatcacttagcaataagcattg

SEQ ID NO: 26794 - protein, 240 aa, Zea mays subsp. mays
  peptide (1)..(240): Ceres Seq. ID no. 13498771
  misc_feature (75)..(174): Pfam Name: Pfam Description:  K-box region
  misc_feature (1)..(240): NCBI GI NO: 29372758 NR Description: m24 [Zea mays]
  misc_feature (1)..(240): NCBI GI NO: 29372762 NR Description: m31 [Zea mays]
  misc_feature (1)..(240): NCBI GI NO: 5295982 NR Description: MADS box-like protein
  misc_feature (1)..(240): NCBI GI NO: 29570318 NR Description: MADS-box transcriptional factor
  misc_feature (1)..(240): NCBI GI NO: 28630965 NR Description: MADS7 [Lolium perenne]
  misc_feature (1)..(239): NCBI GI NO: 8567991 NR Description: MADS-box protein MADS4 [Nicotiana tabacum]
  misc_feature (1)..(239): NCBI GI NO: 13384050 NR Description: MADS-box transcription factor FBP9
  misc_feature (1)..(239): NCBI GI NO: 33342042 NR Description: MADS-box transcription factor [Houttuynia cordata]
  misc_feature (1)..(218): NCBI GI NO: 6467976 NR Description: MADS box protein DOMADS3
  misc_feature (1)..(239): NCBI GI NO: 33342040 NR Description: MADS-box transcription factor [Houttuynia cordata]
MGRGKVVLQRIENKISRQVTFAKRRNGLLKKAYELSVLCDAEVALVLFSHAGRLYQFSSSSNLLKTLERYQRYIYASADAAVPSSDQMQNNYQEYVKLKARVEVLQHSQRNLLGEDLALLSPSELDQLENQVDKTLKQIRSRKTQVLLDELCDLKRKEQMLQDANRVLKRKLGEFEAEAASPPQLAWQGEGGMLSHDPPQPEHFFQALESNPCLQPTYHTMDMNQQPVPAPGGCYPAWMS

SEQ ID NO: 26795 - protein, 153 aa, Zea mays subsp. mays
  peptide (1)..(153): Ceres Seq. ID no. 13498772
  misc_feature (1)..(87): Pfam Name: Pfam Description:  K-box region
  misc_feature (1)..(153): NCBI GI NO: 29372758 NR Description: m24 [Zea mays]
  misc_feature (1)..(153): NCBI GI NO: 29372762 NR Description: m31 [Zea mays]
  misc_feature (1)..(153): NCBI GI NO: 5295982 NR Description: MADS box-like protein
  misc_feature (1)..(153): NCBI GI NO: 29570318 NR Description: MADS-box transcriptional factor
  misc_feature (1)..(153): NCBI GI NO: 28630965 NR Description: MADS7 [Lolium perenne]
  misc_feature (1)..(152): NCBI GI NO: 8567991 NR Description: MADS-box protein MADS4 [Nicotiana tabacum]
  misc_feature (1)..(152): NCBI GI NO: 13384050 NR Description: MADS-box transcription factor FBP9
  misc_feature (1)..(152): NCBI GI NO: 33342042 NR Description: MADS-box transcription factor [Houttuynia cordata]
  misc_feature (1)..(131): NCBI GI NO: 6467976 NR Description: MADS box protein DOMADS3
  misc_feature (1)..(152): NCBI GI NO: 33342040 NR Description: MADS-box transcription factor [Houttuynia cordata]
MQNNYQEYVKLKARVEVLQHSQRNLLGEDLALLSPSELDQLENQVDKTLKQIRSRKTQVLLDELCDLKRKEQMLQDANRVLKRKLGEFEAEAASPPQLAWQGEGGMLSHDPPQPEHFFQALESNPCLQPTYHTMDMNQQPVPAPGGCYPAWMS

SEQ ID NO: 26796 - DNA, 1352 bp, Zea mays subsp. mays
  misc_feature (1)..(1352): Ceres Seq. ID no. 12409718
  misc_feature (268)..(268): n is a, c, t, g, unknown, or other
accagtcccctttacatccacacacaacgcgcaccacaccacaccacaccacccgacgccaacgtccgagaccaaactccgatccccactatgccggcggacggggaggcgctggcgccggccgtccacttctggggcgagcacccggccacggaggcggagttctactcggcgcacggcacggagggcgagccctccttacttcaccacgcccgacgcgggcgcccggcggctcttcacgcgcgcgtggaggccccgcgcgcccgancggcccagggcgctcgtgttcatggtccacggctacggcaatgacatcagctggacgttccagtccacggcggtcttcctcgcgcggtccgggttcgcctgcttcgcggccgacctcccgggccacggccgctcccacggcctccgggccttcgtgcccgacctcgacgccgccgtcgctgacctcctcgccttcttccgcgccgtcagggcgagggaggagcacgctggcctgccctgcttcctgttcggggagtccatgggcggggccatctgcctgctcatccacctccgcacacggccggaggagtgggcgggggcggtcctcgtcgctcccatgtgcaggatctccgaccggatccgcccgccgtggccgctgccggagattctcaccttcgtcgcgcgcttcagcgcccacggcggccatcgtgcccaccgccgacctcatcgagaagtccgtcaaggtgcccgccaagcgcatcgttgcagcgcgcaaccctgtgcgctacaacggccgtcccaggctcggcaccgtcgtcgagctgttgcgtgccaccgacgagctggccaagcgcctcggcgaagtcagcatcccgttccttgtcgtgcacggcagcaccgacgaggttaccgacccggaagtcagccgcgccctgtacgccgccgccgccagcaaggataagactatcaagatatacgacgggatgctccactccttgctatttggggaaccggacgagaacatcgagcgtgtccgtggggacatcctggcctggctcaacgagagatgcacagcccaggcaactcaccgtaacatacctgtcgaataagcattcggatgcatggatacacaagaaaaatatttcatgtacaacgattgttatatatgctatactcagtatttgactgtaaactgtttggtcaggtttagtggcttggatatacaaaatgttggttgcctgatcagtgtaaaagaatgctgcaaatgcttgtgatcgataatatcagctctcttcgggggctatggatggcaatacaaggcgttctctgccctgtacaagcttggcagaacgaattttatctcc

SEQ ID NO: 26797 - protein, 364 aa, Zea mays subsp. mays
  peptide (1)..(364): Ceres Seq. ID no. 12409719
  misc_feature (226)..(341): Pfam Name: Pfam Description:  alpha/beta hydrolase fold
  misc_feature (226)..(353): NCBI GI NO: 34899776 NR Description: putative lysophospholipase isolog
  misc_feature (227)..(361): NCBI GI NO: 15220284 NR Description: lysophospholipase isolog; protein id: At1g11090.1
  misc_feature (227)..(351): NCBI GI NO: 7487948 NR Description: lysophospholipase homolog F12L6
  misc_feature (227)..(351): NCBI GI NO: 30687883 NR Description: esterase/lipase/thioesterase family
  misc_feature (227)..(350): NCBI GI NO: 18417885 NR Description: lipase-like protein; protein id: At5g16120
  misc_feature (226)..(351): NCBI GI NO: 15219082 NR Description: putative lipase; protein id: At1g52760
  misc_feature (227)..(351): NCBI GI NO: 7487947 NR Description: lysophospholipase homolog F12L6
  misc_feature (227)..(351): NCBI GI NO: 30687879 NR Description: hydrolase, alpha/beta fold family
  misc_feature (227)..(353): NCBI GI NO: 18405038 NR Description: putative phospholipase; protein id: At2g39400
  misc_feature (227)..(351): NCBI GI NO: 34894592 NR Description: phospholipase-like protein
  misc_feature (89)..(89): Xaa is any aa, unknown or other
QSPLHPHTTRTTPHHTTRRQRPRPNSDPHYAGGRGGAGAGRPLLGRAPGHGGGVLLGARHGGRALLTSPRPTRAPGGSSRARGGPARPXGPGRSCSWSTATAMTSAGRSSPRRSSSRGPGSPASRPTSRATAAPTASGPSCPTSTPPSLTSSPSSAPSGRGRSTLACPASCSGSPWAGPSACSSTSAHGRRSGRGRSSSLPCAGSPTGSARRGRCRRFSPSSRASAPTAAIVPTADLIEKSVKVPAKRIVAARNPVRYNGRPRLGTVVELLRATDELAKRLGEVSIPFLVVHGSTDEVTDPEVSRALYAAAASKDKTIKIYDGMLHSLLFGEPDENIERVRGDILAWLNERCTAQATHRNIPVE

SEQ ID NO: 26798 - protein, 315 aa, Zea mays subsp. mays
  peptide (1)..(315): Ceres Seq. ID no. 12409720
  misc_feature (121)..(226): Pfam Name: Pfam Description:  alpha/beta hydrolase fold
  misc_feature (67)..(226): NCBI GI NO: 34899776 NR Description: putative lysophospholipase isolog
  misc_feature (64)..(225): NCBI GI NO: 15220284 NR Description: lysophospholipase isolog; protein id: At1g11090.1
  misc_feature (77)..(226): NCBI GI NO: 7487948 NR Description: lysophospholipase homolog F12L6
  misc_feature (77)..(226): NCBI GI NO: 30687883 NR Description: esterase/lipase/thioesterase family
  misc_feature (36)..(223): NCBI GI NO: 18417885 NR Description: lipase-like protein; protein id: At5g16120
  misc_feature (48)..(211): NCBI GI NO: 15219082 NR Description: putative lipase; protein id: At1g52760
  misc_feature (77)..(220): NCBI GI NO: 7487947 NR Description: lysophospholipase homolog F12L6
  misc_feature (77)..(220): NCBI GI NO: 30687879 NR Description: hydrolase, alpha/beta fold family
  misc_feature (77)..(225): NCBI GI NO: 18405038 NR Description: putative phospholipase; protein id: At2g39400
  misc_feature (77)..(222): NCBI GI NO: 34894592 NR Description: phospholipase-like protein
  misc_feature (89)..(89): Xaa is any aa, unknown or other
PVPFTSTHNAHHTTPHHPTPTSETKLRSPLCRRTGRRWRRPSTSGASTRPRRRSSTRRTARRASPPYFTTPDAGARRLFTRAWRPRAPXRPRALVFMVHGYGNDISWTFQSTAVFLARSGFACFAADLPGHGRSHGLRAFVPDLDAAVADLLAFFRAVRAREEHAGLPCFLFGESMGGAICLLIHLRTRPEEWAGAVLVAPMCRISDRIRPPWPLPEILTFVARFSAHGGHRAHRRPHREVRQGARQAHRCSAQPCALQRPSQARHRRRAVACHRRAGQAPRRSQHPVPCRARQHRRGYRPGSQPRPVRRRRQQG

SEQ ID NO: 26799 - protein, 262 aa, Zea mays subsp. mays
  peptide (1)..(262): Ceres Seq. ID no. 12409721
  misc_feature (124)..(239): Pfam Name: Pfam Description:  alpha/beta hydrolase fold
  misc_feature (124)..(251): NCBI GI NO: 34899776 NR Description: putative lysophospholipase isolog
  misc_feature (125)..(259): NCBI GI NO: 15220284 NR Description: lysophospholipase isolog; protein id: At1g11090.1
  misc_feature (125)..(249): NCBI GI NO: 7487948 NR Description: lysophospholipase homolog F12L6
  misc_feature (125)..(249): NCBI GI NO: 30687883 NR Description: esterase/lipase/thioesterase family
  misc_feature (125)..(248): NCBI GI NO: 18417885 NR Description: lipase-like protein; protein id: At5g16120
  misc_feature (124)..(249): NCBI GI NO: 15219082 NR Description: putative lipase; protein id: At1g52760
  misc_feature (125)..(249): NCBI GI NO: 7487947 NR Description: lysophospholipase homolog F12L6
  misc_feature (125)..(249): NCBI GI NO: 30687879 NR Description: hydrolase, alpha/beta fold family
  misc_feature (125)..(251): NCBI GI NO: 18405038 NR Description: putative phospholipase; protein id: At2g39400
  misc_feature (125)..(249): NCBI GI NO: 34894592 NR Description: phospholipase-like protein
MTSAGRSSPRRSSSRGPGSPASRPTSRATAAPTASGPSCPTSTPPSLTSSPSSAPSGRGRSTLACPASCSGSPWAGPSACSSTSAHGRRSGRGRSSSLPCAGSPTGSARRGRCRRFSPSSRASAPTAAIVPTADLIEKSVKVPAKRIVAARNPVRYNGRPRLGTVVELLRATDELAKRLGEVSIPFLVVHGSTDEVTDPEVSRALYAAAASKDKTIKIYDGMLHSLLFGEPDENIERVRGDILAWLNERCTAQATHRNIPVE

SEQ ID NO: 26800 - protein, 219 aa, Zea mays subsp. mays
  peptide (1)..(219): Ceres Seq. ID no. 12409722
  misc_feature (25)..(130): Pfam Name: Pfam Description:  alpha/beta hydrolase fold
  misc_feature (1)..(130): NCBI GI NO: 34899776 NR Description: putative lysophospholipase isolog
  misc_feature (1)..(129): NCBI GI NO: 15220284 NR Description: lysophospholipase isolog; protein id: At1g11090.1
  misc_feature (1)..(130): NCBI GI NO: 7487948 NR Description: lysophospholipase homolog F12L6
  misc_feature (1)..(130): NCBI GI NO: 30687883 NR Description: esterase/lipase/thioesterase family
  misc_feature (1)..(127): NCBI GI NO: 18417885 NR Description: lipase-like protein; protein id: At5g16120
  misc_feature (1)..(115): NCBI GI NO: 15219082 NR Description: putative lipase; protein id: At1g52760
  misc_feature (1)..(124): NCBI GI NO: 7487947 NR Description: lysophospholipase homolog F12L6
  misc_feature (1)..(124): NCBI GI NO: 30687879 NR Description: hydrolase, alpha/beta fold family
  misc_feature (1)..(129): NCBI GI NO: 18405038 NR Description: putative phospholipase; protein id: At2g39400
  misc_feature (1)..(126): NCBI GI NO: 34894592 NR Description: phospholipase-like protein
MVHGYGNDISWTFQSTAVFLARSGFACFAADLPGHGRSHGLRAFVPDLDAAVADLLAFFRAVRAREEHAGLPCFLFGESMGGAICLLIHLRTRPEEWAGAVLVAPMCRISDRIRPPWPLPEILTFVARFSAHGGHRAHRRPHREVRQGARQAHRCSAQPCALQRPSQARHRRRAVACHRRAGQAPRRSQHPVPCRARQHRRGYRPGSQPRPVRRRRQQG

SEQ ID NO: 26801 - DNA, 1270 bp, Zea mays subsp. mays
  misc_feature (1)..(1270): Ceres Seq. ID no. 12369175
agagcggcgctgccagcaaggcggctagtatgagcagcatggagtcgcggccgggccgaacgaacctggtggagcccatagggcacggcgccgcgctgccgtccggcggccaggcagtgcagccgtggtggacgagctccggggctgtgctcggtgcagtctcgccagccgtcgtggcggtggcgcccgggagcgggacggggattagcctgtcgagcagcccggcaggtggtagtggtggtggcggcgcggctaaaggagccgcgagtgacgagagcagcgaggattcacggagatctggggaaccaaaagatggaagcgctagtcaagaaaagaaccatgccacatcgcagatacccgctctggcgccagagtatttggcaccatactcgcagctggaactgaaccaatcaattgcttctgcagcatatcagtacccagatccttactatgcaggcatggttgctccctatggaagtcatgctgtggctcattttcagctacctggactaactcaatctcgaatgccattacctcttgaagtatccgaggagcctgtttatgtaaatgccaagcagtaccatggtatcttaagacgacggcagtcccgtgctaaggctgaacttgagaaaaaggtggtcaaagccagaaagccataccttcacgagtctcgtcatcagcacgcgatgaggagggcaagaggaaacgggggacgcttcctgaacacaaagaaaagtgacagtggtgctcccaatggaggcgaaaacgccgagcatctccatgtccctcccgacttactacagctacgacagaacgaggcttgaagtagcggtatggctctggcatccttgaacagcagttcctgtccacgggcgtaggcattcgagaccggattcatatagctctccacagcatacgcgcagccatctctgcggtaacgcacgttctcctgaacgagctttgtagcgagataggtatgcaagtgcaatctgggcgcaggaatccatcatcaagtgcccaatgcccatggggtaggtacgctgtttcaggcaattcattcttggctttcacgttccacccttgtgtaactggtgtgttgtaaatgtgtggaaaactaagcttgtgctctgtatcgggccgttcagcggaactgcaaaacgcctgtataattaagatcgaactttggattaactcggtaatgctttgtctggttttcttttagcttttcaactgtaacacggccacagctgattcatgtgatgtgcttgct

SEQ ID NO: 26802 - protein, 273 aa, Zea mays subsp. mays
  peptide (1)..(273): Ceres Seq. ID no. 12369176
  misc_feature (183)..(239): Pfam Name: CBF-B/NF-YA Pfam Description: CCAAT-binding transcription factor
  misc_feature (13)..(272): NCBI GI NO: 27552556 NR Description: putative CCAAT-binding transcription factor
  misc_feature (71)..(260): NCBI GI NO: 7489565 NR Description: probable transcription factor - rice
  misc_feature (69)..(264): NCBI GI NO: 38640734 NR Description: transcription factor WAPB [Triticum aestivum]
  misc_feature (13)..(257): NCBI GI NO: 30684143 NR Description: CCAAT box binding factor/ transcription factorHap2a
  misc_feature (13)..(257): NCBI GI NO: 18416875 NR Description: CCAAT box binding factor/ transcription factorHap2a
  misc_feature (72)..(273): NCBI GI NO: 28209479 NR Description: putative CCAAT-binding transcription factor
  misc_feature (73)..(256): NCBI GI NO: 34395137 NR Description: putative transcription factor
  misc_feature (21)..(273): NCBI GI NO: 9293997 NR Description: CCAAT-binding transcription factor B subunit
  misc_feature (21)..(273): NCBI GI NO: 18402799 NR Description: CCAAT-binding factor B chain, putative
  misc_feature (91)..(246): NCBI GI NO: 25511727 NR Description: F26G16.12 protein - Arabidopsis thaliana
SGAASKAASMSSMESRPGRTNLVEPIGHGAALPSGGQAVQPWWTSSGAVLGAVSPAVVAVAPGSGTGISLSSSPAGGSGGGGAAKGAASDESSEDSRRSGEPKDGSASQEKNHATSQIPALAPEYLAPYSQLELNQSIASAAYQYPDPYYAGMVAPYGSHAVAHFQLPGLTQSRMPLPLEVSEEPVYVNAKQYHGILRRRQSRAKAELEKKVVKARKPYLHESRHQHAMRRARGNGGRFLNTKKSDSGAPNGGENAEHLHVPPDLLQLRQNEA

SEQ ID NO: 26803 - protein, 264 aa, Zea mays subsp. mays
  peptide (1)..(264): Ceres Seq. ID no. 12369177
  misc_feature (174)..(230): Pfam Name: CBF-B/NF-YA Pfam Description: CCAAT-binding transcription factor
  misc_feature (4)..(263): NCBI GI NO: 27552556 NR Description: putative CCAAT-binding transcription factor
  misc_feature (62)..(251): NCBI GI NO: 7489565 NR Description: probable transcription factor - rice
  misc_feature (60)..(255): NCBI GI NO: 38640734 NR Description: transcription factor WAPB [Triticum aestivum]
  misc_feature (4)..(248): NCBI GI NO: 30684143 NR Description: CCAAT box binding factor/ transcription factorHap2a
  misc_feature (4)..(248): NCBI GI NO: 18416875 NR Description: CCAAT box binding factor/ transcription factorHap2a
  misc_feature (63)..(264): NCBI GI NO: 28209479 NR Description: putative CCAAT-binding transcription factor
  misc_feature (64)..(247): NCBI GI NO: 34395137 NR Description: putative transcription factor
  misc_feature (12)..(264): NCBI GI NO: 9293997 NR Description: CCAAT-binding transcription factor B subunit
  misc_feature (12)..(264): NCBI GI NO: 18402799 NR Description: CCAAT-binding factor B chain, putative
  misc_feature (82)..(237): NCBI GI NO: 25511727 NR Description: F26G16.12 protein - Arabidopsis thaliana
MSSMESRPGRTNLVEPIGHGAALPSGGQAVQPWWTSSGAVLGAVSPAVVAVAPGSGTGISLSSSPAGGSGGGGAAKGAASDESSEDSRRSGEPKDGSASQEKNHATSQIPALAPEYLAPYSQLELNQSIASAAYQYPDPYYAGMVAPYGSHAVAHFQLPGLTQSRMPLPLEVSEEPVYVNAKQYHGILRRRQSRAKAELEKKVVKARKPYLHESRHQHAMRRARGNGGRFLNTKKSDSGAPNGGENAEHLHVPPDLLQLRQNEA

SEQ ID NO: 26804 - protein, 261 aa, Zea mays subsp. mays
  peptide (1)..(261): Ceres Seq. ID no. 12369178
  misc_feature (171)..(227): Pfam Name: CBF-B/NF-YA Pfam Description: CCAAT-binding transcription factor
  misc_feature (1)..(260): NCBI GI NO: 27552556 NR Description: putative CCAAT-binding transcription factor
  misc_feature (59)..(248): NCBI GI NO: 7489565 NR Description: probable transcription factor - rice
  misc_feature (57)..(252): NCBI GI NO: 38640734 NR Description: transcription factor WAPB [Triticum aestivum]
  misc_feature (1)..(245): NCBI GI NO: 30684143 NR Description: CCAAT box binding factor/ transcription factorHap2a
  misc_feature (1)..(245): NCBI GI NO: 18416875 NR Description: CCAAT box binding factor/ transcription factorHap2a
  misc_feature (60)..(261): NCBI GI NO: 28209479 NR Description: putative CCAAT-binding transcription factor
  misc_feature (61)..(244): NCBI GI NO: 34395137 NR Description: putative transcription factor
  misc_feature (9)..(261): NCBI GI NO: 9293997 NR Description: CCAAT-binding transcription factor B subunit
  misc_feature (9)..(261): NCBI GI NO: 18402799 NR Description: CCAAT-binding factor B chain, putative
  misc_feature (79)..(234): NCBI GI NO: 25511727 NR Description: F26G16.12 protein - Arabidopsis thaliana
MESRPGRTNLVEPIGHGAALPSGGQAVQPWWTSSGAVLGAVSPAVVAVAPGSGTGISLSSSPAGGSGGGGAAKGAASDESSEDSRRSGEPKDGSASQEKNHATSQIPALAPEYLAPYSQLELNQSIASAAYQYPDPYYAGMVAPYGSHAVAHFQLPGLTQSRMPLPLEVSEEPVYVNAKQYHGILRRRQSRAKAELEKKVVKARKPYLHESRHQHAMRRARGNGGRFLNTKKSDSGAPNGGENAEHLHVPPDLLQLRQNEA

SEQ ID NO: 26805 - DNA, 1249 bp, Zea mays subsp. mays
  misc_feature (1)..(1249): Ceres Seq. ID no. 12373684
accggaaaaaaaacattcgcggtggcttctttcttcttccccaatccaactccaaactctccatccagtgggaaaaaaaaacaaaaagggtaccggaagcggcgaaagcctcgcctcccgccgctctcgcatcgtctccagagcgcacgtcagatcaggtgcgccgcgcccccctcgcctaagctgcgacgaccatccatcgaacaggaaggatgacgggctccatggatctcccggccaagggcgggttcagcttcgacctgtgtcgccggaacaacatgctggagaagaacggactcaaggtcccgggattcaggaagaccgggacaaccatcgtcggcctcgtctttcaggatggggttgttcttggggcagacacaagggcaactgagggccccatagttgctgataagaactgtgagaaaatccactttatggcaccgaatatatactgctgtggagcaggaactgctgcggacacggaggccgttacagatatggtgagctcccagctacagcttcaccgttatgcaacgggccgcgaatcaagagttgtaactgctcttacactactgaagtcacacctcttcaagtatcaaggccatgtcagtgctgcccttgttcttggtggagtggattgtactgggccacatttacacactgtttatccacacgggtccactgatactcttccttttgccaccatgggctctggttctcttgctgcaatgtcagtgtttgaatcgaagtacaaagaaggccttactagggaggagggaatacagattgtgtgcgaagcaatctgtgctggtattttcaatgacttgggtagtgggagcaacgtggacgtctgcgtgataaccaaggggaagacagaatacttgagaaaccaccagttgccgaatcccaggacttatgctagttcaaagggatacagtttcacaaaggggcagactgaggtactgtcttcaaaggtcacacttctaaagcagaaggttgaggtcgccgagggtggtgatgctatggaggagtgatcttgcatgcctgcattcatacaagcatattctgaatctgtgtaacttttcttagtggagcagctagaacaagaaaaaaaaaaatttggagatctttgctgtactcgctggaccgaagccagggctcttatgctaaatgtgtttctaatgtttggcacattttaaattgcttgttgtttctgaatgtttaaaaccggtgaagggtatttgcttgt

SEQ ID NO: 26806 - protein, 273 aa, Zea mays subsp. mays
  peptide (1)..(273): Ceres Seq. ID no. 12373685
  misc_feature (36)..(216): Pfam Name: Pfam Description:  Proteasome A-type and B-type
  misc_feature (1)..(273): NCBI GI NO: 8671504 NR Description: beta 2 subunit of 20S proteasome
  misc_feature (4)..(273): NCBI GI NO: 15237451 NR Description: 20S proteasome beta subunit B
  misc_feature (4)..(273): NCBI GI NO: 18405364 NR Description: 20S proteasome beta subunit B
  misc_feature (4)..(273): NCBI GI NO: 2511578 NR Description: multicatalytic endopeptidase
  misc_feature (4)..(273): NCBI GI NO: 20260224 NR Description: 20S proteasome beta subunit PBB2
  misc_feature (4)..(273): NCBI GI NO: 21593337 NR Description: 20S proteasome beta subunit PBB2
  misc_feature (4)..(245): NCBI GI NO: 30688785 NR Description: 20S proteasome beta subunit B (PBB1)
  misc_feature (56)..(273): NCBI GI NO: 2511576 NR Description: multicatalytic endopeptidase
  misc_feature (1)..(263): NCBI GI NO: 24664391 NR Description: Proteasome beta2 subunit CG3329-PA
  misc_feature (4)..(266): NCBI GI NO: 4506203 NR Description: proteasome beta 7 subunit proprotein
MTGSMDLPAKGGFSFDLCRRNNMLEKNGLKVPGFRKTGTTIVGLVFQDGVVLGADTRATEGPIVADKNCEKIHFMAPNIYCCGAGTAADTEAVTDMVSSQLQLHRYATGRESRVVTALTLLKSHLFKYQGHVSAALVLGGVDCTGPHLHTVYPHGSTDTLPFATMGSGSLAAMSVFESKYKEGLTREEGIQIVCEAICAGIFNDLGSGSNVDVCVITKGKTEYLRNHQLPNPRTYASSKGYSFTKGQTEVLSSKVTLLKQKVEVAEGGDAMEE

SEQ ID NO: 26807 - protein, 269 aa, Zea mays subsp. mays
  peptide (1)..(269): Ceres Seq. ID no. 12373686
  misc_feature (32)..(212): Pfam Name: Pfam Description:  Proteasome A-type and B-type
  misc_feature (1)..(269): NCBI GI NO: 8671504 NR Description: beta 2 subunit of 20S proteasome
  misc_feature (1)..(269): NCBI GI NO: 15237451 NR Description: 20S proteasome beta subunit B
  misc_feature (1)..(269): NCBI GI NO: 18405364 NR Description: 20S proteasome beta subunit B
  misc_feature (1)..(269): NCBI GI NO: 2511578 NR Description: multicatalytic endopeptidase
  misc_feature (1)..(269): NCBI GI NO: 20260224 NR Description: 20S proteasome beta subunit PBB2
  misc_feature (1)..(269): NCBI GI NO: 21593337 NR Description: 20S proteasome beta subunit PBB2
  misc_feature (1)..(241): NCBI GI NO: 30688785 NR Description: 20S proteasome beta subunit B (PBB1)
  misc_feature (52)..(269): NCBI GI NO: 2511576 NR Description: multicatalytic endopeptidase
  misc_feature (1)..(259): NCBI GI NO: 24664391 NR Description: Proteasome beta2 subunit CG3329-PA
  misc_feature (1)..(262): NCBI GI NO: 4506203 NR Description: proteasome beta 7 subunit proprotein
MDLPAKGGFSFDLCRRNNMLEKNGLKVPGFRKTGTTIVGLVFQDGVVLGADTRATEGPIVADKNCEKIHFMAPNIYCCGAGTAADTEAVTDMVSSQLQLHRYATGRESRVVTALTLLKSHLFKYQGHVSAALVLGGVDCTGPHLHTVYPHGSTDTLPFATMGSGSLAAMSVFESKYKEGLTREEGIQIVCEAICAGIFNDLGSGSNVDVCVITKGKTEYLRNHQLPNPRTYASSKGYSFTKGQTEVLSSKVTLLKQKVEVAEGGDAMEE

SEQ ID NO: 26808 - protein, 251 aa, Zea mays subsp. mays
  peptide (1)..(251): Ceres Seq. ID no. 12373687
  misc_feature (14)..(194): Pfam Name: Pfam Description:  Proteasome A-type and B-type
  misc_feature (1)..(251): NCBI GI NO: 8671504 NR Description: beta 2 subunit of 20S proteasome
  misc_feature (1)..(251): NCBI GI NO: 15237451 NR Description: 20S proteasome beta subunit B
  misc_feature (1)..(251): NCBI GI NO: 18405364 NR Description: 20S proteasome beta subunit B
  misc_feature (1)..(251): NCBI GI NO: 2511578 NR Description: multicatalytic endopeptidase
  misc_feature (1)..(251): NCBI GI NO: 20260224 NR Description: 20S proteasome beta subunit PBB2
  misc_feature (1)..(251): NCBI GI NO: 21593337 NR Description: 20S proteasome beta subunit PBB2
  misc_feature (1)..(223): NCBI GI NO: 30688785 NR Description: 20S proteasome beta subunit B (PBB1)
  misc_feature (34)..(251): NCBI GI NO: 2511576 NR Description: multicatalytic endopeptidase
  misc_feature (1)..(241): NCBI GI NO: 24664391 NR Description: Proteasome beta2 subunit CG3329-PA
  misc_feature (1)..(244): NCBI GI NO: 4506203 NR Description: proteasome beta 7 subunit proprotein
MLEKNGLKVPGFRKTGTTIVGLVFQDGVVLGADTRATEGPIVADKNCEKIHFMAPNIYCCGAGTAADTEAVTDMVSSQLQLHRYATGRESRVVTALTLLKSHLFKYQGHVSAALVLGGVDCTGPHLHTVYPHGSTDTLPFATMGSGSLAAMSVFESKYKEGLTREEGIQIVCEAICAGIFNDLGSGSNVDVCVITKGKTEYLRNHQLPNPRTYASSKGYSFTKGQTEVLSSKVTLLKQKVEVAEGGDAMEE

SEQ ID NO: 26809 - DNA, 1471 bp, Zea mays subsp. mays
  misc_feature (1)..(1471): Ceres Seq. ID no. 12349040
acgcctcctcccctaccattcgcagttttggacacttggttgtcgtttcgtcccgcagatccgcaagcaccggggccagtagagagagagagagagaggagggagggtcgcggcctcgcggggggtggaggagatgtctgtggcgaaggaggcggggccgagcagcagggcggtgcttgtgacgggcggggcgggatacatcggcagccacgccgtgctgcagctgctcaccgcgggcttccgggtcgtcgtcgtcgacagcctcgccaactcctccgagctcgtgatccgccgcctgcgctcgctcgcggtggaacacgccaaaaacctcgcgttccacaaggttgatatccgtgacaaagatggattggaaaaggtttttgcttcaacaagatttgatgctgttattcattttgctggactgaaagctgttggagaaagtgtacaaaagcctttgctttattatgaccataatgttgttggcacaataaatcttctggaagtaatggcagctcatggatgtaagaagttagtgttctcatcatcagctgcagtttatgggtcacctaagaactcaccctgcactgaagattttcctctcactccacataacccatatggcagaaccaaacttatggcagaggagatatgccgtgatatctaccattcagatcctgaatggaatatcattttgcttaggtactttaatccagttggggctcaccccagtggataccttggtgaagacccatgtggaactcctaacaaccttatgcccttcgttcagcaaattgcagttggcaggaggccatcgctaacaatatttggaaataactacgcaacaaaggatgggacaggggttcgtgattatattcatgtggttgaccttgctgaaggacatcttttcgcattaaagaagctttttgaaagctcatctaacataggatgtgaagcatacaaccttggaaccggaaaaggaacatcagtgttggagatagtcaatgcatttgagaaggcttctggaaagaaaatccctttgatcatgggccaacggcgtcctggtgatgctgagattctcttttcatcgccggcaaaagcagagagagagctccactggaaagcgaaatatggcatcacagaaatgtgcggagacctgtggaactgggctagcaagagcccttatggatacgcggcatctgagtctccgaagctgaatggtagttcacgctgagcaacgccgattggcccgtgtggactcacttgtacatgagactgtagtgccagccaaccaggataaatgtagatctagtcggtcggtcatacagagagaagttctataggcctaggaaagaaatgttatcctgttcctcagcataagctcccatagtggttcttccatatgcgtatagtctatgaaatttgttctaggaccattgctatagtcaaccagctaattcaattctatttcttg

SEQ ID NO: 26810 - protein, 365 aa, Zea mays subsp. mays
  peptide (1)..(365): Ceres Seq. ID no. 12349041
  misc_feature (14)..(349): Pfam Name: Pfam Description:  NAD dependent epimerase/dehydratase family
  misc_feature (1)..(362): NCBI GI NO: 25553520 NR Description: putative UDP-glucose 4-epimerase
  misc_feature (10)..(356): NCBI GI NO: 11386775 NR Description: UDP-glucose 4-epimerase GEPI48
  misc_feature (12)..(357): NCBI GI NO: 21715990 NR Description: UDP-glucose 4-epimerase
  misc_feature (12)..(355): NCBI GI NO: 32130594 NR Description: UDP-glucose-4-epimerase [Zea mays]
  misc_feature (11)..(355): NCBI GI NO: 12643850 NR Description: Probable UDP-glucose 4-epimerase At4g10960
  misc_feature (11)..(355): NCBI GI NO: 15236988 NR Description: UDP-galactose 4-epimerase - like protein
  misc_feature (11)..(357): NCBI GI NO: 21553659 NR Description: UDP-galactose 4-epimerase-like protein
  misc_feature (11)..(364): NCBI GI NO: 15236663 NR Description: UDPglucose 4-epimerase - like protein
  misc_feature (11)..(364): NCBI GI NO: 21536846 NR Description: UDPglucose 4-epimerase-like protein
  misc_feature (14)..(355): NCBI GI NO: 15217653 NR Description: UDP-galactose 4-epimerase, putative
MSVAKEAGPSSRAVLVTGGAGYIGSHAVLQLLTAGFRVVVVDSLANSSELVIRRLRSLAVEHAKNLAFHKVDIRDKDGLEKVFASTRFDAVIHFAGLKAVGESVQKPLLYYDHNVVGTINLLEVMAAHGCKKLVFSSSAAVYGSPKNSPCTEDFPLTPHNPYGRTKLMAEEICRDIYHSDPEWNIILLRYFNPVGAHPSGYLGEDPCGTPNNLMPFVQQIAVGRRPSLTIFGNNYATKDGTGVRDYIHVVDLAEGHLFALKKLFESSSNIGCEAYNLGTGKGTSVLEIVNAFEKASGKKIPLIMGQRRPGDAEILFSSPAKAERELHWKAKYGITEMCGDLWNWASKSPYGYAASESPKLNGSSR

SEQ ID NO: 26811 - protein, 241 aa, Zea mays subsp. mays
  peptide (1)..(241): Ceres Seq. ID no. 12349042
  misc_feature (1)..(225): Pfam Name: Pfam Description:  NAD dependent epimerase/dehydratase family
  misc_feature (1)..(238): NCBI GI NO: 25553520 NR Description: putative UDP-glucose 4-epimerase
  misc_feature (1)..(232): NCBI GI NO: 11386775 NR Description: UDP-glucose 4-epimerase GEPI48
  misc_feature (1)..(233): NCBI GI NO: 21715990 NR Description: UDP-glucose 4-epimerase
  misc_feature (1)..(231): NCBI GI NO: 32130594 NR Description: UDP-glucose-4-epimerase [Zea mays]
  misc_feature (1)..(231): NCBI GI NO: 12643850 NR Description: Probable UDP-glucose 4-epimerase At4g10960
  misc_feature (1)..(231): NCBI GI NO: 15236988 NR Description: UDP-galactose 4-epimerase - like protein
  misc_feature (1)..(233): NCBI GI NO: 21553659 NR Description: UDP-galactose 4-epimerase-like protein
  misc_feature (1)..(240): NCBI GI NO: 15236663 NR Description: UDPglucose 4-epimerase - like protein
  misc_feature (1)..(240): NCBI GI NO: 21536846 NR Description: UDPglucose 4-epimerase-like protein
  misc_feature (1)..(231): NCBI GI NO: 15217653 NR Description: UDP-galactose 4-epimerase, putative
MAAHGCKKLVFSSSAAVYGSPKNSPCTEDFPLTPHNPYGRTKLMAEEICRDIYHSDPEWNIILLRYFNPVGAHPSGYLGEDPCGTPNNLMPFVQQIAVGRRPSLTIFGNNYATKDGTGVRDYIHVVDLAEGHLFALKKLFESSSNIGCEAYNLGTGKGTSVLEIVNAFEKASGKKIPLIMGQRRPGDAEILFSSPAKAERELHWKAKYGITEMCGDLWNWASKSPYGYAASESPKLNGSSR

SEQ ID NO: 26812 - protein, 198 aa, Zea mays subsp. mays
  peptide (1)..(198): Ceres Seq. ID no. 12349043
  misc_feature (1)..(182): Pfam Name: Pfam Description:  NAD dependent epimerase/dehydratase family
  misc_feature (1)..(195): NCBI GI NO: 25553520 NR Description: putative UDP-glucose 4-epimerase
  misc_feature (1)..(189): NCBI GI NO: 11386775 NR Description: UDP-glucose 4-epimerase GEPI48
  misc_feature (1)..(190): NCBI GI NO: 21715990 NR Description: UDP-glucose 4-epimerase
  misc_feature (1)..(188): NCBI GI NO: 32130594 NR Description: UDP-glucose-4-epimerase [Zea mays]
  misc_feature (1)..(188): NCBI GI NO: 12643850 NR Description: Probable UDP-glucose 4-epimerase At4g10960
  misc_feature (1)..(188): NCBI GI NO: 15236988 NR Description: UDP-galactose 4-epimerase - like protein
  misc_feature (1)..(190): NCBI GI NO: 21553659 NR Description: UDP-galactose 4-epimerase-like protein
  misc_feature (1)..(197): NCBI GI NO: 15236663 NR Description: UDPglucose 4-epimerase - like protein
  misc_feature (1)..(197): NCBI GI NO: 21536846 NR Description: UDPglucose 4-epimerase-like protein
  misc_feature (1)..(188): NCBI GI NO: 15217653 NR Description: UDP-galactose 4-epimerase, putative
MAEEICRDIYHSDPEWNIILLRYFNPVGAHPSGYLGEDPCGTPNNLMPFVQQIAVGRRPSLTIFGNNYATKDGTGVRDYIHVVDLAEGHLFALKKLFESSSNIGCEAYNLGTGKGTSVLEIVNAFEKASGKKIPLIMGQRRPGDAEILFSSPAKAERELHWKAKYGITEMCGDLWNWASKSPYGYAASESPKLNGSSR

SEQ ID NO: 26813 - DNA, 1163 bp, Zea mays subsp. mays
  misc_feature (1)..(1163): Ceres Seq. ID no. 12344724
agtgtggaggggaggcagggtagcccccgcggcgccgctccgctcgaaatccccaaaaaggcaagatcaaatcaaatcagatctctccacccccagcccatccatggcgatcgtgtacgccctggtcgcgcggggcacggtggtgctggccgagttcgccgccgtctcgggcaacgccggcgccgtggcccgtcggatcctcgagaagctgccgcccgacgccgagtccaggctgtgcttcgcgcaggaccggtacatcttccacgtcctccgatccgacgccgccggcatcaccttcctctgtatggccaacgacaccttcggaacaaggatcccctttctctacctggaggacatccaaatgaggttcatgaaaaactacggcagagtcgcccactctgcgctggcttacgccatgaacgatgagttctccagagtgctccatcagcaaatggagttcttctccagcaacccaagcgccgacacactcaaccgtctccgtggagaagtcagcgagatacacaccgtcatggtcgacaacatagagaaaattcttgacagaggcgatcgcatctcgctccttgtcgacaagacatccaccatgcaagacagcgcctttcacttccgcaagcaatccaagaggctccgtagagctctttggatgaagaatgccaagcttctagttgtgttgacagttgtcatagtagtgctgctctacttgatcatttctgctttctgtggaggcctttccttgtcatcatgcagatcatgagtaacacaccagatggctttgcccctcccttaaatggagggtagaacaccatggaatgatgcctgctgtgttgagcaccggagcttccggaggcaaaaaaaaaaaggagatcgatggataccactgtggtttccagtaactgggatcagattgtacagtggacgagtggagttggccgttgctgtttttgatgtcgccatggttgtgggtgaactcaattcttaaatcgtggtgtgcttagcatctttcttgccttgtcaaactgtcgttgtgacttgtgagggatgggactagtgagttgggttttgtagagttacatgggttatcaatgtgcagacatatatgtatgccgcgatgagtgttagtacatgcctactatggttatcggtgt

SEQ ID NO: 26814 - protein, 256 aa, Zea mays subsp. mays
  peptide (1)..(256): Ceres Seq. ID no. 12344725
  misc_feature (159)..(247): Pfam Name: Pfam Description:  Synaptobrevin
  misc_feature (35)..(256): NCBI GI NO: 37531190 NR Description: putative synaptobrevin-like protein
  misc_feature (35)..(256): NCBI GI NO: 15242224 NR Description: synaptobrevin-like protein; protein id: At5g22360
  misc_feature (35)..(254): NCBI GI NO: 15236687 NR Description: synaptobrevin-like protein; protein id:At4g32150
  misc_feature (35)..(254): NCBI GI NO: 15238971 NR Description: putative protein; protein id: At5g11150
  misc_feature (35)..(254): NCBI GI NO: 34898442 NR Description: ESTs AU082579
  misc_feature (35)..(254): NCBI GI NO: 15224711 NR Description: putative synaptobrevin; protein id: At2g25340.1
  misc_feature (35)..(173): NCBI GI NO: 16323190 NR Description: AT5g22360/MWD9_16 [Arabidopsis thaliana]
  misc_feature (35)..(256): NCBI GI NO: 28828593 NR Description: similar to Arabidopsis thaliana (Mouse-ear cress)
  misc_feature (35)..(254): NCBI GI NO: 33468929 NR Description: synaptobrevin like 1 [Mus musculus]
  misc_feature (35)..(254): NCBI GI NO: 5032137 NR Description: synaptobrevin-like 1 [Homo sapiens]
VWRGGRVAPAAPLRSKSPKRQDQIKSDLSTPSPSMAIVYALVARGTVVLAEFAAVSGNAGAVARRILEKLPPDAESRLCFAQDRYIFHVLRSDAAGITFLCMANDTFGTRIPFLYLEDIQMRFMKNYGRVAHSALAYAMNDEFSRVLHQQMEFFSSNPSADTLNRLRGEVSEIHTVMVDNIEKILDRGDRISLLVDKTSTMQDSAFHFRKQSKRLRRALWMKNAKLLVVLTVVIVVLLYLIISAFCGGLSLSSCRS

SEQ ID NO: 26815 - protein, 222 aa, Zea mays subsp. mays
  peptide (1)..(222): Ceres Seq. ID no. 12344726
  misc_feature (125)..(213): Pfam Name: Pfam Description:  Synaptobrevin
  misc_feature (1)..(222): NCBI GI NO: 37531190 NR Description: putative synaptobrevin-like protein
  misc_feature (1)..(222): NCBI GI NO: 15242224 NR Description: synaptobrevin-like protein; protein id: At5g22360
  misc_feature (1)..(220): NCBI GI NO: 15236687 NR Description: synaptobrevin-like protein; protein id:At4g32150
  misc_feature (1)..(220): NCBI GI NO: 15238971 NR Description: putative protein; protein id: At5g11150
  misc_feature (1)..(220): NCBI GI NO: 34898442 NR Description: ESTs AU082579
  misc_feature (1)..(220): NCBI GI NO: 15224711 NR Description: putative synaptobrevin; protein id: At2g25340.1
  misc_feature (1)..(139): NCBI GI NO: 16323190 NR Description: AT5g22360/MWD9_16 [Arabidopsis thaliana]
  misc_feature (1)..(222): NCBI GI NO: 28828593 NR Description: similar to Arabidopsis thaliana (Mouse-ear cress)
  misc_feature (1)..(220): NCBI GI NO: 33468929 NR Description: synaptobrevin like 1 [Mus musculus]
  misc_feature (1)..(220): NCBI GI NO: 5032137 NR Description: synaptobrevin-like 1 [Homo sapiens]
MAIVYALVARGTVVLAEFAAVSGNAGAVARRILEKLPPDAESRLCFAQDRYIFHVLRSDAAGITFLCMANDTFGTRIPFLYLEDIQMRFMKNYGRVAHSALAYAMNDEFSRVLHQQMEFFSSNPSADTLNRLRGEVSEIHTVMVDNIEKILDRGDRISLLVDKTSTMQDSAFHFRKQSKRLRRALWMKNAKLLVVLTVVIVVLLYLIISAFCGGLSLSSCRS

SEQ ID NO: 26816 - protein, 155 aa, Zea mays subsp. mays
  peptide (1)..(155): Ceres Seq. ID no. 12344727
  misc_feature (58)..(146): Pfam Name: Pfam Description:  Synaptobrevin
  misc_feature (1)..(155): NCBI GI NO: 37531190 NR Description: putative synaptobrevin-like protein
  misc_feature (1)..(155): NCBI GI NO: 15242224 NR Description: synaptobrevin-like protein; protein id: At5g22360
  misc_feature (1)..(153): NCBI GI NO: 15236687 NR Description: synaptobrevin-like protein; protein id:At4g32150
  misc_feature (1)..(153): NCBI GI NO: 15238971 NR Description: putative protein; protein id: At5g11150
  misc_feature (1)..(153): NCBI GI NO: 34898442 NR Description: ESTs AU082579
  misc_feature (1)..(153): NCBI GI NO: 15224711 NR Description: putative synaptobrevin; protein id: At2g25340.1
  misc_feature (1)..(72): NCBI GI NO: 16323190 NR Description: AT5g22360/MWD9_16 [Arabidopsis thaliana]
  misc_feature (1)..(155): NCBI GI NO: 28828593 NR Description: similar to Arabidopsis thaliana (Mouse-ear cress)
  misc_feature (1)..(153): NCBI GI NO: 33468929 NR Description: synaptobrevin like 1 [Mus musculus]
  misc_feature (1)..(153): NCBI GI NO: 5032137 NR Description: synaptobrevin-like 1 [Homo sapiens]
MANDTFGTRIPFLYLEDIQMRFMKNYGRVAHSALAYAMNDEFSRVLHQQMEFFSSNPSADTLNRLRGEVSEIHTVMVDNIEKILDRGDRISLLVDKTSTMQDSAFHFRKQSKRLRRALWMKNAKLLVVLTVVIVVLLYLIISAFCGGLSLSSCRS

SEQ ID NO: 26817 - DNA, 1360 bp, Zea mays subsp. mays
  misc_feature (1)..(1360): Ceres Seq. ID no. 12344092
gagatctatccccgtttccaacctcacacccccccttccattggagctccttcgtctgagttaaacctaaaccctaatcgcgacctgcgttcgtcaaaaccctacctggccatggacggcggaggaggaggcggtggaggaggaggtggagttggggcaggtgtcatggtgggtggcggagtcgtgccgggcggcgggggcggcgacgtggaactcgtcagcaagacgctgcagttcgagcacaagctgttctactttgatctgaaggagaacccgcgggggaggtacctcaagatctccgagaagacatcggccacgcgctccaccatcatcgtccccatcgacggcgtcgcctggttcctcgacctcttcgactactacatccgcaccgacgagcgcgacgtcttcagcaaggagctgcgactccagaccaaggtgttctatttcgatatcggggagaacaagaggggccgattcctcaaggtttctgaggcctctgtcaacagaaaccggagtaccataattgttccagctggcagctctggtgaagagggctgggaagcattcagaaatgtactgttggaaataaataacgaggcttccagattgtatgtcctaccaaatcatccaaatcagcaacacatggagccgccagagcgtcttcctggcttgtcagatgatgtgggtgccggatttatagctggacatggtagccagtccgcttctgggccagaggtagatgtcgaacgtttggttgatctgcctcctcaagaagaaattagtggcatgggtatgtctaaggtgattagggcagatcagaagaggttcttcttcgacctgggaagcaacaacaggggccattatttgaggatttctgaggtggctggagttgatcgttcgtctataatcttgccgctctcgggtttgaagcagttccatgaaatggttggtcactttgtagatataatgaaggacaggcttgaaggaatgacaggagctaacgtgcgcactgtcgaatccagtcagagatgattacccttactgtggcctgggcaagactgctgttatgcctcctgtaggtttgccatgtggtgtgtggtaatgtagatcacgcactattaattcatctggtggggataataatgtctcctttctcttcatttttttaaaattcagtggtgaggattgatttatttgggacgttttgctttttcggaggaataataagcagtgtattgttcgtggggtggtataattatagttgctgtagtgttagccctgttttcatgcttcgctgttcttgtttatgtaaaaaagatgtgtggtatgtttctggcattgagttctttctacacatgtt

SEQ ID NO: 26818 - protein, 343 aa, Zea mays subsp. mays
  peptide (1)..(343): Ceres Seq. ID no. 12344093
  misc_feature (69)..(323): Pfam Name: Pfam Description:  PurA ssDNA and RNA-binding protein
  misc_feature (38)..(343): NCBI GI NO: 34902984 NR Description: unnamed protein product
  misc_feature (38)..(343): NCBI GI NO: 18402871 NR Description: putative purine-rich single-stranded DNA-bindingprotein
  misc_feature (38)..(343): NCBI GI NO: 30685174 NR Description: purine-rich single-strand ed DNA-binding protein -related
  misc_feature (38)..(261): NCBI GI NO: 25408208 NR Description: hypothetical protein At2g32080
  misc_feature (290)..(328): NCBI GI NO: 25408208 NR Description: hypothetical protein At2g32080
  misc_feature (39)..(199): NCBI GI NO: 31211141 NR Description: ENSANGP00000016990 [Anopheles gambiae]
  misc_feature (269)..(333): NCBI GI NO: 31211141 NR Description: ENSANGP00000016990 [Anopheles gambiae]
  misc_feature (64)..(216): NCBI GI NO: 24638642 NR Description: Purine-rich binding protein-alpha CG1507-PD
  misc_feature (269)..(341): NCBI GI NO: 24638642 NR Description: Purine-rich binding protein-alpha CG1507-PD
  misc_feature (64)..(216): NCBI GI NO: 24638638 NR Description: Purine-rich binding protein-alpha CG1507-PA
EIYPRFQPHTPPSIGAPSSELNLNPNRDLRSSKPYLAMDGGGGGGGGGGGVGAGVMVGGGVVPGGGGGDVELVSKTLQFEHKLFYFDLKENPRGRYLKISEKTSATRSTIIVPIDGVAWFLDLFDYYIRTDERDVFSKELRLQTKVFYFDIGENKRGRFLKVSEASVNRNRSTIIVPAGSSGEEGWEAFRNVLLEINNEASRLYVLPNHPNQQHMEPPERLPGLSDDVGAGFIAGHGSQSASGPEVDVERLVDLPPQEEISGMGMSKVIRADQKRFFFDLGSNNRGHYLRISEVAGVDRSSIILPLSGLKQFHEMVGHFVDIMKDRLEGMTGANVRTVESSQR

SEQ ID NO: 26819 - protein, 306 aa, Zea mays subsp. mays
  peptide (1)..(306): Ceres Seq. ID no. 12344094
  misc_feature (32)..(286): Pfam Name: Pfam Description:  PurA ssDNA and RNA-binding protein
  misc_feature (1)..(306): NCBI GI NO: 34902984 NR Description: unnamed protein product
  misc_feature (1)..(306): NCBI GI NO: 18402871 NR Description: putative purine-rich single-stranded DNA-bindingprotein
  misc_feature (1)..(306): NCBI GI NO: 30685174 NR Description: purine-rich single-strand ed DNA-binding protein -related
  misc_feature (1)..(224): NCBI GI NO: 25408208 NR Description: hypothetical protein At2g32080
  misc_feature (253)..(291): NCBI GI NO: 25408208 NR Description: hypothetical protein At2g32080
  misc_feature (2)..(162): NCBI GI NO: 31211141 NR Description: ENSANGP00000016990 [Anopheles gambiae]
  misc_feature (232)..(296): NCBI GI NO: 31211141 NR Description: ENSANGP00000016990 [Anopheles gambiae]
  misc_feature (27)..(179): NCBI GI NO: 24638642 NR Description: Purine-rich binding protein-alpha CG1507-PD
  misc_feature (232)..(304): NCBI GI NO: 24638642 NR Description: Purine-rich binding protein-alpha CG1507-PD
  misc_feature (27)..(179): NCBI GI NO: 24638638 NR Description: Purine-rich binding protein-alpha CG1507-PA
MDGGGGGGGGGGGVGAGVMVGGGVVPGGGGGDVELVSKTLQFEHKLFYFDLKENPRGRYLKISEKTSATRSTIIVPIDGVAWFLDLFDYYIRTDERDVFSKELRLQTKVFYFDIGENKRGRFLKVSEASVNRNRSTIIVPAGSSGEEGWEAFRNVLLEINNEASRLYVLPNHPNQQHMEPPERLPGLSDDVGAGFIAGHGSQSASGPEVDVERLVDLPPQEEISGMGMSKVIRADQKRFFFDLGSNNRGHYLRISEVAGVDRSSIILPLSGLKQFHEMVGHFVDIMKDRLEGMTGANVRTVESSQR

SEQ ID NO: 26820 - protein, 288 aa, Zea mays subsp. mays
  peptide (1)..(288): Ceres Seq. ID no. 12344095
  misc_feature (14)..(268): Pfam Name: Pfam Description:  PurA ssDNA and RNA-binding protein
  misc_feature (1)..(288): NCBI GI NO: 34902984 NR Description: unnamed protein product
  misc_feature (1)..(288): NCBI GI NO: 18402871 NR Description: putative purine-rich single-stranded DNA-bindingprotein
  misc_feature (1)..(288): NCBI GI NO: 30685174 NR Description: purine-rich single-strand ed DNA-binding protein -related
  misc_feature (1)..(206): NCBI GI NO: 25408208 NR Description: hypothetical protein At2g32080
  misc_feature (235)..(273): NCBI GI NO: 25408208 NR Description: hypothetical protein At2g32080
  misc_feature (1)..(144): NCBI GI NO: 31211141 NR Description: ENSANGP00000016990 [Anopheles gambiae]
  misc_feature (214)..(278): NCBI GI NO: 31211141 NR Description: ENSANGP00000016990 [Anopheles gambiae]
  misc_feature (9)..(161): NCBI GI NO: 24638642 NR Description: Purine-rich binding protein-alpha CG1507-PD
  misc_feature (214)..(286): NCBI GI NO: 24638642 NR Description: Purine-rich binding protein-alpha CG1507-PD
  misc_feature (9)..(161): NCBI GI NO: 24638638 NR Description: Purine-rich binding protein-alpha CG1507-PA
MVGGGVVPGGGGGDVELVSKTLQFEHKLFYFDLKENPRGRYLKISEKTSATRSTIIVPIDGVAWFLDLFDYYIRTDERDVFSKELRLQTKVFYFDIGENKRGRFLKVSEASVNRNRSTIIVPAGSSGEEGWEAFRNVLLEINNEASRLYVLPNHPNQQHMEPPERLPGLSDDVGAGFIAGHGSQSASGPEVDVERLVDLPPQEEISGMGMSKVIRADQKRFFFDLGSNNRGHYLRISEVAGVDRSSIILPLSGLKQFHEMVGHFVDIMKDRLEGMTGANVRTVESSQR

SEQ ID NO: 26821 - DNA, 1389 bp, Zea mays subsp. mays
  misc_feature (1)..(1389): Ceres Seq. ID no. 12413988
  misc_feature (198)..(198): n is a, c, t, g, unknown, or other
gttcaattcgatcacttcttccattccaatttccacacacacacgtctcagctcactccctcctccagtttcgtcagctcgtcatcataaaccgaacacagagctctcgattccattccaggatgctgctgaacccggcgtcagagacgtcggtgctagacaccatccggcagcacctcctcgaggagccagcggcgncggaggcgcggccggccgacgagagcttcgggagcctggtggcggaccagtggagcggctcgctcccgttccgcaccgacgacgccgacgacatggtggtgttcggggtgctgcaggacgccttcgcctacggctggctgcccgacggctcattcgtgcacgtgaagcccgagccagtgcggtcccccgactcgtcctcctaccacccctgctcctacgacggctcaccctgcttcggcctcctggacccggagccgccgctgacgcccggcaccaccacgcccgggagggggcaggaggaggccgcggcggccatggcccggggcaagcactacaggggggtgaggcagcgcccgtggggcaagttcgcggcggagatcagggaccccgccaggaacggcgcgcgcgtctggctcggcacgtacgacaccgccgaggacgccgcgctcgcctacgaccgcgccgcctaccgcatgcgcggctcgcgcgcgctcctcaacttcccgctccgcatcggctccggggacaagcgcccgtcgccggcgccgcccgagcccaccacctcctcggactcctcctcgtcttcggccagcggctcgcacaagaggcggaagcgaggcgaggccgcggctgccaacatggccatggcgctggtgccctcgccctcccagcttaaccggccggcccagccgtggttccctgccgcgccggtcgagcaggcggcgatggctccgcgcgtggagcagatcgtcgtctagtctagccatgcgccggcgaaagcgggggcaaggccctgcgctgcacttgcgtgacagctccaccggatggaatgcgaatatgcgataaagctcgggagcaactggggtccgtccggatgccgctgttgctccgtgcaactggcgcaagtggaagaagctgtctattggaagtcaaattgagccgcgcggacagtccggcgctgaggccggacggtccgcggtccggacagtctgcggtggtggcgcggacggtccgcgcgcgcgcagagtcagttagggttcctagtttctcgcgggatttgttacctaaaaccgcgggattaactcgggaaacagttggaaacggatccagacctccccctttatatagatgaaggtctacggccgattgaaccccaacaatcgaacaaatcaagtctatttctcgtttttt

SEQ ID NO: 26822 - protein, 317 aa, Zea mays subsp. mays
  peptide (1)..(317): Ceres Seq. ID no. 12413989
  misc_feature (174)..(239): Pfam Name: Pfam Description:  AP2 domain
  misc_feature (39)..(263): NCBI GI NO: 38346167 NR Description: OSJNBa0079A21.14
  misc_feature (239)..(317): NCBI GI NO: 38346167 NR Description: OSJNBa0079A21.14
  misc_feature (41)..(316): NCBI GI NO: 14140141 NR Description: putative AP2-related transcription factor
  misc_feature (41)..(290): NCBI GI NO: 7528276 NR Description: AP2-related transcription factor
  misc_feature (150)..(288): NCBI GI NO: 7489113 NR Description: DNA binding protein EREBP-2 - common tobacco
  misc_feature (62)..(124): NCBI GI NO: 7489113 NR Description: DNA binding protein EREBP-2 - common tobacco
  misc_feature (147)..(275): NCBI GI NO: 28274828 NR Description: ethylene response factor 1
  misc_feature (63)..(124): NCBI GI NO: 28274828 NR Description: ethylene response factor 1
  misc_feature (33)..(283): NCBI GI NO: 21264420 NR Description: Ethylene responsive element binding factor 1
  misc_feature (33)..(283): NCBI GI NO: 25350258 NR Description: ethylene responsive element binding factor 1
  misc_feature (66)..(66): Xaa is any aa, unknown or other
SIRSLLPFQFPHTHVSAHSLLQFRQLVIINRTQSSRFHSRMLLNPASETSVLDTIRQHLLEEPAAXEARPADESFGSLVADQWSGSLPFRTDDADDMVVFGVLQDAFAYGWLPDGSFVHVKPEPVRSPDSSSYHPCSYDGSPCFGLLDPEPPLTPGTTTPGRGQEEAAAAMARGKHYRGVRQRPWGKFAAEIRDPARNGARVWLGTYDTAEDAALAYDRAAYRMRGSRALLNFPLRIGSGDKRPSPAPPEPTTSSDSSSSSASGSHKRRKRGEAAAANMAMALVPSPSQLNRPAQPWFPAAPVEQAAMAPRVEQIVV

SEQ ID NO: 26823 - protein, 290 aa, Zea mays subsp. mays
  peptide (1)..(290): Ceres Seq. ID no. 12413990
  misc_feature (66)..(66): Xaa is any aa, unknown or other
FNSITSSIPISTHTRLSSLPPPVSSARHHKPNTELSIPFQDAAEPGVRDVGARHHPAAPPRGASGXGGAAGRRELREPGGGPVERLAPVPHRRRRRHGGVRGAAGRLRLRLAARRLIRAREARASAVPRLVLLPPLLLRRLTLLRPPGPGAAADARHHHAREGAGGGRGGHGPGQALQGGEAAPVGQVRGGDQGPRQERRARLARHVRHRRGRRARLRPRRLPHARLARAPQLPAPHRLRGQAPVAGAARAHHLLGLLLVFGQRLAQEAEARRGRGCQHGHGAGALALPA

SEQ ID NO: 26824 - protein, 277 aa, Zea mays subsp. mays
  peptide (1)..(277): Ceres Seq. ID no. 12413991
  misc_feature (134)..(199): Pfam Name: Pfam Description:  AP2 domain
  misc_feature (1)..(223): NCBI GI NO: 38346167 NR Description: OSJNBa0079A21.14
  misc_feature (199)..(277): NCBI GI NO: 38346167 NR Description: OSJNBa0079A21.14
  misc_feature (1)..(276): NCBI GI NO: 14140141 NR Description: putative AP2-related transcription factor
  misc_feature (1)..(250): NCBI GI NO: 7528276 NR Description: AP2-related transcription factor
  misc_feature (110)..(248): NCBI GI NO: 7489113 NR Description: DNA binding protein EREBP-2 - common tobacco
  misc_feature (22)..(84): NCBI GI NO: 7489113 NR Description: DNA binding protein EREBP-2 - common tobacco
  misc_feature (107)..(235): NCBI GI NO: 28274828 NR Description: ethylene response factor 1
  misc_feature (23)..(84): NCBI GI NO: 28274828 NR Description: ethylene response factor 1
  misc_feature (1)..(243): NCBI GI NO: 21264420 NR Description: Ethylene responsive element binding factor 1
  misc_feature (1)..(243): NCBI GI NO: 25350258 NR Description: ethylene responsive element binding factor 1
  misc_feature (26)..(26): Xaa is any aa, unknown or other
MLLNPASETSVLDTIRQHLLEEPAAXEARPADESFGSLVADQWSGSLPFRTDDADDMVVFGVLQDAFAYGWLPDGSFVHVKPEPVRSPDSSSYHPCSYDGSPCFGLLDPEPPLTPGTTTPGRGQEEAAAAMARGKHYRGVRQRPWGKFAAEIRDPARNGARVWLGTYDTAEDAALAYDRAAYRMRGSRALLNFPLRIGSGDKRPSPAPPEPTTSSDSSSSSASGSHKRRKRGEAAAANMAMALVPSPSQLNRPAQPWFPAAPVEQAAMAPRVEQIVV

SEQ ID NO: 26825 - DNA, 1232 bp, Zea mays subsp. mays
  misc_feature (1)..(1232): Ceres Seq. ID no. 12343790
atcagttactactgcctgcctgcctgcctgcgtctctcctccaggtccaggctccaggaatccaccccccacctcctcggattctttccccctctccagctcccccgtcctgcagccgcctgcactgtgctgccgccccgttcgcctcccggcctccagcctcctcggttcccgcgggagggccatgaagttaaggacaaaacgacctgaatggaagtcccttgtgcctctacaactgagcagattgagcaggaaatctgccatgcgtttctttttgttccccaaggttcagtcggctggtcaatcgccagatgataccccagtttatcttaatgtgtatgatttgacgccaatgaacggttatatatattgggcaggcctgggcatatttcactcaggaattgaagttcatggtgttgaatatgcattcggagcacatgactttcccaccagtggggtctttgaggtagaacctcgccaatgccctggtttcagattcagaaaatcaatatttcttggtacaacatgcttggatccaatccaagttaggcagttcatggagctgcagtcagtaaactacaacggcgatacttaccatcttatcacgaagaactgtaaccacttctgcaaggatatgtgctacaagttgaccggtaacaaaattcccaaatgggtgaatcggctcgccagaataggcgccatttgcaactgccttctcccggagtcgcttaagatctctccggttggccatgacccaaacagtcaatccgaagactcggagaagaggcgtctgaggaacccattcagctgcttctcttcgatctcgagccaccggcagctgccgtcgtcatctcctttcccaccatctcctgtgaaagggggcctcccccgttgctcgtcgaggaaaagcagcacggcgtctccgaaaaataggtagcctgccctggggcgcgcccctgcgtaacttccgagtcgtcgtgctaattcctgcggtgtcaacatctggatccgcacggcgagtgctgtgctgtgctgcgctgtagctttctgtcaggtacttgttttttggtcggtaaaaatcagatgcctgatgttgtatcatgtaaaaaacccctagcgacgtgtgctgctgatctgcctcgcaagatctgttgggagggtgaattgccactcggttctacccgccgcctatgtactctactcagggatttgtatattaatccattattctt

SEQ ID NO: 26826 - protein, 311 aa, Zea mays subsp. mays
  peptide (1)..(311): Ceres Seq. ID no. 12343791
  misc_feature (107)..(229): Pfam Name: DUF862 Pfam Description: Eukaryotic protein of unknown function
  misc_feature (51)..(311): NCBI GI NO: 18401869 NR Description: expressed protein; protein id: At1g47740
  misc_feature (62)..(311): NCBI GI NO: 21593644 NR Description: unknown [Arabidopsis thaliana]
  misc_feature (51)..(311): NCBI GI NO: 9802596 NR Description: T2E6.19 [Arabidopsis thaliana]
  misc_feature (101)..(290): NCBI GI NO: 18420889 NR Description: putative protein; protein id: At5g25170
  misc_feature (105)..(308): NCBI GI NO: 18412886 NR Description: expressed protein; protein id: At1g80690
  misc_feature (107)..(311): NCBI GI NO: 18400749 NR Description: expressed protein; protein id: At2g25190
  misc_feature (105)..(308): NCBI GI NO: 25354458 NR Description: hypothetical protein F23A5.4
  misc_feature (106)..(259): NCBI GI NO: 15238059 NR Description: putative protein; protein id: At5g47310.1
  misc_feature (97)..(252): NCBI GI NO: 30684058 NR Description: expressed protein [Arabidopsis thaliana]
  misc_feature (129)..(252): NCBI GI NO: 7488100 NR Description: probable EREBP-4 - Arabidopsis thaliana
SVTTACLPACVSPPGPGSRNPPPTSSDSFPLSSSPVLQPPALCCRPVRLPASSLLGSRGRAMKLRTKRPEWKSLVPLQLSRLSRKSAMRFFLFPKVQSAGQSPDDTPVYLNVYDLTPMNGYIYWAGLGIFHSGIEVHGVEYAFGAHDFPTSGVFEVEPRQCPGFRFRKSIFLGTTCLDPIQVRQFMELQSVNYNGDTYHLITKNCNHFCKDMCYKLTGNKIPKWVNRLARIGAICNCLLPESLKISPVGHDPNSQSEDSEKRRLRNPFSCFSSISSHRQLPSSSPFPPSPVKGGLPRCSSRKSSTASPKNR

SEQ ID NO: 26827 - protein, 250 aa, Zea mays subsp. mays
  peptide (1)..(250): Ceres Seq. ID no. 12343792
  misc_feature (46)..(168): Pfam Name: DUF862 Pfam Description: Eukaryotic protein of unknown function
  misc_feature (1)..(250): NCBI GI NO: 18401869 NR Description: expressed protein; protein id: At1g47740
  misc_feature (1)..(250): NCBI GI NO: 21593644 NR Description: unknown [Arabidopsis thaliana]
  misc_feature (1)..(250): NCBI GI NO: 9802596 NR Description: T2E6.19 [Arabidopsis thaliana]
  misc_feature (40)..(229): NCBI GI NO: 18420889 NR Description: putative protein; protein id: At5g25170
  misc_feature (44)..(247): NCBI GI NO: 18412886 NR Description: expressed protein; protein id: At1g80690
  misc_feature (46)..(250): NCBI GI NO: 18400749 NR Description: expressed protein; protein id: At2g25190
  misc_feature (44)..(247): NCBI GI NO: 25354458 NR Description: hypothetical protein F23A5.4
  misc_feature (45)..(198): NCBI GI NO: 15238059 NR Description: putative protein; protein id: At5g47310.1
  misc_feature (36)..(191): NCBI GI NO: 30684058 NR Description: expressed protein [Arabidopsis thaliana]
  misc_feature (68)..(191): NCBI GI NO: 7488100 NR Description: probable EREBP-4 - Arabidopsis thaliana
MKLRTKRPEWKSLVPLQLSRLSRKSAMRFFLFPKVQSAGQSPDDTPVYLNVYDLTPMNGYIYWAGLGIFHSGIEVHGVEYAFGAHDFPTSGVFEVEPRQCPGFRFRKSIFLGTTCLDPIQVRQFMELQSVNYNGDTYHLITKNCNHFCKDMCYKLTGNKIPKWVNRLARIGAICNCLLPESLKISPVGHDPNSQSEDSEKRRLRNPFSCFSSISSHRQLPSSSPFPPSPVKGGLPRCSSRKSSTASPKNR

SEQ ID NO: 26828 - protein, 224 aa, Zea mays subsp. mays
  peptide (1)..(224): Ceres Seq. ID no. 12343793
  misc_feature (20)..(142): Pfam Name: DUF862 Pfam Description: Eukaryotic protein of unknown function
  misc_feature (1)..(224): NCBI GI NO: 18401869 NR Description: expressed protein; protein id: At1g47740
  misc_feature (1)..(224): NCBI GI NO: 21593644 NR Description: unknown [Arabidopsis thaliana]
  misc_feature (1)..(224): NCBI GI NO: 9802596 NR Description: T2E6.19 [Arabidopsis thaliana]
  misc_feature (14)..(203): NCBI GI NO: 18420889 NR Description: putative protein; protein id: At5g25170
  misc_feature (18)..(221): NCBI GI NO: 18412886 NR Description: expressed protein; protein id: At1g80690
  misc_feature (20)..(224): NCBI GI NO: 18400749 NR Description: expressed protein; protein id: At2g25190
  misc_feature (18)..(221): NCBI GI NO: 25354458 NR Description: hypothetical protein F23A5.4
  misc_feature (19)..(172): NCBI GI NO: 15238059 NR Description: putative protein; protein id: At5g47310.1
  misc_feature (10)..(165): NCBI GI NO: 30684058 NR Description: expressed protein [Arabidopsis thaliana]
  misc_feature (42)..(165): NCBI GI NO: 7488100 NR Description: probable EREBP-4 - Arabidopsis thaliana
MRFFLFPKVQSAGQSPDDTPVYLNVYDLTPMNGYIYWAGLGIFHSGIEVHGVEYAFGAHDFPTSGVFEVEPRQCPGFRFRKSIFLGTTCLDPIQVRQFMELQSVNYNGDTYHLITKNCNHFCKDMCYKLTGNKIPKWVNRLARIGAICNCLLPESLKISPVGHDPNSQSEDSEKRRLRNPFSCFSSISSHRQLPSSSPFPPSPVKGGLPRCSSRKSSTASPKNR

SEQ ID NO: 26829 - DNA, 1623 bp, Zea mays subsp. mays
  misc_feature (1)..(1623): Ceres Seq. ID no. 12373676
agcaggcggcccgggcagatagcaggcgtgttgctcgcgcctcggcacataaatcgtctccgatctccaggtgcccggccaccctggttcgtcgaagcaccctagtcgtcgtagcggcctacgggctcttgggcagagagagaagctgcatagccagtcgctcctgcatatgctccagctgctgcgcgcaatgatggcactgacggagcggcagccgcagctggagaagaagccggcgcgcgggagggcgccgctgtcggggaaggccgtcgcggcgctgtgcgtgacgagcttcgtcgtggggctgctgcttagcggcaacgtgtcgctcatgtcggcctcggcgtcgccgtcgtcctcgagcacggacagcgccgacagcgacaagagcattcgtgtttccggttgcgacaatgagcgtaaactcggagagaaccaccccaaggatctcctgaacgaggtgtcgagaactcatcaagcaatccagtcgctggacaaggcggtgtccaccctggagatggagatggccgtggaacgcgctaggggcggtggcggcggcggcggcgccgcgtccatggcgtccagcaggactcctcagaaggccttcgtcgtggtcggcatcaacacggccttcaccagcaagaagcggcgcgactcgctccgcgacacctgggtccccagaggggataagctgaggaagctggagcgggagaaggggatcgtggtccggttcgtgatcgggcacagcggcacgccgggcggcggcgcgctggaccgcgccctggacgcggaggaggccgagaccagggacttcatgcggctggaccacgccgagggctaccacgagctgtcgtccaagaccaggacctacttcaccaccgccgtcgccacctgggacgccgacttctacgtcaaggtcgacgacgacatccacctcaacctcgggatgctggcgagcaggctggcgaaacacaggacgcgcccgagggtgtacgtcggctgcatgaagtccgggcctgtcctgtcacagaaaggagtcaagtaccacgagccagagtactggaagttcggcgacgagggcaacaagtacttccgccacgccaccggccaaatctacgccatctccaaggacctcgccgcctacatctccatcaaccagccgatcctgcacaggttcgcgaacgaggacgtctcgctgggggcgtggctgatcgggctcgaggtcgagcacgtcgacgaccggagcatgtgctgcgcgacgcctccagactgcgagtggaagaagcgagccgggaacgtgtgcgtggcgtccttcgactggtcgtgcagcggcgtctgtaagtcggtggaccggatgcgccacatccacaaggcgtgcggcgaaggcgaaggcgccgtctggaacgccgccacatgagacgagattgccattctcgtcggaacacttgttgtatgcggagcttcacttgatgaaaacgcgaaggcgagagggaagcgcctgcgccactgtttggcatgacacattccgcatggcaagcgtggttgtttcacttgagacggcatgctatgatccacgtaaaagcgcatggattattattggtgtgtcaacgtgatcctttttgg

SEQ ID NO: 26830 - protein, 415 aa, Zea mays subsp. mays
  peptide (1)..(415): Ceres Seq. ID no. 12373677
  misc_feature (159)..(358): Pfam Name: Pfam Description:  Galactosyltransferase
  misc_feature (8)..(415): NCBI GI NO: 34907342 NR Description: putative elicitor response protein
  misc_feature (24)..(412): NCBI GI NO: 15217544 NR Description: elicitor response protein, putative
  misc_feature (24)..(413): NCBI GI NO: 4138265 NR Description: Avr9 elicitor response protein [Nicotiana tabacum]
  misc_feature (29)..(414): NCBI GI NO: 15223337 NR Description: Avr9 elicitor response protein, putative
  misc_feature (29)..(412): NCBI GI NO: 30699558 NR Description: Avr9 elicitor response protein -related
  misc_feature (29)..(412): NCBI GI NO: 12323294 NR Description: putative
  misc_feature (26)..(413): NCBI GI NO: 15220440 NR Description: putative AVR9 elicitor response protein
  misc_feature (26)..(413): NCBI GI NO: 15225684 NR Description: unknown protein; protein id: At2g32430.1
  misc_feature (29)..(412): NCBI GI NO: 34365705 NR Description: At1g77810 [Arabidopsis thaliana]
  misc_feature (29)..(414): NCBI GI NO: 18416895 NR Description: Avr9 elicitor response like protein
MLQLLRAMMALTERQPQLEKKPARGRAPLSGKAVAALCVTSFVVGLLLSGNVSLMSASASPSSSSTDSADSDKSIRVSGCDNERKLGENHPKDLLNEVSRTHQAIQSLDKAVSTLEMEMAVERARGGGGGGGAASMASSRTPQKAFVVVGINTAFTSKKRRDSLRDTWVPRGDKLRKLEREKGIVVRFVIGHSGTPGGGALDRALDAEEAETRDFMRLDHAEGYHELSSKTRTYFTTAVATWDADFYVKVDDDIHLNLGMLASRLAKHRTRPRVYVGCMKSGPVLSQKGVKYHEPEYWKFGDEGNKYFRHATGQIYAISKDLAAYISINQPILHRFANEDVSLGAWLIGLEVEHVDDRSMCCATPPDCEWKKRAGNVCVASFDWSCSGVCKSVDRMRHIHKACGEGEGAVWNAAT

SEQ ID NO: 26831 - protein, 408 aa, Zea mays subsp. mays
  peptide (1)..(408): Ceres Seq. ID no. 12373678
  misc_feature (152)..(351): Pfam Name: Pfam Description:  Galactosyltransferase
  misc_feature (1)..(408): NCBI GI NO: 34907342 NR Description: putative elicitor response protein
  misc_feature (17)..(405): NCBI GI NO: 15217544 NR Description: elicitor response protein, putative
  misc_feature (17)..(406): NCBI GI NO: 4138265 NR Description: Avr9 elicitor response protein [Nicotiana tabacum]
  misc_feature (22)..(407): NCBI GI NO: 15223337 NR Description: Avr9 elicitor response protein, putative
  misc_feature (22)..(405): NCBI GI NO: 30699558 NR Description: Avr9 elicitor response protein -related
  misc_feature (22)..(405): NCBI GI NO: 12323294 NR Description: putative
  misc_feature (19)..(406): NCBI GI NO: 15220440 NR Description: putative AVR9 elicitor response protein
  misc_feature (19)..(406): NCBI GI NO: 15225684 NR Description: unknown protein; protein id: At2g32430.1
  misc_feature (22)..(405): NCBI GI NO: 34365705 NR Description: At1g77810 [Arabidopsis thaliana]
  misc_feature (22)..(407): NCBI GI NO: 18416895 NR Description: Avr9 elicitor response like protein
MMALTERQPQLEKKPARGRAPLSGKAVAALCVTSFVVGLLLSGNVSLMSASASPSSSSTDSADSDKSIRVSGCDNERKLGENHPKDLLNEVSRTHQAIQSLDKAVSTLEMEMAVERARGGGGGGGAASMASSRTPQKAFVVVGINTAFTSKKRRDSLRDTWVPRGDKLRKLEREKGIVVRFVIGHSGTPGGGALDRALDAEEAETRDFMRLDHAEGYHELSSKTRTYFTTAVATWDADFYVKVDDDIHLNLGMLASRLAKHRTRPRVYVGCMKSGPVLSQKGVKYHEPEYWKFGDEGNKYFRHATGQIYAISKDLAAYISINQPILHRFANEDVSLGAWLIGLEVEHVDDRSMCCATPPDCEWKKRAGNVCVASFDWSCSGVCKSVDRMRHIHKACGEGEGAVWNAAT

SEQ ID NO: 26832 - protein, 407 aa, Zea mays subsp. mays
  peptide (1)..(407): Ceres Seq. ID no. 12373679
  misc_feature (151)..(350): Pfam Name: Pfam Description:  Galactosyltransferase
  misc_feature (1)..(407): NCBI GI NO: 34907342 NR Description: putative elicitor response protein
  misc_feature (16)..(404): NCBI GI NO: 15217544 NR Description: elicitor response protein, putative
  misc_feature (16)..(405): NCBI GI NO: 4138265 NR Description: Avr9 elicitor response protein [Nicotiana tabacum]
  misc_feature (21)..(406): NCBI GI NO: 15223337 NR Description: Avr9 elicitor response protein, putative
  misc_feature (21)..(404): NCBI GI NO: 30699558 NR Description: Avr9 elicitor response protein -related
  misc_feature (21)..(404): NCBI GI NO: 12323294 NR Description: putative
  misc_feature (18)..(405): NCBI GI NO: 15220440 NR Description: putative AVR9 elicitor response protein
  misc_feature (18)..(405): NCBI GI NO: 15225684 NR Description: unknown protein; protein id: At2g32430.1
  misc_feature (21)..(404): NCBI GI NO: 34365705 NR Description: At1g77810 [Arabidopsis thaliana]
  misc_feature (21)..(406): NCBI GI NO: 18416895 NR Description: Avr9 elicitor response like protein
MALTERQPQLEKKPARGRAPLSGKAVAALCVTSFVVGLLLSGNVSLMSASASPSSSSTDSADSDKSIRVSGCDNERKLGENHPKDLLNEVSRTHQAIQSLDKAVSTLEMEMAVERARGGGGGGGAASMASSRTPQKAFVVVGINTAFTSKKRRDSLRDTWVPRGDKLRKLEREKGIVVRFVIGHSGTPGGGALDRALDAEEAETRDFMRLDHAEGYHELSSKTRTYFTTAVATWDADFYVKVDDDIHLNLGMLASRLAKHRTRPRVYVGCMKSGPVLSQKGVKYHEPEYWKFGDEGNKYFRHATGQIYAISKDLAAYISINQPILHRFANEDVSLGAWLIGLEVEHVDDRSMCCATPPDCEWKKRAGNVCVASFDWSCSGVCKSVDRMRHIHKACGEGEGAVWNAAT

SEQ ID NO: 26833 - DNA, 1387 bp, Zea mays subsp. mays
  misc_feature (1)..(1387): Ceres Seq. ID no. 12353776
attcagtgtagccagcaggtagctgcatcagctagctagctagatagacacttagacaggcataaaaccatctcgggcactcgttccctgcacaagtgtaggagagagctgaggcctgctggccatggacaccaccagcaagaaagcctacggggttgccgtcgtcatacagctcatctacaccggcatgtacgtcgtctccaaggcggcattcgaccatggcatgagcacctacgtgttcatcttctaccgccaggcggccgccactgcgctgttgctccccatagccattgtgcttgaaaggaagaatgcaccacccatgtcattcaggctgtttctgaagctgttcttctatgcattgcttggcaacacattgagcatgaatctgtacaacataagcctcaagtacacctctgcaacagtggcatcggcaacgagcaactctgtccctgtggtcaccttcttcctggcagtcctgttaaggctggaagtggttcggctgagaagcccgtcaggcatggcgaaggcggcgggcgtggcgctgtgcctggccggggtcctgaccatcgcgctgtacacggggccgtcgatgagcccggtgaaccaccaccgcgccttcgcgtcgcaccagcagcacccccatccccatgccgatggcggcggcggcggcaaggggacgtggatcaagggcacgttcctgatgctgctgtccaacacgacgtggtccctctggatcgtgctgcaggcgtcgctgctcaaggagtaccccaacaagctgttgtccacgctggtgcagtgcgcgctcagcaccgcccagtccttcctcctcgccgtcgccgtcgagcgggaccccgccgcctggaagctgcagctcgacgtcggcctcctcgccgtcgcctactccggtctggtggtgacgggcgtgtcgttctacctgcaggcgtggtgcatcgagaagcgcgggcccgtgttcctggccatgtccaacccgctgggcctgctgctcaccatcttctgctcctccttcttcctcggcgagatcgtgcgcctgggcagcctcctcggcagcggcctcctcgtcggagggctctacagcgtcctctggggcaagagcaaggaccacctccaccaggagcatcaagacgacgaagagaagcagcagcagcagccgagcgcagcaggcggagacaaccagaagcagctcaaggagcagttcgcaatggagccatcatcgccactgcgccatcagtccggatgatgaggaatggtctacgcgtgtatgtgtgtgagtaggttctacgtacgtgcctatatatgtcttaatgtctatgtggtgggtctgggcgtatccaactccgatgcacatggatggtctcttgttcgcccg

SEQ ID NO: 26834 - protein, 377 aa, Zea mays subsp. mays
  peptide (1)..(377): Ceres Seq. ID no. 12353777
  misc_feature (17)..(150): Pfam Name: Pfam Description:  Integral membrane protein DUF6
  misc_feature (5)..(332): NCBI GI NO: 34903802 NR Description: OSJNBa0016I09.14
  misc_feature (82)..(365): NCBI GI NO: 34903796 NR Description: OSJNBa0016I09.11
  misc_feature (5)..(71): NCBI GI NO: 34903796 NR Description: OSJNBa0016I09.11
  misc_feature (5)..(333): NCBI GI NO: 34903800 NR Description: OSJNBa0016I09.13
  misc_feature (84)..(359): NCBI GI NO: 15088548 NR Description: putative nodulin-like-like protein
  misc_feature (1)..(105): NCBI GI NO: 15088548 NR Description: putative nodulin-like-like protein
  misc_feature (1)..(348): NCBI GI NO: 15238227 NR Description: nodulin-like protein; protein id: At5g64700.1
  misc_feature (5)..(332): NCBI GI NO: 34913776 NR Description: nodulin-like protein
  misc_feature (24)..(363): NCBI GI NO: 34913778 NR Description: nodulin-like protein
  misc_feature (7)..(348): NCBI GI NO: 30693682 NR Description: nodulin N21 family protein [Arabidopsis thaliana]
MDTTSKKAYGVAVVIQLIYTGMYVVSKAAFDHGMSTYVFIFYRQAAATALLLPIAIVLERKNAPPMSFRLFLKLFFYALLGNTLSMNLYNISLKYTSATVASATSNSVPVVTFFLAVLLRLEVVRLRSPSGMAKAAGVALCLAGVLTIALYTGPSMSPVNHHRAFASHQQHPHPHADGGGGGKGTWIKGTFLMLLSNTTWSLWIVLQASLLKEYPNKLLSTLVQCALSTAQSFLLAVAVERDPAAWKLQLDVGLLAVAYSGLVVTGVSFYLQAWCIEKRGPVFLAMSNPLGLLLTIFCSSFFLGEIVRLGSLLGSGLLVGGLYSVLWGKSKDHLHQEHQDDEEKQQQQPSAAGGDNQKQLKEQFAMEPSSPLRHQSG

SEQ ID NO: 26835 - protein, 356 aa, Zea mays subsp. mays
  peptide (1)..(356): Ceres Seq. ID no. 12353778
  misc_feature (1)..(129): Pfam Name: Pfam Description:  Integral membrane protein DUF6
  misc_feature (1)..(311): NCBI GI NO: 34903802 NR Description: OSJNBa0016I09.14
  misc_feature (61)..(344): NCBI GI NO: 34903796 NR Description: OSJNBa0016I09.11
  misc_feature (1)..(50): NCBI GI NO: 34903796 NR Description: OSJNBa0016I09.11
  misc_feature (1)..(312): NCBI GI NO: 34903800 NR Description: OSJNBa0016I09.13
  misc_feature (63)..(338): NCBI GI NO: 15088548 NR Description: putative nodulin-like-like protein
  misc_feature (1)..(84): NCBI GI NO: 15088548 NR Description: putative nodulin-like-like protein
  misc_feature (1)..(327): NCBI GI NO: 15238227 NR Description: nodulin-like protein; protein id: At5g64700.1
  misc_feature (1)..(311): NCBI GI NO: 34913776 NR Description: nodulin-like protein
  misc_feature (3)..(342): NCBI GI NO: 34913778 NR Description: nodulin-like protein
  misc_feature (1)..(327): NCBI GI NO: 30693682 NR Description: nodulin N21 family protein [Arabidopsis thaliana]
MYVVSKAAFDHGMSTYVFIFYRQAAATALLLPIAIVLERKNAPPMSFRLFLKLFFYALLGNTLSMNLYNISLKYTSATVASATSNSVPVVTFFLAVLLRLEVVRLRSPSGMAKAAGVALCLAGVLTIALYTGPSMSPVNHHRAFASHQQHPHPHADGGGGGKGTWIKGTFLMLLSNTTWSLWIVLQASLLKEYPNKLLSTLVQCALSTAQSFLLAVAVERDPAAWKLQLDVGLLAVAYSGLVVTGVSFYLQAWCIEKRGPVFLAMSNPLGLLLTIFCSSFFLGEIVRLGSLLGSGLLVGGLYSVLWGKSKDHLHQEHQDDEEKQQQQPSAAGGDNQKQLKEQFAMEPSSPLRHQSG

SEQ ID NO: 26836 - protein, 344 aa, Zea mays subsp. mays
  peptide (1)..(344): Ceres Seq. ID no. 12353779
  misc_feature (1)..(117): Pfam Name: Pfam Description:  Integral membrane protein DUF6
  misc_feature (1)..(299): NCBI GI NO: 34903802 NR Description: OSJNBa0016I09.14
  misc_feature (49)..(332): NCBI GI NO: 34903796 NR Description: OSJNBa0016I09.11
  misc_feature (1)..(38): NCBI GI NO: 34903796 NR Description: OSJNBa0016I09.11
  misc_feature (1)..(300): NCBI GI NO: 34903800 NR Description: OSJNBa0016I09.13
  misc_feature (51)..(326): NCBI GI NO: 15088548 NR Description: putative nodulin-like-like protein
  misc_feature (1)..(72): NCBI GI NO: 15088548 NR Description: putative nodulin-like-like protein
  misc_feature (1)..(315): NCBI GI NO: 15238227 NR Description: nodulin-like protein; protein id: At5g64700.1
  misc_feature (1)..(299): NCBI GI NO: 34913776 NR Description: nodulin-like protein
  misc_feature (1)..(330): NCBI GI NO: 34913778 NR Description: nodulin-like protein
  misc_feature (1)..(315): NCBI GI NO: 30693682 NR Description: nodulin N21 family protein [Arabidopsis thaliana]
MSTYVFIFYRQAAATALLLPIAIVLERKNAPPMSFRLFLKLFFYALLGNTLSMNLYNISLKYTSATVASATSNSVPVVTFFLAVLLRLEVVRLRSPSGMAKAAGVALCLAGVLTIALYTGPSMSPVNHHRAFASHQQHPHPHADGGGGGKGTWIKGTFLMLLSNTTWSLWIVLQASLLKEYPNKLLSTLVQCALSTAQSFLLAVAVERDPAAWKLQLDVGLLAVAYSGLVVTGVSFYLQAWCIEKRGPVFLAMSNPLGLLLTIFCSSFFLGEIVRLGSLLGSGLLVGGLYSVLWGKSKDHLHQEHQDDEEKQQQQPSAAGGDNQKQLKEQFAMEPSSPLRHQSG

SEQ ID NO: 26837 - DNA, 1116 bp, Zea mays subsp. mays
  misc_feature (1)..(1116): Ceres Seq. ID no. 12434957
atatacctgtcactcacgctaccgccgtgaccgatcgttcgttccttccttctccctcccttcgcgggccgcgcgcctattttattatttactactctattcatatcattatattgtttggtttccttcttcccggccagatctctcactctctcgtcagatcctctcggctagctagctaggacagaggagggaggggaaggcgctggctatggcgactgcggcggcggcggcggcggcggccatggaggagccggacgtcgtcaacggccgcgacgtggtgagctgggtggcgtccggggtggtgctgtggtcgaccgccttcttgctggtgcgggcgctgttccccaagcgctcctacgacttctgcaaccgcgccgtctccaccatgcacgccgtcgccgccgtgtgcctcgcctgcctctccgtcgacgactggtcgtgccccgtctgcccgctcgccgccgcatcctcccgtcgccagatgaaggcgctggcggttacgctggcgtacatggtgtacgacgcggcgtgctgccacctcaacggcgacacgcggctggacaacgccgtgcaccacctggtcagcatcgtcggcatcggcgcggggctcgcctaccagaggtgcgggacggagatggtggccagcatgctcgtgacggagatgtccagcccgctgctgcacctgcgggagatgctcaaggagctgggcgtgcgggacacggagctgaacctcctcgtcgacgtgctcttcgccgccaccttctccgccgcccggatgggcgtcgggccgtacctcacctacgtcaccgtgacggcccgacaaccccatcctcatcaaggcgatggcgacggggctgcagctggtgagcgcctactggttcctgcggatcctccggatggtcaggtacaagctcgccggcaagaagaagccgacgccggccaagctcgccgccgccgccgccaactgacgtaataagcgccggcgacgaccttcacgagctacgcacatttatgataccgggagttggattcgacagaggccgtgctgtacatatagtacaaatacacacacacgcccgcctctgaagcaatgcaatgcaatgcaatttctcc

SEQ ID NO: 26838 - protein, 254 aa, Zea mays subsp. mays
  peptide (1)..(254): Ceres Seq. ID no. 12434958
  misc_feature (23)..(206): NCBI GI NO: 34903030 NR Description: unnamed protein product
  misc_feature (23)..(206): NCBI GI NO: 30693154 NR Description: expressed protein [Arabidopsis thaliana]
  misc_feature (12)..(206): NCBI GI NO: 22330031 NR Description: hypothetical protein; protein id: At1g45010
  misc_feature (23)..(206): NCBI GI NO: 15219511 NR Description: hypothetical protein; protein id: At1g35170.1
  misc_feature (23)..(185): NCBI GI NO: 25518603 NR Description: hypothetical protein T32G9
  misc_feature (12)..(91): NCBI GI NO: 25405881 NR Description: protein F27F5.9 [imported] - Arabidopsis thaliana
  misc_feature (135)..(179): NCBI GI NO: 25405881 NR Description: protein F27F5.9 [imported] - Arabidopsis thaliana
  misc_feature (34)..(206): NCBI GI NO: 34535216 NR Description: unnamed protein product [Homo sapiens]
  misc_feature (34)..(206): NCBI GI NO: 27661880 NR Description: hypothetical protein XP_236191 [Rattus norvegicus]
MATAAAAAAAAMEEPDVVNGRDVVSWVASGVVLWSTAFLLVRALFPKRSYDFCNRAVSTMHAVAAVCLACLSVDDWSCPVCPLAAASSRRQMKALAVTLAYMVYDAACCHLNGDTRLDNAVHHLVSIVGIGAGLAYQRCGTEMVASMLVTEMSSPLLHLREMLKELGVRDTELNLLVDVLFAATFSAARMGVGPYLTYVTVTARQPHPHQGDGDGAAAGERLLVPADPPDGQVQARRQEEADAGQARRRRRQLT

SEQ ID NO: 26839 - protein, 243 aa, Zea mays subsp. mays
  peptide (1)..(243): Ceres Seq. ID no. 12434959
  misc_feature (12)..(195): NCBI GI NO: 34903030 NR Description: unnamed protein product
  misc_feature (12)..(195): NCBI GI NO: 30693154 NR Description: expressed protein [Arabidopsis thaliana]
  misc_feature (1)..(195): NCBI GI NO: 22330031 NR Description: hypothetical protein; protein id: At1g45010
  misc_feature (12)..(195): NCBI GI NO: 15219511 NR Description: hypothetical protein; protein id: At1g35170.1
  misc_feature (12)..(174): NCBI GI NO: 25518603 NR Description: hypothetical protein T32G9
  misc_feature (1)..(80): NCBI GI NO: 25405881 NR Description: protein F27F5.9 [imported] - Arabidopsis thaliana
  misc_feature (124)..(168): NCBI GI NO: 25405881 NR Description: protein F27F5.9 [imported] - Arabidopsis thaliana
  misc_feature (23)..(195): NCBI GI NO: 34535216 NR Description: unnamed protein product [Homo sapiens]
  misc_feature (23)..(195): NCBI GI NO: 27661880 NR Description: hypothetical protein XP_236191 [Rattus norvegicus]
MEEPDVVNGRDVVSWVASGVVLWSTAFLLVRALFPKRSYDFCNRAVSTMHAVAAVCLACLSVDDWSCPVCPLAAASSRRQMKALAVTLAYMVYDAACCHLNGDTRLDNAVHHLVSIVGIGAGLAYQRCGTEMVASMLVTEMSSPLLHLREMLKELGVRDTELNLLVDVLFAATFSAARMGVGPYLTYVTVTARQPHPHQGDGDGAAAGERLLVPADPPDGQVQARRQEEADAGQARRRRRQLT

SEQ ID NO: 26840 - protein, 195 aa, Zea mays subsp. mays
  peptide (1)..(195): Ceres Seq. ID no. 12434960
  misc_feature (1)..(147): NCBI GI NO: 34903030 NR Description: unnamed protein product
  misc_feature (1)..(147): NCBI GI NO: 30693154 NR Description: expressed protein [Arabidopsis thaliana]
  misc_feature (1)..(147): NCBI GI NO: 22330031 NR Description: hypothetical protein; protein id: At1g45010
  misc_feature (1)..(147): NCBI GI NO: 15219511 NR Description: hypothetical protein; protein id: At1g35170.1
  misc_feature (1)..(126): NCBI GI NO: 25518603 NR Description: hypothetical protein T32G9
  misc_feature (1)..(32): NCBI GI NO: 25405881 NR Description: protein F27F5.9 [imported] - Arabidopsis thaliana
  misc_feature (76)..(120): NCBI GI NO: 25405881 NR Description: protein F27F5.9 [imported] - Arabidopsis thaliana
  misc_feature (1)..(147): NCBI GI NO: 34535216 NR Description: unnamed protein product [Homo sapiens]
  misc_feature (1)..(147): NCBI GI NO: 27661880 NR Description: hypothetical protein XP_236191 [Rattus norvegicus]
MHAVAAVCLACLSVDDWSCPVCPLAAASSRRQMKALAVTLAYMVYDAACCHLNGDTRLDNAVHHLVSIVGIGAGLAYQRCGTEMVASMLVTEMSSPLLHLREMLKELGVRDTELNLLVDVLFAATFSAARMGVGPYLTYVTVTARQPHPHQGDGDGAAAGERLLVPADPPDGQVQARRQEEADAGQARRRRRQLT

SEQ ID NO: 26841 - DNA, 1661 bp, Zea mays subsp. mays
  misc_feature (1)..(1661): Ceres Seq. ID no. 12409686
gtgttcacaaagccggcgccttttgctccccgatctcagttcccgcccacctctaagctcccaaggcgacgctgcggcggcgggacaagcggaaggacaagaggcggacttgtctccctgcccccaccccctccctcgcttcgcgcgtacccccttcagttcagccgggcggtaccgtcgacggcgccggcattgtacttctgctgcgcagctatcactgctctgagaaaatggttgcagcagcctttactgttgatttggacaagcctctagtattccaggttggccatctagaggagcagtatcaggagtgggttcaccagccgattgtttgcaaggaagggccacggttttttgaaaatgatatattggagttcttaacacgcacgaaatggtgggcagttcctcttatctggttgcctgttgtatgttggtgcctgagtacttctatcaagatgggcaatactatcacagatgtagctatgatgattgggtttggaatatttctgtggacactgatcgaatatgtgttacaccgattcttgttccacataaaaaccaaaagttactggggaaacacagcacattatcttcttcatggatgtcatcacaagcatccgatggatggacttcgacttgtctttccaccagctgccgcagctattttgtgctttccggtaaataatcttccttatgtattacgtaccagggtatgggtatctactctgctgttgctgacaatatgtcagatttccacaacactgatgttgaaattacttactacatttgttaaatgttgcatcctaatccttttttttctaaagctggttgaagtggcctgtttgtacatggaaatcgtcatggtttcaagctaatcagaattccttttaactttgttaactttcagttggatatcgataattttaatgccttttttttctgaactgttcatatagttctggaacatgatcaagctattttcgaccccgtctacaactcctggtctgtttggaggtggcctgttgggctacgtgatctatgattgcacacactactacctgcatcatggccagccatcatcagatcctgcaaagtatctccaagaagtaccatctcaaccatcacttcagaattcaaacaaagggctttggaataacttcgaccctgtgggatcatgtatttggcacgctgccttctacgaaaactgtcgacaagagcatttgattttgactggatcttctgctttgcaaagctcttatagtgatgttaggctttgctcgcattgcctgtgtccactttttgaggccagcttccctgttccatcatgtagatttggctttggcagtgtctctatttttttttatctctagcagaggactttaaaatcatcaattacagattggtcatcatcggtggaggttctgttggacaaatttctatccagtttctgattcttctccatggaccaactgtatgaaggcgatcaccagttgctggctcacagacgcgactgaagcgatcaccagtttggtttcaagtcaatgccatcagcggtcgtgttcacattatgtctagctagtgccagctgttagatcagcatgtaatgtatgtacagtgttttcttctctagtagcgtagcctctctgcaagggctgtttggc

SEQ ID NO: 26842 - protein, 214 aa, Zea mays subsp. mays
  peptide (1)..(214): Ceres Seq. ID no. 12409687
  misc_feature (89)..(149): Pfam Name: Pfam Description:  Fatty acid hydroxylase
  misc_feature (1)..(149): NCBI GI NO: 34897078 NR Description: putative fatty acid hydroxylase
  misc_feature (1)..(159): NCBI GI NO: 15226828 NR Description: fatty acid hydroxylase
  misc_feature (1)..(167): NCBI GI NO: 15233426 NR Description: fatty acid hydroxylase - like protein
  misc_feature (8)..(172): NCBI GI NO: 18447515 NR Description: RE63157p [Drosophila melanogaster]
  misc_feature (14)..(146): NCBI GI NO: 17505701 NR Description: Fatty acid hydroxylase (36.3 kD)
  misc_feature (14)..(146): NCBI GI NO: 39589620 NR Description: Hypothetical protein CBG12227
  misc_feature (8)..(127): NCBI GI NO: 12053843 NR Description: fatty acid hydroxylase [Homo sapiens]
  misc_feature (8)..(162): NCBI GI NO: 6323928 NR Description: Required for the hydroxylation of the very longchain fatty acid
  misc_feature (8)..(167): NCBI GI NO: 40746791 NR Description: hypothetical protein AN0918.2
  misc_feature (90)..(146): NCBI GI NO: 20071844 NR Description: Unknown (protein for IMAGE:4983638) [Mus musculus]
MVAAAFTVDLDKPLVFQVGHLEEQYQEWVHQPIVCKEGPRFFENDILEFLTRTKWWAVPLIWLPVVCWCLSTSIKMGNTITDVAMMIGFGIFLWTLIEYVLHRFLFHIKTKSYWGNTAHYLLHGCHHKHPMDGLRLVFPPAAAAILCFPVNNLPYVLRTRVWVSTLLLLTICQISTTLMLKLLTTFVKCCILILFFLKLVEVACLYMEIVMVSS

SEQ ID NO: 26843 - protein, 139 aa, Zea mays subsp. mays
  peptide (1)..(139): Ceres Seq. ID no. 12409688
  misc_feature (14)..(74): Pfam Name: Pfam Description:  Fatty acid hydroxylase
  misc_feature (1)..(74): NCBI GI NO: 34897078 NR Description: putative fatty acid hydroxylase
  misc_feature (1)..(84): NCBI GI NO: 15226828 NR Description: fatty acid hydroxylase
  misc_feature (1)..(92): NCBI GI NO: 15233426 NR Description: fatty acid hydroxylase - like protein
  misc_feature (1)..(97): NCBI GI NO: 18447515 NR Description: RE63157p [Drosophila melanogaster]
  misc_feature (1)..(71): NCBI GI NO: 17505701 NR Description: Fatty acid hydroxylase (36.3 kD)
  misc_feature (1)..(71): NCBI GI NO: 39589620 NR Description: Hypothetical protein CBG12227
  misc_feature (1)..(52): NCBI GI NO: 12053843 NR Description: fatty acid hydroxylase [Homo sapiens]
  misc_feature (1)..(87): NCBI GI NO: 6323928 NR Description: Required for the hydroxylation of the very longchain fatty acid
  misc_feature (1)..(92): NCBI GI NO: 40746791 NR Description: hypothetical protein AN0918.2
  misc_feature (15)..(71): NCBI GI NO: 20071844 NR Description: Unknown (protein for IMAGE:4983638) [Mus musculus]
MGNTITDVAMMIGFGIFLWTLIEYVLHRFLFHIKTKSYWGNTAHYLLHGCHHKHPMDGLRLVFPPAAAAILCFPVNNLPYVLRTRVWVSTLLLLTICQISTTLMLKLLTTFVKCCILILFFLKLVEVACLYMEIVMVSS

SEQ ID NO: 26844 - protein, 134 aa, Zea mays subsp. mays
  peptide (1)..(134): Ceres Seq. ID no. 12409689
  misc_feature (1)..(77): Pfam Name: Pfam Description:  Fatty acid hydroxylase
  misc_feature (1)..(77): NCBI GI NO: 34897078 NR Description: putative fatty acid hydroxylase
  misc_feature (1)..(77): NCBI GI NO: 15226828 NR Description: fatty acid hydroxylase
  misc_feature (1)..(77): NCBI GI NO: 15233426 NR Description: fatty acid hydroxylase - like protein
  misc_feature (14)..(38): NCBI GI NO: 18447515 NR Description: RE63157p [Drosophila melanogaster]
  misc_feature (15)..(37): NCBI GI NO: 17505701 NR Description: Fatty acid hydroxylase (36.3 kD)
  misc_feature (15)..(37): NCBI GI NO: 39589620 NR Description: Hypothetical protein CBG12227
  misc_feature (1)..(37): NCBI GI NO: 12053843 NR Description: fatty acid hydroxylase [Homo sapiens]
  misc_feature (17)..(34): NCBI GI NO: 40746791 NR Description: hypothetical protein AN0918.2
  misc_feature (1)..(37): NCBI GI NO: 30017399 NR Description: fatty acid hydroxylase domain containing 1
  misc_feature (15)..(36): NCBI GI NO: 6323928 NR Description: Required for the hydroxylation of the very longchain fatty acid
MIKLFSTPSTTPGLFGGGLLGYVIYDCTHYYLHHGQPSSDPAKYLQEVPSQPSLQNSNKGLWNNFDPVGSCIWHAAFYENCRQEHLILTGSSALQSSYSDVRLCSHCLCPLFEASFPVPSCRFGFGSVSIFFYL

SEQ ID NO: 26845 - DNA, 1192 bp, Zea mays subsp. mays
  misc_feature (1)..(1192): Ceres Seq. ID no. 12409683
acaaacgaacaaggcattaatctcctccaatcctccagtgatcccgggtaaccaaatcaaatcagccctttcttttgctacggttttgtatttcatcgtgtcgcccaagaaaatcgaaggaacgcgccgccaccggccgcaacaaagcaaagcaggcctccggcctccctgaactgacttcagaagtcaccaacgcacccagcacagacagaagaccctcgccggacgctcgctctcgccggggacaactcaatcccgaggccaggatggcccgctacgatcgcgcgatcaccgtgttctcacccgacggccacctcttccaggtcgagtacgccctcgaggccgtccgcaagggcaacgccgctgtcggcgtccgcggcgtcgacaccgtcgtcctcggcgtcgagaagaagtccacccccaagctccaggactccaggtccgtgcgcaagatcgtgagcctggacacccacatcgcgctggcgtgcgcggggctcaaggccgacgcgcgcgtgctcatcaaccgcgctcgcgtggagtgccagagccaccgcctcacagtcgaggaccccgtcaccgtcgagtacatcacgcgctacatcgccggcctgcagcagaagtacacgcagagcggaggggtgcgccccttcggcctctccacgctcatcgtcggcttcgatccctacacccagaagccccgcgctgtaccagactgacccctcagggaccttctccgcttggaaggccaacgcaaccggccgcaactccaactccatgcgcgagtttctcgagaagaattacaaggagacgtccggtaaggagaccatcaagctcgccatcagagcactccttgaggttgttgagagtggtggcaagaacatagagattgcagtgatgacacacgaggacggccttcatgaactcgaagaggctgagattgatgagtatgttgccgaaattgaagcagagaaggccgctgccgaggctgcaaagaagggtgcaccaaaggggaactgactccgcacaagcttagattccgcctcttgttccagagcatgtcttatgattcacctcttagatggatgcccggatgtttggatacaggaatatttataaaaaaaattaagatgaagccgcttggatgaaaacatgctatgtgatgcatagtattgcaataccatggtggtttgtg

SEQ ID NO: 26846 - protein, 149 aa, Zea mays subsp. mays
  peptide (1)..(149): Ceres Seq. ID no. 12409684
  misc_feature (27)..(144): Pfam Name: Pfam Description:  Proteasome A-type and B-type
  misc_feature (1)..(144): NCBI GI NO: 7435885 NR Description: probable C 3
  misc_feature (1)..(144): NCBI GI NO: 12644044 NR Description: Proteasome subunit alpha type 7
  misc_feature (1)..(144): NCBI GI NO: 12229936 NR Description: Proteasome subunit alpha type 7
  misc_feature (1)..(144): NCBI GI NO: 15239271 NR Description: 20S proteasome alpha subunit D2
  misc_feature (1)..(144): NCBI GI NO: 15230435 NR Description: 20S proteasome alpha subunit D
  misc_feature (1)..(144): NCBI GI NO: 21593040 NR Description: multicatalytic endopeptidase complex  alpha chain
  misc_feature (1)..(144): NCBI GI NO: 3334299 NR Description: Proteasome subunit alpha type 7
  misc_feature (1)..(144): NCBI GI NO: 2511580 NR Description: multicatalytic endopeptidase
  misc_feature (35)..(144): NCBI GI NO: 14594917 NR Description: putative alpha4 proteasome subunit
  misc_feature (2)..(145): NCBI GI NO: 12229928 NR Description: Proteasome subunit alpha type 7
MARYDRAITVFSPDGHLFQVEYALEAVRKGNAAVGVRGVDTVVLGVEKKSTPKLQDSRSVRKIVSLDTHIALACAGLKADARVLINRARVECQSHRLTVEDPVTVEYITRYIAGLQQKYTQSGGVRPFGLSTLIVGFDPYTQKPRAVPD

SEQ ID NO: 26847 - protein, 80 aa, Zea mays subsp. mays
  peptide (1)..(80): Ceres Seq. ID no. 12409685
  misc_feature (1)..(78): NCBI GI NO: 7435885 NR Description: probable C 3
  misc_feature (1)..(78): NCBI GI NO: 12644044 NR Description: Proteasome subunit alpha type 7
  misc_feature (1)..(78): NCBI GI NO: 12229936 NR Description: Proteasome subunit alpha type 7
  misc_feature (1)..(78): NCBI GI NO: 15239271 NR Description: 20S proteasome alpha subunit D2
  misc_feature (1)..(78): NCBI GI NO: 15230435 NR Description: 20S proteasome alpha subunit D
  misc_feature (1)..(78): NCBI GI NO: 21593040 NR Description: multicatalytic endopeptidase complex  alpha chain
  misc_feature (1)..(74): NCBI GI NO: 3334299 NR Description: Proteasome subunit alpha type 7
  misc_feature (1)..(65): NCBI GI NO: 2511580 NR Description: multicatalytic endopeptidase
  misc_feature (1)..(78): NCBI GI NO: 14594917 NR Description: putative alpha4 proteasome subunit
  misc_feature (1)..(80): NCBI GI NO: 12229928 NR Description: Proteasome subunit alpha type 7
MREFLEKNYKETSGKETIKLAIRALLEVVESGGKNIEIAVMTHEDGLHELEEAEIDEYVAEIEAEKAAAEAAKKGAPKGN

SEQ ID NO: 26848 - DNA, 1105 bp, Zea mays subsp. mays
  misc_feature (1)..(1105): Ceres Seq. ID no. 12373368
gcacgagaccattacctagaacatcctaatcgaaaagaatccgcatttccccttccccgcaccgcaccgcaccgcacccaacccccgtcggagagagagatggcatcggtggcggagatgcagcccctcgcgccggcggggtaccgccgcgcgccggagatgaaggagaaggtggaggcgtcggtggtggacctggaggccgggaccggggagacgctgtacccggggatctcgcgcggggagagcgccctccgatggggcttcgtccgcaaggtctacggcatcctcgctgcgcagctgctcctcaccaccgccgtctccgccctcaccgttctccaccccaccctcaacgccacgctctccgactccccgggcctcgcgctcgtgctcgccgtcctgcccttcatcctgatgatcccattgtaccattatcagcacaagcacccacacaatttcgttttcctgggtctgttcacgttgtgcttgagcttcagcatcggcgtggcttgtgctaacacccaaggaaaaatcgttctggaggctttagtgctgacggctggcgtggtggtttctctgactgcgtatgctttctgggcgtcaaagaagggcaaggaatttgggtacctggggcctatcctgtcttccgcgcttactatcctcgtcctaactagctttcttcaggttttcttcccactgggacccgtgtcggtgggcttgttcggtggtctaggggctctggtcttctcaggcttcatcctgtacgacaccgagaacctgatcaagcgccacacctacgacgagtacatctgggcgtcggttgggctgtacctcgacatcctgaacctgttcctctccatcctgaacatgctcaggagcatgcaatccgacaactagcctcttgatcgaacacggtatacccccatggtaaatgcggtcctgtgctctggttgttagaggacgggatcgacgtgcgacatatgtattgtgtgagcccactcgtgtcaacactgcaaacaattgtggtcatgtcaccttgtatgttcttggtcacttttcaaacaattgtaagtacctcatatcgttttgcgctcgtgctattcgcgcc

SEQ ID NO: 26849 - protein, 297 aa, Zea mays subsp. mays
  peptide (1)..(297): Ceres Seq. ID no. 12373369
  misc_feature (81)..(291): Pfam Name: Pfam Description:  Uncharacterised protein family UPF0005
  misc_feature (63)..(297): NCBI GI NO: 18414455 NR Description: Expressed protein; protein id: At4g15470
  misc_feature (63)..(255): NCBI GI NO: 15810201 NR Description: AT4g15470/dl3775w [Arabidopsis thaliana]
  misc_feature (64)..(292): NCBI GI NO: 34393841 NR Description: putative z-protein
  misc_feature (64)..(295): NCBI GI NO: 15229411 NR Description: putative protein; protein id: At3g63310.1
  misc_feature (64)..(294): NCBI GI NO: 15218701 NR Description: putative glutamate/aspartate-binding peptide
  misc_feature (64)..(294): NCBI GI NO: 15235466 NR Description: putative glutamate-/aspartate-binding peptide
  misc_feature (73)..(295): NCBI GI NO: 14626300 NR Description: putative receptor-associated protein
  misc_feature (63)..(138): NCBI GI NO: 7485070 NR Description: hypothetical protein - Arabidopsis thaliana
  misc_feature (175)..(246): NCBI GI NO: 7485070 NR Description: hypothetical protein - Arabidopsis thaliana
  misc_feature (135)..(175): NCBI GI NO: 7485070 NR Description: hypothetical protein - Arabidopsis thaliana
ARDHYLEHPNRKESAFPLPRTAPHRTQPPSEREMASVAEMQPLAPAGYRRAPEMKEKVEASVVDLEAGTGETLYPGISRGESALRWGFVRKVYGILAAQLLLTTAVSALTVLHPTLNATLSDSPGLALVLAVLPFILMIPLYHYQHKHPHNFVFLGLFTLCLSFSIGVACANTQGKIVLEALVLTAGVVVSLTAYAFWASKKGKEFGYLGPILSSALTILVLTSFLQVFFPLGPVSVGLFGGLGALVFSGFILYDTENLIKRHTYDEYIWASVGLYLDILNLFLSILNMLRSMQSDN

SEQ ID NO: 26850 - protein, 264 aa, Zea mays subsp. mays
  peptide (1)..(264): Ceres Seq. ID no. 12373370
  misc_feature (48)..(258): Pfam Name: Pfam Description:  Uncharacterised protein family UPF0005
  misc_feature (30)..(264): NCBI GI NO: 18414455 NR Description: Expressed protein; protein id: At4g15470
  misc_feature (30)..(222): NCBI GI NO: 15810201 NR Description: AT4g15470/dl3775w [Arabidopsis thaliana]
  misc_feature (31)..(259): NCBI GI NO: 34393841 NR Description: putative z-protein
  misc_feature (31)..(262): NCBI GI NO: 15229411 NR Description: putative protein; protein id: At3g63310.1
  misc_feature (31)..(261): NCBI GI NO: 15218701 NR Description: putative glutamate/aspartate-binding peptide
  misc_feature (31)..(261): NCBI GI NO: 15235466 NR Description: putative glutamate-/aspartate-binding peptide
  misc_feature (40)..(262): NCBI GI NO: 14626300 NR Description: putative receptor-associated protein
  misc_feature (30)..(105): NCBI GI NO: 7485070 NR Description: hypothetical protein - Arabidopsis thaliana
  misc_feature (142)..(213): NCBI GI NO: 7485070 NR Description: hypothetical protein - Arabidopsis thaliana
  misc_feature (102)..(142): NCBI GI NO: 7485070 NR Description: hypothetical protein - Arabidopsis thaliana
MASVAEMQPLAPAGYRRAPEMKEKVEASVVDLEAGTGETLYPGISRGESALRWGFVRKVYGILAAQLLLTTAVSALTVLHPTLNATLSDSPGLALVLAVLPFILMIPLYHYQHKHPHNFVFLGLFTLCLSFSIGVACANTQGKIVLEALVLTAGVVVSLTAYAFWASKKGKEFGYLGPILSSALTILVLTSFLQVFFPLGPVSVGLFGGLGALVFSGFILYDTENLIKRHTYDEYIWASVGLYLDILNLFLSILNMLRSMQSDN

SEQ ID NO: 26851 - protein, 258 aa, Zea mays subsp. mays
  peptide (1)..(258): Ceres Seq. ID no. 12373371
  misc_feature (42)..(252): Pfam Name: Pfam Description:  Uncharacterised protein family UPF0005
  misc_feature (24)..(258): NCBI GI NO: 18414455 NR Description: Expressed protein; protein id: At4g15470
  misc_feature (24)..(216): NCBI GI NO: 15810201 NR Description: AT4g15470/dl3775w [Arabidopsis thaliana]
  misc_feature (25)..(253): NCBI GI NO: 34393841 NR Description: putative z-protein
  misc_feature (25)..(256): NCBI GI NO: 15229411 NR Description: putative protein; protein id: At3g63310.1
  misc_feature (25)..(255): NCBI GI NO: 15218701 NR Description: putative glutamate/aspartate-binding peptide
  misc_feature (25)..(255): NCBI GI NO: 15235466 NR Description: putative glutamate-/aspartate-binding peptide
  misc_feature (34)..(256): NCBI GI NO: 14626300 NR Description: putative receptor-associated protein
  misc_feature (24)..(99): NCBI GI NO: 7485070 NR Description: hypothetical protein - Arabidopsis thaliana
  misc_feature (136)..(207): NCBI GI NO: 7485070 NR Description: hypothetical protein - Arabidopsis thaliana
  misc_feature (96)..(136): NCBI GI NO: 7485070 NR Description: hypothetical protein - Arabidopsis thaliana
MQPLAPAGYRRAPEMKEKVEASVVDLEAGTGETLYPGISRGESALRWGFVRKVYGILAAQLLLTTAVSALTVLHPTLNATLSDSPGLALVLAVLPFILMIPLYHYQHKHPHNFVFLGLFTLCLSFSIGVACANTQGKIVLEALVLTAGVVVSLTAYAFWASKKGKEFGYLGPILSSALTILVLTSFLQVFFPLGPVSVGLFGGLGALVFSGFILYDTENLIKRHTYDEYIWASVGLYLDILNLFLSILNMLRSMQSDN

SEQ ID NO: 26852 - DNA, 1536 bp, Zea mays subsp. mays
  misc_feature (1)..(1536): Ceres Seq. ID no. 12409679
atggtggcaagtgagcagcaaacacacagctagactccgcgagaaccgtcaatgggttctataggaggacccacagccacagccaccgccgaccggcgccgccgcgtgctgttcttcccgctcccgtaccagggccatatcaaccccatgttccaactcgccggcctcctccacttgcgcggtttctccgtcaccgtcttccacaccgacttcaacgctcccgacaagtcccgccaccctgcctacgacttcgtccccgttcccgtccgcggctgcttgccgaagggcagctcggatgccttgcaggtgaccgtggagcgcatcctcgccgtgaaccgcgcctgcgaggctccgttccgggagcgcctggccgctctgctggcgcgggaggacgtcgcgtgcctggtcgctgacgcccacctgctgacgctgctggacgtggcgcgggggctcggcgtgccgacgctggtgctgcgcaccggcagcgcggcgtgcctccgcatgttcgcggcgttccccgcgctctgcgacaaggggtatcagccggcgcaagagtcgcagctggaggcgccggtgactgagctgccgccgtaccgcgtccgggacctgccgtccaccaccagcgcctgccacggcgtaataagcgaggtgatttcccgtttagtgacggccgtgacgacctcctcgggtctcatcctcaacaccatggacgctctcgagtgcggcgagctggcgtcgctccggcgagacctcggcgtccccgtgttcgacatcggcccgctccacatgctctctccggcggcctcgagcagcttgctactgcaagaccgcggctgcctcgagtggctcgacgcgcaagccccggcgtccgtgctctacgtcagcttcggcagcctcgccagcatgtccgccgccgagctggtggaaacagcctggggcatagccaacagcggctatcccttcctgtgggttctccggccgggcctcgtccgcggctcgcagacgtcggaggcggcgccacccctgcccgacggcttcgacgccgcgacgcgcgggcggggcatggtcgtgagctgggcggccgcaggaggaggtcctggcgcaccctgccgtgggcgcgttctggacgcactgtggctggaactcgacgctagagagcttgtgcgcgggcgtgccggtcattgcccgcccgtgcttcggcgaccagatggggaacgcgaggtacgtggaccacgtgtggcggaccggcctcacgctcgacggcgtgctcgagaggggcgaggtggaggcggccgtcgcggcgttgatggcgcctggagagcccggcgacggactgcgtcggagggcgcgggagctcaagagcagcgcggcggagtgcatggccaaggatgggtcgtcctgcacgaatgtcgacaagctggtagaccacattctgacactgtaggcgtttggtacaggagcagccacgtggtgctgttcttgggtactgtttttctttgcggttgaaaaataaataaataaaacccgatggagctt

SEQ ID NO: 26853 - protein, 484 aa, Zea mays subsp. mays
  peptide (1)..(484): Ceres Seq. ID no. 12409680
  misc_feature (17)..(440): Pfam Name: Pfam Description:  UDP-glucoronosyl and UDP-glucosyl transferase
  misc_feature (3)..(440): NCBI GI NO: 34900662 NR Description: glucuronosyl transferase-like protein
  misc_feature (1)..(436): NCBI GI NO: 34897378 NR Description: putative UDP-glucosyltransferase
  misc_feature (15)..(343): NCBI GI NO: 33146633 NR Description: putative UDP-glucosyltransferase
  misc_feature (16)..(343): NCBI GI NO: 34900682 NR Description: glucuronosyl transferase-like protein
  misc_feature (15)..(343): NCBI GI NO: 34900678 NR Description: glucuronosyl transferase-like protein
  misc_feature (18)..(343): NCBI GI NO: 18033228 NR Description: UDP-glucosyltransferase BX8 [Zea mays]
  misc_feature (17)..(343): NCBI GI NO: 33146634 NR Description: putative UDP-glucosyltransferase
  misc_feature (18)..(343): NCBI GI NO: 18033230 NR Description: UDP-glucosyltransferase BX9 [Zea mays]
  misc_feature (17)..(343): NCBI GI NO: 15228174 NR Description: glucuronosyl transferase - like protein
  misc_feature (44)..(343): NCBI GI NO: 34395172 NR Description: putative UDP-glucosyltransferase
MGSIGGPTATATADRRRRVLFFPLPYQGHINPMFQLAGLLHLRGFSVTVFHTDFNAPDKSRHPAYDFVPVPVRGCLPKGSSDALQVTVERILAVNRACEAPFRERLAALLAREDVACLVADAHLLTLLDVARGLGVPTLVLRTGSAACLRMFAAFPALCDKGYQPAQESQLEAPVTELPPYRVRDLPSTTSACHGVISEVISRLVTAVTTSSGLILNTMDALECGELASLRRDLGVPVFDIGPLHMLSPAASSSLLLQDRGCLEWLDAQAPASVLYVSFGSLASMSAAELVETAWGIANSGYPFLWVLRPGLVRGSQTSEAAPPLPDGFDAATRGRGMVVSWAAAGGGPGAPCRGRVLDALWLELDARELVRGRAGHCPPVLRRPDGEREVRGPRVADRPHARRRAREGRGGGGRRGVDGAWRARRRTASEGAGAQEQRGGVHGQGWVVLHECRQAGRPHSDTVGVWYRSSHVVLFLGTVFLCG

SEQ ID NO: 26854 - protein, 452 aa, Zea mays subsp. mays
  peptide (1)..(452): Ceres Seq. ID no. 12409681
  misc_feature (1)..(408): Pfam Name: Pfam Description:  UDP-glucoronosyl and UDP-glucosyl transferase
  misc_feature (1)..(408): NCBI GI NO: 34900662 NR Description: glucuronosyl transferase-like protein
  misc_feature (1)..(404): NCBI GI NO: 34897378 NR Description: putative UDP-glucosyltransferase
  misc_feature (1)..(311): NCBI GI NO: 33146633 NR Description: putative UDP-glucosyltransferase
  misc_feature (1)..(311): NCBI GI NO: 34900682 NR Description: glucuronosyl transferase-like protein
  misc_feature (1)..(311): NCBI GI NO: 34900678 NR Description: glucuronosyl transferase-like protein
  misc_feature (1)..(311): NCBI GI NO: 18033228 NR Description: UDP-glucosyltransferase BX8 [Zea mays]
  misc_feature (1)..(311): NCBI GI NO: 33146634 NR Description: putative UDP-glucosyltransferase
  misc_feature (1)..(311): NCBI GI NO: 18033230 NR Description: UDP-glucosyltransferase BX9 [Zea mays]
  misc_feature (1)..(311): NCBI GI NO: 15228174 NR Description: glucuronosyl transferase - like protein
  misc_feature (12)..(311): NCBI GI NO: 34395172 NR Description: putative UDP-glucosyltransferase
MFQLAGLLHLRGFSVTVFHTDFNAPDKSRHPAYDFVPVPVRGCLPKGSSDALQVTVERILAVNRACEAPFRERLAALLAREDVACLVADAHLLTLLDVARGLGVPTLVLRTGSAACLRMFAAFPALCDKGYQPAQESQLEAPVTELPPYRVRDLPSTTSACHGVISEVISRLVTAVTTSSGLILNTMDALECGELASLRRDLGVPVFDIGPLHMLSPAASSSLLLQDRGCLEWLDAQAPASVLYVSFGSLASMSAAELVETAWGIANSGYPFLWVLRPGLVRGSQTSEAAPPLPDGFDAATRGRGMVVSWAAAGGGPGAPCRGRVLDALWLELDARELVRGRAGHCPPVLRRPDGEREVRGPRVADRPHARRRAREGRGGGGRRGVDGAWRARRRTASEGAGAQEQRGGVHGQGWVVLHECRQAGRPHSDTVGVWYRSSHVVLFLGTVFLCG

SEQ ID NO: 26855 - protein, 334 aa, Zea mays subsp. mays
  peptide (1)..(334): Ceres Seq. ID no. 12409682
  misc_feature (1)..(290): Pfam Name: Pfam Description:  UDP-glucoronosyl and UDP-glucosyl transferase
  misc_feature (1)..(290): NCBI GI NO: 34900662 NR Description: glucuronosyl transferase-like protein
  misc_feature (1)..(286): NCBI GI NO: 34897378 NR Description: putative UDP-glucosyltransferase
  misc_feature (1)..(193): NCBI GI NO: 33146633 NR Description: putative UDP-glucosyltransferase
  misc_feature (1)..(193): NCBI GI NO: 34900682 NR Description: glucuronosyl transferase-like protein
  misc_feature (1)..(193): NCBI GI NO: 34900678 NR Description: glucuronosyl transferase-like protein
  misc_feature (1)..(193): NCBI GI NO: 18033228 NR Description: UDP-glucosyltransferase BX8 [Zea mays]
  misc_feature (1)..(193): NCBI GI NO: 33146634 NR Description: putative UDP-glucosyltransferase
  misc_feature (1)..(193): NCBI GI NO: 18033230 NR Description: UDP-glucosyltransferase BX9 [Zea mays]
  misc_feature (1)..(193): NCBI GI NO: 15228174 NR Description: glucuronosyl transferase - like protein
  misc_feature (1)..(193): NCBI GI NO: 34395172 NR Description: putative UDP-glucosyltransferase
MFAAFPALCDKGYQPAQESQLEAPVTELPPYRVRDLPSTTSACHGVISEVISRLVTAVTTSSGLILNTMDALECGELASLRRDLGVPVFDIGPLHMLSPAASSSLLLQDRGCLEWLDAQAPASVLYVSFGSLASMSAAELVETAWGIANSGYPFLWVLRPGLVRGSQTSEAAPPLPDGFDAATRGRGMVVSWAAAGGGPGAPCRGRVLDALWLELDARELVRGRAGHCPPVLRRPDGEREVRGPRVADRPHARRRAREGRGGGGRRGVDGAWRARRRTASEGAGAQEQRGGVHGQGWVVLHECRQAGRPHSDTVGVWYRSSHVVLFLGTVFLCG

SEQ ID NO: 26856 - DNA, 1517 bp, Zea mays subsp. mays
  misc_feature (1)..(1517): Ceres Seq. ID no. 12414097
aacacacaaacccacaccaattgatgtgaaacccacacaatcccatcgtcacgacgccaagatcgtgtgcgagtgcgactgtgcgcacgtctccgtctcgcttgttttaagcacggcaagggaagaggacgacgacgggtggacgcttggacaaacagccttgtcgtgtactctctctttctctcctcccacagttccgctcgattcgaagagtccagcgccacacgacatcctccgcgcggccggccatgggggaagctgcggatccagcgacggggagggtgtcaccgccgatgtcgtggcgtacgcggctctccgtgctcgccgcggggtacctcaccgacgccacgcgccgcgccgacggcacagtcaaccgccgcctgctcggcatgctcgacaagggcgtggcggcgtccgcggtcccgcgcaacggcgtcgcctcgcgggacgtgaccatcgacccggccgtgcccctccgcgcgcgcctcttctacccctgcgctcccgccgccgccgaggacgacgacgcgggggcggagcgtccggcggtgcccgtcgtcgtgttcttccacggcggcggcttcgcgtacctctccgcggcatcccccgcctacgacgctgcgtgccgccgcatcgccaggtacgccggcgcggcggtgctgtccgtcgactaccgccgctcgcccgagcaccggttccccgccgcctacgacgacggcttcgcggccctccgcttcctcgacggcgggcccgaccccgaccccggcgcgatcgcgggcgccccgccgatcgacgccgcgcgctgcttcctcgcgggggacagcgctggcggtaacatcgcgcaccacgtcgcccgccgctacgcgctggacccttccgccttcgcgaacctccgcctcgccggcctcatcgccatccagcccttcttcggcggccaggagcgcacgcccgccgagctgcggctcgtcggcgcgcccatcgtctccgttccgcgcaccgactggatgtggcgcgcgttccttccccacggcgcggaccgcacccacgaggcgtcatcccccgacgtcgccaccgcgggcatcgacggcgcccctgatttcccgcctgccacggtcgtcatcggcgggtacgacccgctgcaggactggcagcgccggtactgcgacgcgttgcgcggtaaggggaaggaggtgcgggtgctcgagtaccccgacgccatccacgccttctacgtgttcccggagttcgcggagtccaaggacctcatgctacggatcaaggagatcgtcgccagcagcgagtgatgggggacggacggcgtgggcgcgcgcagctgtcgctcagatgcgtggtggatgtatctgcgactgtgctaagtggctagggtcagtgttgtggttgtggactggacggtgctgtctagtgtgtgacgtggttcgtcgtgtgggacgcgccacaattaaactagtgttaaataatgatgcgatcggcaatgataattctaattttcgtgtttg

SEQ ID NO: 26857 - protein, 351 aa, Zea mays subsp. mays
  peptide (1)..(351): Ceres Seq. ID no. 12414098
  misc_feature (94)..(146): Pfam Name: Pfam Description:  Carboxylesterase
  misc_feature (3)..(344): NCBI GI NO: 34904770 NR Description: similar to carboxylesterase
  misc_feature (14)..(350): NCBI GI NO: 34393714 NR Description: putative esterase
  misc_feature (14)..(350): NCBI GI NO: 34904774 NR Description: similar to carboxylesterase
  misc_feature (14)..(347): NCBI GI NO: 34904760 NR Description: similar to carboxylesterase
  misc_feature (5)..(347): NCBI GI NO: 34904758 NR Description: hypothetical protein~predicted by GeneMark
  misc_feature (19)..(347): NCBI GI NO: 15237783 NR Description: putative protein; protein id: At5g23530
  misc_feature (19)..(347): NCBI GI NO: 21618039 NR Description: unknown [Arabidopsis thaliana]
  misc_feature (11)..(333): NCBI GI NO: 34904772 NR Description: similar to carboxylesterase
  misc_feature (12)..(331): NCBI GI NO: 15240483 NR Description: putative protein; protein id: At5g27320
  misc_feature (12)..(347): NCBI GI NO: 15229905 NR Description: unknown protein; protein id: At3g05120.1
MGEAADPATGRVSPPMSWRTRLSVLAAGYLTDATRRADGTVNRRLLGMLDKGVAASAVPRNGVASRDVTIDPAVPLRARLFYPCAPAAAEDDDAGAERPAVPVVVFFHGGGFAYLSAASPAYDAACRRIARYAGAAVLSVDYRRSPEHRFPAAYDDGFAALRFLDGGPDPDPGAIAGAPPIDAARCFLAGDSAGGNIAHHVARRYALDPSAFANLRLAGLIAIQPFFGGQERTPAELRLVGAPIVSVPRTDWMWRAFLPHGADRTHEASSPDVATAGIDGAPDFPPATVVIGGYDPLQDWQRRYCDALRGKGKEVRVLEYPDAIHAFYVFPEFAESKDLMLRIKEIVASSE

SEQ ID NO: 26858 - protein, 336 aa, Zea mays subsp. mays
  peptide (1)..(336): Ceres Seq. ID no. 12414099
  misc_feature (79)..(131): Pfam Name: Pfam Description:  Carboxylesterase
  misc_feature (1)..(329): NCBI GI NO: 34904770 NR Description: similar to carboxylesterase
  misc_feature (1)..(335): NCBI GI NO: 34393714 NR Description: putative esterase
  misc_feature (1)..(335): NCBI GI NO: 34904774 NR Description: similar to carboxylesterase
  misc_feature (1)..(332): NCBI GI NO: 34904760 NR Description: similar to carboxylesterase
  misc_feature (1)..(332): NCBI GI NO: 34904758 NR Description: hypothetical protein~predicted by GeneMark
  misc_feature (4)..(332): NCBI GI NO: 15237783 NR Description: putative protein; protein id: At5g23530
  misc_feature (4)..(332): NCBI GI NO: 21618039 NR Description: unknown [Arabidopsis thaliana]
  misc_feature (1)..(318): NCBI GI NO: 34904772 NR Description: similar to carboxylesterase
  misc_feature (1)..(316): NCBI GI NO: 15240483 NR Description: putative protein; protein id: At5g27320
  misc_feature (1)..(332): NCBI GI NO: 15229905 NR Description: unknown protein; protein id: At3g05120.1
MSWRTRLSVLAAGYLTDATRRADGTVNRRLLGMLDKGVAASAVPRNGVASRDVTIDPAVPLRARLFYPCAPAAAEDDDAGAERPAVPVVVFFHGGGFAYLSAASPAYDAACRRIARYAGAAVLSVDYRRSPEHRFPAAYDDGFAALRFLDGGPDPDPGAIAGAPPIDAARCFLAGDSAGGNIAHHVARRYALDPSAFANLRLAGLIAIQPFFGGQERTPAELRLVGAPIVSVPRTDWMWRAFLPHGADRTHEASSPDVATAGIDGAPDFPPATVVIGGYDPLQDWQRRYCDALRGKGKEVRVLEYPDAIHAFYVFPEFAESKDLMLRIKEIVASSE

SEQ ID NO: 26859 - protein, 304 aa, Zea mays subsp. mays
  peptide (1)..(304): Ceres Seq. ID no. 12414100
  misc_feature (47)..(99): Pfam Name: Pfam Description:  Carboxylesterase
  misc_feature (1)..(297): NCBI GI NO: 34904770 NR Description: similar to carboxylesterase
  misc_feature (1)..(303): NCBI GI NO: 34393714 NR Description: putative esterase
  misc_feature (1)..(303): NCBI GI NO: 34904774 NR Description: similar to carboxylesterase
  misc_feature (1)..(300): NCBI GI NO: 34904760 NR Description: similar to carboxylesterase
  misc_feature (1)..(300): NCBI GI NO: 34904758 NR Description: hypothetical protein~predicted by GeneMark
  misc_feature (1)..(300): NCBI GI NO: 15237783 NR Description: putative protein; protein id: At5g23530
  misc_feature (1)..(300): NCBI GI NO: 21618039 NR Description: unknown [Arabidopsis thaliana]
  misc_feature (1)..(286): NCBI GI NO: 34904772 NR Description: similar to carboxylesterase
  misc_feature (1)..(284): NCBI GI NO: 15240483 NR Description: putative protein; protein id: At5g27320
  misc_feature (1)..(300): NCBI GI NO: 15229905 NR Description: unknown protein; protein id: At3g05120.1
MLDKGVAASAVPRNGVASRDVTIDPAVPLRARLFYPCAPAAAEDDDAGAERPAVPVVVFFHGGGFAYLSAASPAYDAACRRIARYAGAAVLSVDYRRSPEHRFPAAYDDGFAALRFLDGGPDPDPGAIAGAPPIDAARCFLAGDSAGGNIAHHVARRYALDPSAFANLRLAGLIAIQPFFGGQERTPAELRLVGAPIVSVPRTDWMWRAFLPHGADRTHEASSPDVATAGIDGAPDFPPATVVIGGYDPLQDWQRRYCDALRGKGKEVRVLEYPDAIHAFYVFPEFAESKDLMLRIKEIVASSE

SEQ ID NO: 26860 - DNA, 793 bp, Zea mays subsp. mays
  misc_feature (1)..(793): Ceres Seq. ID no. 12349701
aagatttgccttggcttgccgtgccctgcgggagccaagccaaggacggctagcgctcgccacgcgcgatgtccgggcttcctccggccgcgcgaccgctgctaccgtctccctgcgcctcttcctccgttgttcgggcgaaggcagcgtcggcatgctgctccagcctaaagcagtcgcgcccaggccgaagtgctgccgccccttccaccgtcgccgcgcgtcaggccgcgccgctcttggctgcggcgctcgtccttgtagcggcaccccctggcctgcctgctgctatctcaccagcatttgcacagcccagtttcagaaggcgcagcgctgttccggaaggcttgtattggttgccatgacatgggaggaaacattctacagccaggagccactcttttcctgaaggacctcgagagaaacggagttgccacggaggaggaactgtataacatcacatactatgggaaaggaagaatgcccggttttggagagaaatgcaccccaagaggacagtgcaccttcggcccccggctatcggaagacgacatcaagatcctagctttgtttgtcaagtcgcaagcccagaacgggtggccgaagattgagggggatggagattgatcaaactgaaaaaacgatgagaagacggtgcttgttagtcagatgaaaatggtgacgggaagatagtgtttgtatagtttaggaatctggtctttctgaacttgtaaccttttagtctctgtttctgaactgaacttgtaaccttctggtccgtgtttcagttttc

SEQ ID NO: 26861 - protein, 135 aa, Zea mays subsp. mays
  peptide (1)..(135): Ceres Seq. ID no. 12349702
RFALACRALREPSQGRLALATRDVRASSGRATAATVSLRLFLRCSGEGSVGMLLQPKAVAPRPKCCRPFHRRRASGRAALGCGARPCSGTPWPACCYLTSICTAQFQKAQRCSGRLVLVAMTWEETFYSQEPLFS

SEQ ID NO: 26862 - protein, 98 aa, Zea mays subsp. mays
  peptide (1)..(98): Ceres Seq. ID no. 12349703
MSGLPPAARPLLPSPCASSSVVRAKAASACCSSLKQSRPGRSAAAPSTVAARQAAPLLAAALVLVAAPPGLPAAISPAFAQPSFRRRSAVPEGLYWLP

SEQ ID NO: 26863 - protein, 86 aa, Zea mays subsp. mays
  peptide (1)..(86): Ceres Seq. ID no. 12349704
  misc_feature (1)..(86): NCBI GI NO: 34899810 NR Description: putative c6 type cytochrome
  misc_feature (1)..(84): NCBI GI NO: 10177496 NR Description: gene_id:K21C13.23~unknown protein
  misc_feature (1)..(84): NCBI GI NO: 18422509 NR Description: expressed protein; protein id: At5g45040
  misc_feature (14)..(86): NCBI GI NO: 34393286 NR Description: cytochrome C6, chloroplast precursor-like protein
  misc_feature (1)..(78): NCBI GI NO: 33866050 NR Description: cytochrome C6
  misc_feature (1)..(78): NCBI GI NO: 22652035 NR Description: putative cytochrome c6-2
  misc_feature (1)..(78): NCBI GI NO: 33862735 NR Description: Cytochrome c, class IC:Cytochrome c, class I
  misc_feature (1)..(78): NCBI GI NO: 117934 NR Description: Cytochrome C6 precursor
  misc_feature (1)..(78): NCBI GI NO: 16329946 NR Description: cytochrome c553 [Synechocystis sp. PCC 6803]
  misc_feature (1)..(78): NCBI GI NO: 117923 NR Description: Cytochrome C6
MGGNILQPGATLFLKDLERNGVATEEELYNITYYGKGRMPGFGEKCTPRGQCTFGPRLSEDDIKILALFVKSQAQNGWPKIEGDGD

SEQ ID NO: 26864 - protein, 84 aa, Zea mays subsp. mays
  peptide (1)..(84): Ceres Seq. ID no. 12349705
MLLQPKAVAPRPKCCRPFHRRRASGRAALGCGARPCSGTPWPACCYLTSICTAQFQKAQRCSGRLVLVAMTWEETFYSQEPLFS

SEQ ID NO: 26865 - DNA, 1435 bp, Zea mays subsp. mays
  misc_feature (1)..(1435): Ceres Seq. ID no. 12409675
atcatgcattcttcatggcgacggtgaccagtttgagcttctcaggcagctgcagacacgggccacgctatactgcccggccggcggccagttctcgtagtagtcagctacttaatgatcagctagctagagcatcgcggagattacaagtggcggcgggcatggcggtggcggcgttcccttcctgcggcgccttcgcccctccttgcctagtgagtacaaggagagccttctcctcggtggtggccatggcttccgcagccccggtgagagctcccagcaggaagcccttcgcccctcctcgcgaggtacaccgccccgtggcgcactcgctgcccccgcagaagcgggagatcttcgagtcgctcgagtcgtgggcggcggacaacatcctggtgctcctcaagcccgtggagaggtcctggcagccgcaggactacctgccggacgccgcctccgagtccttcgacgacgaggtccgggagctgcgagagcgcgcccgggagatccccgacgactacttcgtctgcttcgtgggcgacatggtcaccgaggaggcgctgccgacgtaccagaccatgctcaacaccctggacggcggcgtccgcgacgagaccggcgccagctcgaccagctgggcggtgtggaccagggcgtgggccgccgaggagaacaggcacggcgacctcatgaacaaatacctcttcctgacggggagggtggacatgaggcagatcgagaagaccgtccagtacctcatcgcctcagggatggatcccaagacggagacgaacccgtacatgggcttcgtctacacgtcgttccaggagcgcgccaccttcatctcccacggcaacacggcgcgccacgccaggcggtacggcgacaccaagctggcgcagatctgcggcacaatcgccgccgacgagaagcgccacgagtcggcgtacgagcggatcgtcgagaagctgttcgaggtggacccggactacacggtgcgcgccttcgcggacaccatgaggaagaaggtggccatgcccgcccacctcatgtacgacggccaggacgacgggctgttcgcgcgcttcagcgctgtcgcgcagcgcatcggtgtctacacggccagggactacgtcgacatcctcgagttcctggtccgccggtggggcgtccaggaactcacggggctgtccggggaaggccgccgcgcgcaggagttcgtgtgcgagctggggccccggttcaggaggctggaggagagggcgcacgacaacaaggccaaggatccggagttcgcgccattcagctggattcacgggcgccaggttcagctttgattaaagatgatgactgggggattcgccgactctctccgtcctcagatgatatgttgtactgtactagcatataactaagaattgattgaagttgctgt

SEQ ID NO: 26866 - protein, 444 aa, Zea mays subsp. mays
  peptide (1)..(444): Ceres Seq. ID no. 12409676
  misc_feature (54)..(444): NCBI GI NO: 3915029 NR Description: Acyl-
  misc_feature (46)..(444): NCBI GI NO: 1785862 NR Description: stearoyl-Acyl-carrier protein desaturase
  misc_feature (65)..(444): NCBI GI NO: 3915024 NR Description: Acyl-
  misc_feature (64)..(444): NCBI GI NO: 134945 NR Description: Acyl-
  misc_feature (64)..(444): NCBI GI NO: 951427 NR Description: stearoyl-acyl-carrier protein desaturase
  misc_feature (60)..(444): NCBI GI NO: 15224342 NR Description: stearoyl-ACP desaturase; protein id: At2g43710
  misc_feature (59)..(444): NCBI GI NO: 134943 NR Description: Acyl-
  misc_feature (60)..(444): NCBI GI NO: 15081682 NR Description: At2g43710/F18O19.18 [Arabidopsis thaliana]
  misc_feature (80)..(444): NCBI GI NO: 19386730 NR Description: putative stearoyl-acyl-carrier protein desaturase
  misc_feature (60)..(444): NCBI GI NO: 575942 NR Description: stearoyl-acyl carrier protein desaturase
HAFFMATVTSLSFSGSCRHGPRYTARPAASSRSSQLLNDQLARASRRLQVAAGMAVAAFPSCGAFAPPCLVSTRRAFSSVVAMASAAPVRAPSRKPFAPPREVHRPVAHSLPPQKREIFESLESWAADNILVLLKPVERSWQPQDYLPDAASESFDDEVRELRERAREIPDDYFVCFVGDMVTEEALPTYQTMLNTLDGGVRDETGASSTSWAVWTRAWAAEENRHGDLMNKYLFLTGRVDMRQIEKTVQYLIASGMDPKTETNPYMGFVYTSFQERATFISHGNTARHARRYGDTKLAQICGTIAADEKRHESAYERIVEKLFEVDPDYTVRAFADTMRKKVAMPAHLMYDGQDDGLFARFSAVAQRIGVYTARDYVDILEFLVRRWGVQELTGLSGEGRRAQEFVCELGPRFRRLEERAHDNKAKDPEFAPFSWIHGRQVQL

SEQ ID NO: 26867 - protein, 440 aa, Zea mays subsp. mays
  peptide (1)..(440): Ceres Seq. ID no. 12409677
  misc_feature (50)..(440): NCBI GI NO: 3915029 NR Description: Acyl-
  misc_feature (42)..(440): NCBI GI NO: 1785862 NR Description: stearoyl-Acyl-carrier protein desaturase
  misc_feature (61)..(440): NCBI GI NO: 3915024 NR Description: Acyl-
  misc_feature (60)..(440): NCBI GI NO: 134945 NR Description: Acyl-
  misc_feature (60)..(440): NCBI GI NO: 951427 NR Description: stearoyl-acyl-carrier protein desaturase
  misc_feature (56)..(440): NCBI GI NO: 15224342 NR Description: stearoyl-ACP desaturase; protein id: At2g43710
  misc_feature (55)..(440): NCBI GI NO: 134943 NR Description: Acyl-
  misc_feature (56)..(440): NCBI GI NO: 15081682 NR Description: At2g43710/F18O19.18 [Arabidopsis thaliana]
  misc_feature (76)..(440): NCBI GI NO: 19386730 NR Description: putative stearoyl-acyl-carrier protein desaturase
  misc_feature (56)..(440): NCBI GI NO: 575942 NR Description: stearoyl-acyl carrier protein desaturase
MATVTSLSFSGSCRHGPRYTARPAASSRSSQLLNDQLARASRRLQVAAGMAVAAFPSCGAFAPPCLVSTRRAFSSVVAMASAAPVRAPSRKPFAPPREVHRPVAHSLPPQKREIFESLESWAADNILVLLKPVERSWQPQDYLPDAASESFDDEVRELRERAREIPDDYFVCFVGDMVTEEALPTYQTMLNTLDGGVRDETGASSTSWAVWTRAWAAEENRHGDLMNKYLFLTGRVDMRQIEKTVQYLIASGMDPKTETNPYMGFVYTSFQERATFISHGNTARHARRYGDTKLAQICGTIAADEKRHESAYERIVEKLFEVDPDYTVRAFADTMRKKVAMPAHLMYDGQDDGLFARFSAVAQRIGVYTARDYVDILEFLVRRWGVQELTGLSGEGRRAQEFVCELGPRFRRLEERAHDNKAKDPEFAPFSWIHGRQVQL

SEQ ID NO: 26868 - protein, 391 aa, Zea mays subsp. mays
  peptide (1)..(391): Ceres Seq. ID no. 12409678
  misc_feature (1)..(391): NCBI GI NO: 3915029 NR Description: Acyl-
  misc_feature (1)..(391): NCBI GI NO: 1785862 NR Description: stearoyl-Acyl-carrier protein desaturase
  misc_feature (12)..(391): NCBI GI NO: 3915024 NR Description: Acyl-
  misc_feature (11)..(391): NCBI GI NO: 134945 NR Description: Acyl-
  misc_feature (11)..(391): NCBI GI NO: 951427 NR Description: stearoyl-acyl-carrier protein desaturase
  misc_feature (7)..(391): NCBI GI NO: 15224342 NR Description: stearoyl-ACP desaturase; protein id: At2g43710
  misc_feature (6)..(391): NCBI GI NO: 134943 NR Description: Acyl-
  misc_feature (7)..(391): NCBI GI NO: 15081682 NR Description: At2g43710/F18O19.18 [Arabidopsis thaliana]
  misc_feature (27)..(391): NCBI GI NO: 19386730 NR Description: putative stearoyl-acyl-carrier protein desaturase
  misc_feature (7)..(391): NCBI GI NO: 575942 NR Description: stearoyl-acyl carrier protein desaturase
MAVAAFPSCGAFAPPCLVSTRRAFSSVVAMASAAPVRAPSRKPFAPPREVHRPVAHSLPPQKREIFESLESWAADNILVLLKPVERSWQPQDYLPDAASESFDDEVRELRERAREIPDDYFVCFVGDMVTEEALPTYQTMLNTLDGGVRDETGASSTSWAVWTRAWAAEENRHGDLMNKYLFLTGRVDMRQIEKTVQYLIASGMDPKTETNPYMGFVYTSFQERATFISHGNTARHARRYGDTKLAQICGTIAADEKRHESAYERIVEKLFEVDPDYTVRAFADTMRKKVAMPAHLMYDGQDDGLFARFSAVAQRIGVYTARDYVDILEFLVRRWGVQELTGLSGEGRRAQEFVCELGPRFRRLEERAHDNKAKDPEFAPFSWIHGRQVQL

SEQ ID NO: 26869 - DNA, 1240 bp, Zea mays subsp. mays
  misc_feature (1)..(1240): Ceres Seq. ID no. 12352706
actacaggtctacagctcccgcccagcatcatggccttccattccccaatctagggttgctgagctccccaccaccgccggtcatgcccgacgcggatgttgacaccgtgattcgcgaagccgccgcggccgcggccccagcccgacgacgacagcgagggtgacaccgaggaagaggaggaggagggggacgaggtcgacgaggacgaggacgacgacgaggaggagttacccgccgaggcgccggcgccggacgaggagcaacctgccccagcgcccatctcgaccttgccggggaatccaaaccagctgacgctggtcttccagggcgaggtttacgttttcgaatccgtcacccccgagaaggttcaagctgtgctgctacttttaggacgtggtgaactaccacctggtttagctggcatggttttacccaatcaaaatgacaacaagggctatgacgatatacttcagaggacagacattccagcaaaaagggttgcttcactaattaggttccgtgagaaaaggaaggaaagaaattttgataagaaaatacgttatgctgttcgcaaagaagtggcactcaggatgcagcgtcggaaggggcaatttgctggaagagccagtctggagggagaatctccagctcctggatgtgatcctggttctcagggctcaggcctagattttgcatctcgagaatcaatgtgccagaactgtggtactagtgaaaaaatgaccccagcaatgcgtcgtggtccagcgggtccaaggactttgtgcaatgcttgtggattgatgtgggcaaacaagggtaccctgagaagttgccccagggcaaaagttgaatctcctgcggttgcaactgagcagggaacaagtgacaacaaagccctggcaacactgaataataacaatgttgctgcaagcaatggcgaagccacaagtgcagcagagaaaggagtgccaaaggcgccgtgacagtatatagacattattgtcagagacaaagatttcggattctttgcctatagctagacaagacaccccgttagaaatatttgataatgattgtcatcaagtgtacattcattcttgcttgacagtgttagacgtgtaattaatataagctgtccgattgtgtaaacagtaaacccatatggcatctgttgtgttacaacttacactttctaactttcttcattctcataacatcatgatcaaagattcgatgctt

SEQ ID NO: 26870 - protein, 186 aa, Zea mays subsp. mays
  peptide (1)..(186): Ceres Seq. ID no. 12352707
  misc_feature (30)..(69): Pfam Name: Pfam Description:  CCT motif
  misc_feature (1)..(185): NCBI GI NO: 13174240 NR Description: putative zinc finger protein [Oryza sativa]
  misc_feature (1)..(157): NCBI GI NO: 30686115 NR Description: GATA zinc finger protein [Arabidopsis thaliana]
  misc_feature (1)..(177): NCBI GI NO: 21537322 NR Description: flowering protein CONSTANS, putative
  misc_feature (1)..(157): NCBI GI NO: 18402914 NR Description: GATA zinc finger protein; protein id: At3g21175
  misc_feature (1)..(157): NCBI GI NO: 18403600 NR Description: flowering protein CONSTANS, putative
  misc_feature (1)..(157): NCBI GI NO: 15028099 NR Description: putative flowering protein CONSTANS
  misc_feature (1)..(176): NCBI GI NO: 11358938 NR Description: zinc-finger protein - Arabidopsis thaliana
  misc_feature (1)..(176): NCBI GI NO: 15233844 NR Description: Zinc finger protein, Zim; protein id: At4g24470
  misc_feature (1)..(99): NCBI GI NO: 25405485 NR Description: hypothetical protein F19C24.17
  misc_feature (57)..(157): NCBI GI NO: 26451385 NR Description: unknown protein [Arabidopsis thaliana]
MVLPNQNDNKGYDDILQRTDIPAKRVASLIRFREKRKERNFDKKIRYAVRKEVALRMQRRKGQFAGRASLEGESPAPGCDPGSQGSGLDFASRESMCQNCGTSEKMTPAMRRGPAGPRTLCNACGLMWANKGTLRSCPRAKVESPAVATEQGTSDNKALATLNNNNVAASNGEATSAAEKGVPKAP

SEQ ID NO: 26871 - protein, 130 aa, Zea mays subsp. mays
  peptide (1)..(130): Ceres Seq. ID no. 12352708
  misc_feature (1)..(129): NCBI GI NO: 13174240 NR Description: putative zinc finger protein [Oryza sativa]
  misc_feature (1)..(101): NCBI GI NO: 30686115 NR Description: GATA zinc finger protein [Arabidopsis thaliana]
  misc_feature (1)..(121): NCBI GI NO: 21537322 NR Description: flowering protein CONSTANS, putative
  misc_feature (1)..(101): NCBI GI NO: 18402914 NR Description: GATA zinc finger protein; protein id: At3g21175
  misc_feature (1)..(101): NCBI GI NO: 18403600 NR Description: flowering protein CONSTANS, putative
  misc_feature (1)..(101): NCBI GI NO: 15028099 NR Description: putative flowering protein CONSTANS
  misc_feature (1)..(120): NCBI GI NO: 11358938 NR Description: zinc-finger protein - Arabidopsis thaliana
  misc_feature (1)..(120): NCBI GI NO: 15233844 NR Description: Zinc finger protein, Zim; protein id: At4g24470
  misc_feature (1)..(43): NCBI GI NO: 25405485 NR Description: hypothetical protein F19C24.17
  misc_feature (1)..(101): NCBI GI NO: 26451385 NR Description: unknown protein [Arabidopsis thaliana]
MQRRKGQFAGRASLEGESPAPGCDPGSQGSGLDFASRESMCQNCGTSEKMTPAMRRGPAGPRTLCNACGLMWANKGTLRSCPRAKVESPAVATEQGTSDNKALATLNNNNVAASNGEATSAAEKGVPKAP

SEQ ID NO: 26872 - DNA, 1064 bp, Zea mays subsp. mays
  misc_feature (1)..(1064): Ceres Seq. ID no. 12355457
aacaaccccggcctgccatgtgccacaaccgtagcctgtagcttcatccgttgcgctgcgcccggttccctcgcgcggtgcggaatttaacatggccgtgccggaggtggtggtcgacggcgtcgtcttcccgccggtggcccgcccgccgggctccgccggctcgcacttcctcggcggcgcaggcgtgcgaggcgtcgagatcggaggcaacttcatcaagttcacggccatcggcgtgtacctggaggacgcggccgtgcccgcgctggccaagaagtggggcggcaagacggccgacgagctcgcctccgacgccgccttcttccgcgacgtcgtcacgggcgacttcgagaagttcacgagggtgacgatgatcctcccgctgacgggcgagcagtacgcggagaaagtgacggagaactgcgtggcgttctggaaggccgccggcctgtacacggacgccgagggcgtcgccgtggagaagttcagggaggtgttcaagccagagactttcgcgccgggcgcctccatcctcttcacgcactcgcccgccggagtcctcaccgtcgccttctccaaggactcgtcggtgccagcggccggcggcgtggcgatcgagaacaagcgcctctgcgaggccgtgctggagtccatcatcggggagcgcggcgtgtcgccggccgcgaagctgagcctcgccgcgagggtgtcggagctcctcgccaaggagaccgccgcggccgccgacgcgccgcaggcggagcccgtctccatcaccgcctgaggcgaggagcgggcgggcgggcgagcgaacgaaccgcgaggagaaaaaaagcaaccagacggttgggcggcacggcgtctcacacctgccgcctgcgcttgcgtgctccggagtccggactggagagacgccgcgcgggtgcagtgcatccgtcgcgtcttgtctgtccgcgctatggcgtcgtgttcctgcctttctggtcgcgtagttgtcttgtgttcgctgttggtcgttctgggtaacatttgaataaaacaagcggatttgttgcacttgc

SEQ ID NO: 26873 - protein, 231 aa, Zea mays subsp. mays; identical to SEQ ID NO: 26133
  peptide (1)..(231): Ceres Seq. ID no. 12355458
  misc_feature (11)..(212): Pfam Name: Pfam Description:  Chalcone-flavanone isomerase
  misc_feature (11)..(231): NCBI GI NO: 729103 NR Description: CHALCONE--FLAVONONE ISOMERASE (CHALCONE ISOMERASE)
  misc_feature (1)..(230): NCBI GI NO: 20152986 NR Description: chalcone isomerase
  misc_feature (2)..(231): NCBI GI NO: 29124145 NR Description: chalcone isomerase
  misc_feature (2)..(231): NCBI GI NO: 20152984 NR Description: chalcone isomerase
  misc_feature (2)..(228): NCBI GI NO: 1705761 NR Description: CHALCONE--FLAVONONE ISOMERASE (CHALCONE ISOMERASE)
  misc_feature (1)..(228): NCBI GI NO: 5921722 NR Description: Chalcone--flavonone isomerase (Chalcone isomerase)
  misc_feature (1)..(231): NCBI GI NO: 68481 NR Description: chalcone isomerase (EC 5
  misc_feature (1)..(231): NCBI GI NO: 116136 NR Description: CHALCONE--FLAVONONE ISOMERASE A
  misc_feature (1)..(231): NCBI GI NO: 228617 NR Description: chalcone flavanone isomerase
  misc_feature (2)..(211): NCBI GI NO: 4126399 NR Description: chalcone isomerase [Citrus sinensis]

SEQ ID NO: 26874 - protein, 137 aa, Zea mays subsp. mays; identical to SEQ ID NO: 26134
  peptide (1)..(137): Ceres Seq. ID no. 12355459
  misc_feature (1)..(118): Pfam Name: Pfam Description:  Chalcone-flavanone isomerase
  misc_feature (1)..(137): NCBI GI NO: 729103 NR Description: CHALCONE--FLAVONONE ISOMERASE (CHALCONE ISOMERASE)
  misc_feature (1)..(136): NCBI GI NO: 20152986 NR Description: chalcone isomerase
  misc_feature (1)..(137): NCBI GI NO: 29124145 NR Description: chalcone isomerase
  misc_feature (1)..(137): NCBI GI NO: 20152984 NR Description: chalcone isomerase
  misc_feature (1)..(134): NCBI GI NO: 1705761 NR Description: CHALCONE--FLAVONONE ISOMERASE (CHALCONE ISOMERASE)
  misc_feature (1)..(134): NCBI GI NO: 5921722 NR Description: Chalcone--flavonone isomerase (Chalcone isomerase)
  misc_feature (1)..(137): NCBI GI NO: 68481 NR Description: chalcone isomerase (EC 5
  misc_feature (1)..(137): NCBI GI NO: 116136 NR Description: CHALCONE--FLAVONONE ISOMERASE A
  misc_feature (1)..(137): NCBI GI NO: 228617 NR Description: chalcone flavanone isomerase
  misc_feature (1)..(117): NCBI GI NO: 4126399 NR Description: chalcone isomerase [Citrus sinensis]

SEQ ID NO: 26875 - DNA, 1343 bp, Zea mays subsp. mays
  misc_feature (1)..(1343): Ceres Seq. ID no. 12376422
aggccagcacaaaaccactcgatagaaaagcccccctcaaaacccacggcgccgccgcagccgcgttcacgaagcttggggaggcgagcaccccgatccggcgaggtgccgcgagcgaggcagcgatgagaggccgtgcgtcccatctccgcgcgctcctctcgcgagcgctctctccaagccttcctcctcctggtcgcgctctgcctcaggtcactaggcccggtgcgtctccgttcggagctggattcgtggggcgcgcgcgcttcttctccatcgacgcctcggctgcgacgcagggcgggtcgaagccccctgcgccgccgccggcgggtactgcgggcggcgagggagggggtggtggtcagtctgggaaatctgaacaagcggacgccgggaaagccgtccgcggagggccggtgtcttggctcagttttctactcctgcttgtgactggaggagggataatcgtgtactacgacaaagaaaagaagcgtcacattgaagaattgaagaatagaacaagtgctgtgaagcctggacaatcagtaggcactgcagccattggcggtccattcaagcttttgaatcatgatggaaaacctgttactgaaaaggatttcttgggcaaatggacgctgctttattttggatttacacactgtcctgacatttgtccagatgaactccagaaaatggctgcagcgattgacaaaattaaggaaaaggcaaaactggatgttgtgccagtttttattacagttgatcctgaaagagatactgttgagcaggttcgggactatgttaaagagttccatccagatctagtaggcctcacgggcacgacagatgaagtaagacaagttgcacgtgcttatcgagtttactatatgaagacagaggaggagggttctgactaccttgttgatcactcaattgtcatgtacctgatggacccagagatgaagtttgtcaagttttatggcaagaactacgacacagattcccttgctgacggtatcgttaaagaaattaaagagcacaagtaaacagtagttggaatgccactttgcaacgtcagccttgtttctgaatttctcccgagagttttgttaaatcaagcaaaaaccaaatggcacacgagatcatgtggcaatagctgatgacatttgaatctcgcggcggcttttatttcagcagattcgggtgcacatgttgcggttttgtgcacgtttttgtcacggcaaacttctgcgttattagcttgggacgctgttcattgctgaatgtaattttatttgcatagtttcataccagttcaatatgaaacctttttccccttc

SEQ ID NO: 26876 - protein, 348 aa, Zea mays subsp. mays
  peptide (1)..(348): Ceres Seq. ID no. 12376423
  misc_feature (145)..(332): Pfam Name: Pfam Description:  SCO1/SenC
  misc_feature (112)..(348): NCBI GI NO: 6403490 NR Description: putative SCO1 protein [Arabidopsis thaliana]
  misc_feature (112)..(348): NCBI GI NO: 18398306 NR Description: putative SCO1 protein; protein id: At3g08950
  misc_feature (130)..(348): NCBI GI NO: 4759068 NR Description: cytochrome oxidase deficient homolog 1
  misc_feature (138)..(347): NCBI GI NO: 40740887 NR Description: hypothetical protein AN4842.2
  misc_feature (129)..(344): NCBI GI NO: 19920710 NR Description: CG8885-PA [Drosophila melanogaster]
  misc_feature (165)..(348): NCBI GI NO: 4406651 NR Description: h-sco1 [Homo sapiens]
  misc_feature (138)..(340): NCBI GI NO: 19112079 NR Description: putative cytochrome C oxidase assembly protein
  misc_feature (130)..(347): NCBI GI NO: 6319511 NR Description: inner mitochondrial membrane protein; Sco1p
  misc_feature (142)..(347): NCBI GI NO: 6319498 NR Description: Originally identified as a multicopy suppressor of a respiratory defective mutant
  misc_feature (103)..(340): NCBI GI NO: 4826992 NR Description: cytochrome oxidase deficient homolog 2
ASTKPLDRKAPLKTHGAAAAAFTKLGEASTPIRRGAASEAAMRGRASHLRALLSRALSPSLPPPGRALPQVTRPGASPFGAGFVGRARFFSIDASAATQGGSKPPAPPPAGTAGGEGGGGGQSGKSEQADAGKAVRGGPVSWLSFLLLLVTGGGIIVYYDKEKKRHIEELKNRTSAVKPGQSVGTAAIGGPFKLLNHDGKPVTEKDFLGKWTLLYFGFTHCPDICPDELQKMAAAIDKIKEKAKLDVVPVFITVDPERDTVEQVRDYVKEFHPDLVGLTGTTDEVRQVARAYRVYYMKTEEEGSDYLVDHSIVMYLMDPEMKFVKFYGKNYDTDSLADGIVKEIKEHK

SEQ ID NO: 26877 - protein, 307 aa, Zea mays subsp. mays
  peptide (1)..(307): Ceres Seq. ID no. 12376424
  misc_feature (104)..(291): Pfam Name: Pfam Description:  SCO1/SenC
  misc_feature (71)..(307): NCBI GI NO: 6403490 NR Description: putative SCO1 protein [Arabidopsis thaliana]
  misc_feature (71)..(307): NCBI GI NO: 18398306 NR Description: putative SCO1 protein; protein id: At3g08950
  misc_feature (89)..(307): NCBI GI NO: 4759068 NR Description: cytochrome oxidase deficient homolog 1
  misc_feature (97)..(306): NCBI GI NO: 40740887 NR Description: hypothetical protein AN4842.2
  misc_feature (88)..(303): NCBI GI NO: 19920710 NR Description: CG8885-PA [Drosophila melanogaster]
  misc_feature (124)..(307): NCBI GI NO: 4406651 NR Description: h-sco1 [Homo sapiens]
  misc_feature (97)..(299): NCBI GI NO: 19112079 NR Description: putative cytochrome C oxidase assembly protein
  misc_feature (89)..(306): NCBI GI NO: 6319511 NR Description: inner mitochondrial membrane protein; Sco1p
  misc_feature (101)..(306): NCBI GI NO: 6319498 NR Description: Originally identified as a multicopy suppressor of a respiratory defective mutant
  misc_feature (62)..(299): NCBI GI NO: 4826992 NR Description: cytochrome oxidase deficient homolog 2
MRGRASHLRALLSRALSPSLPPPGRALPQVTRPGASPFGAGFVGRARFFSIDASAATQGGSKPPAPPPAGTAGGEGGGGGQSGKSEQADAGKAVRGGPVSWLSFLLLLVTGGGIIVYYDKEKKRHIEELKNRTSAVKPGQSVGTAAIGGPFKLLNHDGKPVTEKDFLGKWTLLYFGFTHCPDICPDELQKMAAAIDKIKEKAKLDVVPVFITVDPERDTVEQVRDYVKEFHPDLVGLTGTTDEVRQVARAYRVYYMKTEEEGSDYLVDHSIVMYLMDPEMKFVKFYGKNYDTDSLADGIVKEIKEHK

SEQ ID NO: 26878 - DNA, 1042 bp, Zea mays subsp. mays
  misc_feature (1)..(1042): Ceres Seq. ID no. 12435100
  misc_feature (158)..(158): n is a, c, t, g, unknown, or other
aagaaaaagccccaaatacacagcctaggcccaccaattcggacacgctcacacgccagagaagagagaggaaaggaacccaacacactctctcgcgcggcaagagcttcccggcccgaaaccgaaagcaccaccaatctctgcgtttttcgtctgcngcggcggcggcggcagcagcggaggaggtggacgagatgctgtccgccgacatccccccaaaccagaccatctacctcaacaacctcaacgagaaggtcaagaaagaagagttgaagagatcgctttatgccctgtgctcgcagtatggaaggatactggatgtggtggctctgaaaacacagaaactgagagggcaggcatgggtggtgtttagcgagattacagctgctaccaatgctttccgtggattgcaagactttgatttctacggcaaaaaaatgcgagtacaatatgcaaaaacaaaatcagactgtattgcaaaagaagatggtacttatgcacctaaggagaaaaggaagaagcaagaggagaaagctgctgagaaaaaacgacgagcagaagaggcacagcaagctggccccaatgctgctgctgctcaaagcaatggaactggctatcaagcgtctcgtctgggcaaggcttcgcaggagccacctgctcctccgaacaacatcctcttcatccagaacttgccagaccagaccacgagcatgatgctccagatcctgttccagcagtatcccggcttccgggaagtccggatgatcgaagccaaaccaggcattgcctttgtggagttcgaggacgacggccagtccatggtggcgatgcaggctctccagggcttcaagatcaccccggagaaccccatggctatatcctatgccaaaaaatgagaaccctcgcggaatccctgtacccaatacccataatattttccgttccgccttccggaatcgagccacagtatctagtctactttccggccatgtatttttggaaagcacttgcttaatttagaagttagactcttgccactttc

SEQ ID NO: 26879 - protein, 297 aa, Zea mays subsp. mays
  peptide (1)..(297): Ceres Seq. ID no. 12435101
  misc_feature (225)..(292): Pfam Name: a.k.a. RRM, RBD, or RNP domain Pfam Description: RNA recognition motif.
  misc_feature (65)..(297): NCBI GI NO: 421960 NR Description: small nuclear ribonucleoprotein U2B'' - potato
  misc_feature (65)..(297): NCBI GI NO: 15227729 NR Description: small nuclear ribonucleoprotein U2B, putative
  misc_feature (65)..(297): NCBI GI NO: 30679892 NR Description: small nuclear ribonucleoprotein U2B
  misc_feature (65)..(297): NCBI GI NO: 30679897 NR Description: small nuclear ribonucleoprotein U2B
  misc_feature (65)..(297): NCBI GI NO: 21593001 NR Description: putative small nuclear ribonucleoprotein U2B
  misc_feature (65)..(297): NCBI GI NO: 25294325 NR Description: hypothetical protein
  misc_feature (65)..(297): NCBI GI NO: 19347861 NR Description: putative spliceosomal protein (U2B)
  misc_feature (69)..(297): NCBI GI NO: 2119045 NR Description: small nuclear ribonucleoprotein U1A - potato
  misc_feature (51)..(297): NCBI GI NO: 34897622 NR Description: putative small nuclear ribonucleoprotein U1A
  misc_feature (60)..(297): NCBI GI NO: 15226631 NR Description: small nuclear ribonucleoprotein U1A
  misc_feature (52)..(52): Xaa is any aa, unknown or other
EKAPNTQPRPTNSDTLTRQRRERKGTQHTLSRGKSFPARNRKHHQSLRFSSXAAAAAAAEEVDEMLSADIPPNQTIYLNNLNEKVKKEELKRSLYALCSQYGRILDVVALKTQKLRGQAWVVFSEITAATNAFRGLQDFDFYGKKMRVQYAKTKSDCIAKEDGTYAPKEKRKKQEEKAAEKKRRAEEAQQAGPNAAAAQSNGTGYQASRLGKASQEPPAPPNNILFIQNLPDQTTSMMLQILFQQYPGFREVRMIEAKPGIAFVEFEDDGQSMVAMQALQGFKITPENPMAISYAKK

SEQ ID NO: 26880 - protein, 233 aa, Zea mays subsp. mays
  peptide (1)..(233): Ceres Seq. ID no. 12435102
  misc_feature (161)..(228): Pfam Name: a.k.a. RRM, RBD, or RNP domain Pfam Description: RNA recognition motif.
  misc_feature (1)..(233): NCBI GI NO: 421960 NR Description: small nuclear ribonucleoprotein U2B'' - potato
  misc_feature (1)..(233): NCBI GI NO: 15227729 NR Description: small nuclear ribonucleoprotein U2B, putative
  misc_feature (1)..(233): NCBI GI NO: 30679892 NR Description: small nuclear ribonucleoprotein U2B
  misc_feature (1)..(233): NCBI GI NO: 30679897 NR Description: small nuclear ribonucleoprotein U2B
  misc_feature (1)..(233): NCBI GI NO: 21593001 NR Description: putative small nuclear ribonucleoprotein U2B
  misc_feature (1)..(233): NCBI GI NO: 25294325 NR Description: hypothetical protein
  misc_feature (1)..(233): NCBI GI NO: 19347861 NR Description: putative spliceosomal protein (U2B)
  misc_feature (5)..(233): NCBI GI NO: 2119045 NR Description: small nuclear ribonucleoprotein U1A - potato
  misc_feature (1)..(233): NCBI GI NO: 34897622 NR Description: putative small nuclear ribonucleoprotein U1A
  misc_feature (1)..(233): NCBI GI NO: 15226631 NR Description: small nuclear ribonucleoprotein U1A
MLSADIPPNQTIYLNNLNEKVKKEELKRSLYALCSQYGRILDVVALKTQKLRGQAWVVFSEITAATNAFRGLQDFDFYGKKMRVQYAKTKSDCIAKEDGTYAPKEKRKKQEEKAAEKKRRAEEAQQAGPNAAAAQSNGTGYQASRLGKASQEPPAPPNNILFIQNLPDQTTSMMLQILFQQYPGFREVRMIEAKPGIAFVEFEDDGQSMVAMQALQGFKITPENPMAISYAKK

SEQ ID NO: 26881 - protein, 152 aa, Zea mays subsp. mays
  peptide (1)..(152): Ceres Seq. ID no. 12435103
  misc_feature (80)..(147): Pfam Name: a.k.a. RRM, RBD, or RNP domain Pfam Description: RNA recognition motif.
  misc_feature (1)..(152): NCBI GI NO: 421960 NR Description: small nuclear ribonucleoprotein U2B'' - potato
  misc_feature (1)..(152): NCBI GI NO: 15227729 NR Description: small nuclear ribonucleoprotein U2B, putative
  misc_feature (1)..(152): NCBI GI NO: 30679892 NR Description: small nuclear ribonucleoprotein U2B
  misc_feature (1)..(152): NCBI GI NO: 30679897 NR Description: small nuclear ribonucleoprotein U2B
  misc_feature (1)..(152): NCBI GI NO: 21593001 NR Description: putative small nuclear ribonucleoprotein U2B
  misc_feature (1)..(152): NCBI GI NO: 25294325 NR Description: hypothetical protein
  misc_feature (1)..(152): NCBI GI NO: 19347861 NR Description: putative spliceosomal protein (U2B)
  misc_feature (1)..(152): NCBI GI NO: 2119045 NR Description: small nuclear ribonucleoprotein U1A - potato
  misc_feature (1)..(152): NCBI GI NO: 34897622 NR Description: putative small nuclear ribonucleoprotein U1A
  misc_feature (1)..(152): NCBI GI NO: 15226631 NR Description: small nuclear ribonucleoprotein U1A
MRVQYAKTKSDCIAKEDGTYAPKEKRKKQEEKAAEKKRRAEEAQQAGPNAAAAQSNGTGYQASRLGKASQEPPAPPNNILFIQNLPDQTTSMMLQILFQQYPGFREVRMIEAKPGIAFVEFEDDGQSMVAMQALQGFKITPENPMAISYAKK

SEQ ID NO: 26882 - DNA, 1346 bp, Zea mays subsp. mays
  misc_feature (1)..(1346): Ceres Seq. ID no. 12373672
aaacatagaggcattccgcagtccgcagtccatccgcagtccgcagtccgcacgcacggacgcgccctcccagatctcccgcctccggcaaacaaaatgcccccactctcaccgcccgcatcgctgacccccgctgctggcggtcggcgacggtggaagtgccgcctcagtcccactatcgcacgtgaccgctgctacactcgctccttccgctccgcggggctccgcccggcggccattccgctccccgatggcgccgtctgtacacctgtggctcccgcctcctgccgccgaccccgccaagcccctataccctgttctgcttctccacggcttcggcgcacaagccacctggcagtgggcgcccttcctcggcccgctcctcgctgccggtctggccccctatgtcccggacctcgtcttctttggcgcctcatcctcccccgcagcagaccgctccccggtctatcaggctgcctgtgttgccgccgctatggccgcgcttcctggcgccccgcagcggtacgccgtcgtcggggtcagttacggcggcttcgtagcataccacctcgcccacgcgtttccggcagcggtggagcggcttgtactagtcgcggccggtgtttgcctcgaggaggccgatctggccgcggggctctttgccgttgaggatatcgccgaggctgcaagtcttttgctgccccagcggccggaggatctccggaggttggtggggctcaccttctgccgccctcagcggttcatgccgtcctgtttcatcagagattacatcagggttatgtgcacggaaaatgtaaaagagaagagggagttgctgtatgcattgatcaatggcaggaagctttcagaccttcctaaaattaaccagcaaaccttgataatttggggagagcaggaccgggtctttccattggaacttggattacggctgaaaaggcatctgggtgatacttccgaactaatcattgtcaagaatgccggtcatgccataaatcgcgaaaagccagcagaactttgcagactgataaagcactacatcgttgatccctcagtcaaatgtcgagatgaccgtaagggatcttggaagaatgcgataaagaggtttgttgggtcgagcctgaggaaggtggactcttctcgaccgctgctatagcaattgacgtatatatattgacttttacgtgcagcagatttgttatctgattgtgacacgcaattaagtaattaacgatgtgtaatgtccagtagccactattattgtgtaactagcattggcagacatctgttcaaaaaatacttgtgcaatatgtataatgcaaatgatt

SEQ ID NO: 26883 - protein, 307 aa, Zea mays subsp. mays
  peptide (1)..(307): Ceres Seq. ID no. 12373673
  misc_feature (90)..(268): Pfam Name: Pfam Description:  alpha/beta hydrolase fold
  misc_feature (1)..(299): NCBI GI NO: 37533664 NR Description: putative hydrolase
  misc_feature (4)..(282): NCBI GI NO: 33146617 NR Description: hydrolase-like protein
  misc_feature (6)..(270): NCBI GI NO: 18420566 NR Description: Expressed protein; protein id: At4g39955
  misc_feature (6)..(270): NCBI GI NO: 21536873 NR Description: putative hydrolase [Arabidopsis thaliana]
  misc_feature (4)..(272): NCBI GI NO: 15242419 NR Description: putative hydrolase; protein id: At5g09430.1
  misc_feature (5)..(274): NCBI GI NO: 18411865 NR Description: hypothetical protein; protein id: At1g78210
  misc_feature (2)..(182): NCBI GI NO: 27436747 NR Description: Hypothetical protein
  misc_feature (183)..(272): NCBI GI NO: 27436747 NR Description: Hypothetical protein
  misc_feature (4)..(274): NCBI GI NO: 22326938 NR Description: similar to putative hydrolase
  misc_feature (4)..(270): NCBI GI NO: 30689631 NR Description: hydrolase, alpha/beta fold family
MAPSVHLWLPPPAADPAKPLYPVLLLHGFGAQATWQWAPFLGPLLAAGLAPYVPDLVFFGASSSPAADRSPVYQAACVAAAMAALPGAPQRYAVVGVSYGGFVAYHLAHAFPAAVERLVLVAAGVCLEEADLAAGLFAVEDIAEAASLLLPQRPEDLRRLVGLTFCRPQRFMPSCFIRDYIRVMCTENVKEKRELLYALINGRKLSDLPKINQQTLIIWGEQDRVFPLELGLRLKRHLGDTSELIIVKNAGHAINREKPAELCRLIKHYIVDPSVKCRDDRKGSWKNAIKRFVGSSLRKVDSSRPLL

SEQ ID NO: 26884 - protein, 226 aa, Zea mays subsp. mays
  peptide (1)..(226): Ceres Seq. ID no. 12373674
  misc_feature (9)..(187): Pfam Name: Pfam Description:  alpha/beta hydrolase fold
  misc_feature (1)..(218): NCBI GI NO: 37533664 NR Description: putative hydrolase
  misc_feature (1)..(201): NCBI GI NO: 33146617 NR Description: hydrolase-like protein
  misc_feature (1)..(189): NCBI GI NO: 18420566 NR Description: Expressed protein; protein id: At4g39955
  misc_feature (1)..(189): NCBI GI NO: 21536873 NR Description: putative hydrolase [Arabidopsis thaliana]
  misc_feature (1)..(191): NCBI GI NO: 15242419 NR Description: putative hydrolase; protein id: At5g09430.1
  misc_feature (1)..(193): NCBI GI NO: 18411865 NR Description: hypothetical protein; protein id: At1g78210
  misc_feature (1)..(101): NCBI GI NO: 27436747 NR Description: Hypothetical protein
  misc_feature (102)..(191): NCBI GI NO: 27436747 NR Description: Hypothetical protein
  misc_feature (1)..(193): NCBI GI NO: 22326938 NR Description: similar to putative hydrolase
  misc_feature (1)..(189): NCBI GI NO: 30689631 NR Description: hydrolase, alpha/beta fold family
MAALPGAPQRYAVVGVSYGGFVAYHLAHAFPAAVERLVLVAAGVCLEEADLAAGLFAVEDIAEAASLLLPQRPEDLRRLVGLTFCRPQRFMPSCFIRDYIRVMCTENVKEKRELLYALINGRKLSDLPKINQQTLIIWGEQDRVFPLELGLRLKRHLGDTSELIIVKNAGHAINREKPAELCRLIKHYIVDPSVKCRDDRKGSWKNAIKRFVGSSLRKVDSSRPLL

SEQ ID NO: 26885 - protein, 222 aa, Zea mays subsp. mays
  peptide (1)..(222): Ceres Seq. ID no. 12373675
  misc_feature (33)..(85): NCBI GI NO: 33146617 NR Description: hydrolase-like protein
  misc_feature (26)..(99): NCBI GI NO: 37533664 NR Description: putative hydrolase
KHRGIPQSAVHPQSAVRTHGRALPDLPPPANKMPPLSPPASLTPAAGGRRRWKCRLSPTIARDRCYTRSFRSAGLRPAAIPLPDGAVCTPVAPASCRRPRQAPIPCSASPRLRRTSHLAVGALPRPAPRCRSGPLCPGPRLLWRLILPRSRPLPGLSGCLCCRRYGRASWRPAAVRRRRGQLRRLRSIPPRPRVSGSGGAACTSRGRCLPRGGRSGRGALCR

SEQ ID NO: 26886 - DNA, 1932 bp, Zea mays subsp. mays
  misc_feature (1)..(1932): Ceres Seq. ID no. 13637288
aaaaaggggaaaaaaaggagagagaacacacacacacacaaaccccaatcccctgcggcggcgatggacccgtcatcggcgggctccggcggcaactccctcccgtccgtcggccccgacgggcagaagcggcgcgtgtgctacttctacgacccggatgtgggcaactactactacgggcagggccatccgatgaagccgcaccgcatccggatgacgcactcgctgctggcgcgctacggcctcctcaaccagatgcaggtgtaccgccccaacccggcccgcgaccgcgacctctgccgcttccacgccgacgactacatcaacttcctgcgctccgtcacgccggaaacgcagcaggaccagatccgcctgctcaagcgcttcaacgtcggcgaggactgccccgtcttcgacggcctctacagcttctgccagacctatgcgggcgcctccgtcggcggggccgtcaagctcaaccacggccatgacatcgcaatcaactggtcggggggcctgcaccacgccaagaagtgcgaggcgtcgggcttctgctacgtcaatgacatcgtgctcgccatactcgagctgctcaagcatcacgagagagttctgtatgtcgatatcgatatccaccatggtgatggagtggaggaggctttctacacaacagatagggttatgactgtctcgttccacaagtttggtgattatttcccaggaacaggggatatccgtgacattgggcactcaaaagggaagtactactccctgaatgtccctctagatgatgggattgatgatgaaagctaccagtccctttttaagccaatcatgggcaaagttatggaggttttccgccctggtgcagttgtgcttcagtgtggtgctgattccttgtctggggataggttgggctgcttcaacctctcaatcaaaggtcatgcggaatgtgttaggtatatgaggtctttcaacgttccattgttgctccttggtggtggtggatataccataagaaatgttgcacgctgttggtgttatgagactggagttgctcttggccaagagcctgaagacaagatgcctgttaatgagtactatgaatacttcggtccagattacactcttcatgttgcaccaagtaacatggagaacaaaaatacacgacaacaactggatgatatacgatctaaacttctggataatctttcaaaacttcgacatgctcctagtgtccactttcaagagagagttcctgacacagaaatacctgagcaagatgaagatcaagatgatccagatgaacgacatgatcctgactctgatatggaagtggatgaccacaaggctgtggaagagtcatcgaggaggagcattctaggtataaaaatcaagagagaatttggtgaaaatgcgaccagagtacaggatggtggcagggttgcatctgaacatagaggactggaacccatggcagaagacattggttcctccaagcaagctcctcaggcagatgccagtgcaatggccatcgatgaaccaagcaatgtcaagaatgaacctgagagctcaactaaattgcaaggccaagcagctgcgtaccacaagccatagctgcgaccatcaagagttgctgggtttctgctaggcaacttcctgcttgatttggacagtccagaaaacagaagtgaatccgcaatacgtccctgccatttcaaatttgacttggttacacctatctgtgacaatgttaatgtaatgagatcccatggcactagtgaagttcccaggtgtccacctgggattgcttgcggttgagagagacgatagtctgatgacccatgtatacatgaagcccatgatctcagttgtacagtcattagccaatacaaatatgcagtggactaaagggtgattcattgcgtgttc

SEQ ID NO: 26887 - protein, 538 aa, Zea mays subsp. mays
  peptide (1)..(538): Ceres Seq. ID no. 13637289
  misc_feature (22)..(538): NCBI GI NO: 14550104 NR Description: histone deacetylase HDA101 [Zea mays]
  misc_feature (22)..(538): NCBI GI NO: 3023947 NR Description: Probable histone deacetylase (RPD3 homolog)
  misc_feature (22)..(537): NCBI GI NO: 31324093 NR Description: histone deacetylase HDAC1
  misc_feature (22)..(527): NCBI GI NO: 31324097 NR Description: histone deacetylase HDAC3
  misc_feature (22)..(503): NCBI GI NO: 12698880 NR Description: histone deacetylase HD1 [Oryza sativa]
  misc_feature (29)..(527): NCBI GI NO: 15233694 NR Description: Histone deacetylase [Arabidopsis thaliana]
  misc_feature (29)..(527): NCBI GI NO: 2318131 NR Description: histone deacetylase [Arabidopsis thaliana]
  misc_feature (29)..(527): NCBI GI NO: 9022439 NR Description: histone deacetylase
  misc_feature (41)..(505): NCBI GI NO: 13128860 NR Description: histone deacetylase 1
  misc_feature (41)..(505): NCBI GI NO: 30583783 NR Description: Homo sapiens histone deacetylase 1
KKGKKRRENTHTHKPQSPAAAMDPSSAGSGGNSLPSVGPDGQKRRVCYFYDPDVGNYYYGQGHPMKPHRIRMTHSLLARYGLLNQMQVYRPNPARDRDLCRFHADDYINFLRSVTPETQQDQIRLLKRFNVGEDCPVFDGLYSFCQTYAGASVGGAVKLNHGHDIAINWSGGLHHAKKCEASGFCYVNDIVLAILELLKHHERVLYVDIDIHHGDGVEEAFYTTDRVMTVSFHKFGDYFPGTGDIRDIGHSKGKYYSLNVPLDDGIDDESYQSLFKPIMGKVMEVFRPGAVVLQCGADSLSGDRLGCFNLSIKGHAECVRYMRSFNVPLLLLGGGGYTIRNVARCWCYETGVALGQEPEDKMPVNEYYEYFGPDYTLHVAPSNMENKNTRQQLDDIRSKLLDNLSKLRHAPSVHFQERVPDTEIPEQDEDQDDPDERHDPDSDMEVDDHKAVEESSRRSILGIKIKREFGENATRVQDGGRVASEHRGLEPMAEDIGSSKQAPQADASAMAIDEPSNVKNEPESSTKLQGQAAAYHKP

SEQ ID NO: 26888 - protein, 517 aa, Zea mays subsp. mays
  peptide (1)..(517): Ceres Seq. ID no. 13637290
  misc_feature (1)..(517): NCBI GI NO: 14550104 NR Description: histone deacetylase HDA101 [Zea mays]
  misc_feature (1)..(517): NCBI GI NO: 3023947 NR Description: Probable histone deacetylase (RPD3 homolog)
  misc_feature (1)..(516): NCBI GI NO: 31324093 NR Description: histone deacetylase HDAC1
  misc_feature (1)..(506): NCBI GI NO: 31324097 NR Description: histone deacetylase HDAC3
  misc_feature (1)..(482): NCBI GI NO: 12698880 NR Description: histone deacetylase HD1 [Oryza sativa]
  misc_feature (8)..(506): NCBI GI NO: 15233694 NR Description: Histone deacetylase [Arabidopsis thaliana]
  misc_feature (8)..(506): NCBI GI NO: 2318131 NR Description: histone deacetylase [Arabidopsis thaliana]
  misc_feature (8)..(506): NCBI GI NO: 9022439 NR Description: histone deacetylase
  misc_feature (20)..(484): NCBI GI NO: 13128860 NR Description: histone deacetylase 1
  misc_feature (20)..(484): NCBI GI NO: 30583783 NR Description: Homo sapiens histone deacetylase 1
MDPSSAGSGGNSLPSVGPDGQKRRVCYFYDPDVGNYYYGQGHPMKPHRIRMTHSLLARYGLLNQMQVYRPNPARDRDLCRFHADDYINFLRSVTPETQQDQIRLLKRFNVGEDCPVFDGLYSFCQTYAGASVGGAVKLNHGHDIAINWSGGLHHAKKCEASGFCYVNDIVLAILELLKHHERVLYVDIDIHHGDGVEEAFYTTDRVMTVSFHKFGDYFPGTGDIRDIGHSKGKYYSLNVPLDDGIDDESYQSLFKPIMGKVMEVFRPGAVVLQCGADSLSGDRLGCFNLSIKGHAECVRYMRSFNVPLLLLGGGGYTIRNVARCWCYETGVALGQEPEDKMPVNEYYEYFGPDYTLHVAPSNMENKNTRQQLDDIRSKLLDNLSKLRHAPSVHFQERVPDTEIPEQDEDQDDPDERHDPDSDMEVDDHKAVEESSRRSILGIKIKREFGENATRVQDGGRVASEHRGLEPMAEDIGSSKQAPQADASAMAIDEPSNVKNEPESSTKLQGQAAAYHKP

SEQ ID NO: 26889 - protein, 474 aa, Zea mays subsp. mays
  peptide (1)..(474): Ceres Seq. ID no. 13637291
  misc_feature (1)..(474): NCBI GI NO: 14550104 NR Description: histone deacetylase HDA101 [Zea mays]
  misc_feature (1)..(474): NCBI GI NO: 3023947 NR Description: Probable histone deacetylase (RPD3 homolog)
  misc_feature (1)..(473): NCBI GI NO: 31324093 NR Description: histone deacetylase HDAC1
  misc_feature (1)..(463): NCBI GI NO: 31324097 NR Description: histone deacetylase HDAC3
  misc_feature (1)..(439): NCBI GI NO: 12698880 NR Description: histone deacetylase HD1 [Oryza sativa]
  misc_feature (1)..(463): NCBI GI NO: 15233694 NR Description: Histone deacetylase [Arabidopsis thaliana]
  misc_feature (1)..(463): NCBI GI NO: 2318131 NR Description: histone deacetylase [Arabidopsis thaliana]
  misc_feature (1)..(463): NCBI GI NO: 9022439 NR Description: histone deacetylase
  misc_feature (1)..(441): NCBI GI NO: 13128860 NR Description: histone deacetylase 1
  misc_feature (1)..(441): NCBI GI NO: 30583783 NR Description: Homo sapiens histone deacetylase 1
MKPHRIRMTHSLLARYGLLNQMQVYRPNPARDRDLCRFHADDYINFLRSVTPETQQDQIRLLKRFNVGEDCPVFDGLYSFCQTYAGASVGGAVKLNHGHDIAINWSGGLHHAKKCEASGFCYVNDIVLAILELLKHHERVLYVDIDIHHGDGVEEAFYTTDRVMTVSFHKFGDYFPGTGDIRDIGHSKGKYYSLNVPLDDGIDDESYQSLFKPIMGKVMEVFRPGAVVLQCGADSLSGDRLGCFNLSIKGHAECVRYMRSFNVPLLLLGGGGYTIRNVARCWCYETGVALGQEPEDKMPVNEYYEYFGPDYTLHVAPSNMENKNTRQQLDDIRSKLLDNLSKLRHAPSVHFQERVPDTEIPEQDEDQDDPDERHDPDSDMEVDDHKAVEESSRRSILGIKIKREFGENATRVQDGGRVASEHRGLEPMAEDIGSSKQAPQADASAMAIDEPSNVKNEPESSTKLQGQAAAYHKP

SEQ ID NO: 26890 - DNA, 1105 bp, Zea mays subsp. mays
  misc_feature (1)..(1105): Ceres Seq. ID no. 12343379
agcccaaaatcaattcggatccgcctccatggctgccgcttcgcagctcctctctctgttcttcctcctcctcctccctgcttgtgatgccatctactgcgacgaagacgactgctacgacctcctaggggttaagcaggacgcgaacgcgtcagacatcaagaaagcgtactacaagctctctctcaaacaccacccggacaagaatcccgatccggagtcgcggaagctcttcgtcaagatcgccaatgcttacgagattctgaaggatgaatccactagggcgcagtatgactttgccattgaacatccggaggaggttttctataacacagctcagtactatagggcatactatggacataaaacggatcctcgtgcagtgttgattggtcttcttctaattgtttcagcatttcaatacattaatcagctaacgaggtataaccaggccatgaaaagtgtcaagcaaactcctgcttacaaaaataggttaaaagctttggagtatgagcgaacaggaggaattgctagcaaaaagaagggcatcaagcaggtggataagaaagttgaagaagagctaagtaatgaagttgaattgcaaattcatggggttgaaaaaccgtctgtttggaggctgtttggtgtccaatttatactttggccttactctgttggcaaggcgcttacttggaagatttgttggttttggagataccgggtaaagaaattaccatatacatgggaggatgcttgctacttgacctggatttcactccaaatacctgcgaatgcatggaaaaatatggatgagtccaggaaggaggaccttgtgagaagacacctctgggaaaagagcaacatggagaggtatacttcagggacgaggaaggaaccaaagcgtaggaggtagctgtgcaacatttttgacctgagactacagcaactttaaacaatacaacatactcctatattggagtgaaaagttattgaccaggcttgagttcaccgatagctaattgctagggtccccgggaagtggcatggctaaggaatcatgtttggaggacaattcatgtaataaagtgatcaaggcgacttttgc

SEQ ID NO: 26891 - protein, 303 aa, Zea mays subsp. mays
  peptide (1)..(303): Ceres Seq. ID no. 12343380
  misc_feature (37)..(101): Pfam Name: Pfam Description:  DnaJ domain
  misc_feature (16)..(303): NCBI GI NO: 30696610 NR Description: DnaJ protein family [Arabidopsis thaliana]
  misc_feature (16)..(269): NCBI GI NO: 25404348 NR Description: hypothetical protein T13M11.13
  misc_feature (105)..(303): NCBI GI NO: 19347731 NR Description: unknown protein [Arabidopsis thaliana]
  misc_feature (16)..(302): NCBI GI NO: 18859921 NR Description: CG7872-PA [Drosophila melanogaster]
  misc_feature (29)..(302): NCBI GI NO: 31219417 NR Description: ENSANGP00000010358 [Anopheles gambiae]
  misc_feature (17)..(302): NCBI GI NO: 34868434 NR Description: similar to bA16L21
  misc_feature (17)..(302): NCBI GI NO: 38078426 NR Description: RIKEN cDNA 2010203O07 [Mus musculus]
  misc_feature (22)..(302): NCBI GI NO: 12313893 NR Description: bA16L21
  misc_feature (22)..(291): NCBI GI NO: 39593758 NR Description: Hypothetical protein CBG06069
  misc_feature (11)..(287): NCBI GI NO: 17538212 NR Description: DNaJ domain
AQNQFGSASMAAASQLLSLFFLLLLPACDAIYCDEDDCYDLLGVKQDANASDIKKAYYKLSLKHHPDKNPDPESRKLFVKIANAYEILKDESTRAQYDFAIEHPEEVFYNTAQYYRAYYGHKTDPRAVLIGLLLIVSAFQYINQLTRYNQAMKSVKQTPAYKNRLKALEYERTGGIASKKKGIKQVDKKVEEELSNEVELQIHGVEKPSVWRLFGVQFILWPYSVGKALTWKICWFWRYRVKKLPYTWEDACYLTWISLQIPANAWKNMDESRKEDLVRRHLWEKSNMERYTSGTRKEPKRRR

SEQ ID NO: 26892 - protein, 294 aa, Zea mays subsp. mays
  peptide (1)..(294): Ceres Seq. ID no. 12343381
  misc_feature (28)..(92): Pfam Name: Pfam Description:  DnaJ domain
  misc_feature (7)..(294): NCBI GI NO: 30696610 NR Description: DnaJ protein family [Arabidopsis thaliana]
  misc_feature (7)..(260): NCBI GI NO: 25404348 NR Description: hypothetical protein T13M11.13
  misc_feature (96)..(294): NCBI GI NO: 19347731 NR Description: unknown protein [Arabidopsis thaliana]
  misc_feature (7)..(293): NCBI GI NO: 18859921 NR Description: CG7872-PA [Drosophila melanogaster]
  misc_feature (20)..(293): NCBI GI NO: 31219417 NR Description: ENSANGP00000010358 [Anopheles gambiae]
  misc_feature (8)..(293): NCBI GI NO: 34868434 NR Description: similar to bA16L21
  misc_feature (8)..(293): NCBI GI NO: 38078426 NR Description: RIKEN cDNA 2010203O07 [Mus musculus]
  misc_feature (13)..(293): NCBI GI NO: 12313893 NR Description: bA16L21
  misc_feature (13)..(282): NCBI GI NO: 39593758 NR Description: Hypothetical protein CBG06069
  misc_feature (2)..(278): NCBI GI NO: 17538212 NR Description: DNaJ domain
MAAASQLLSLFFLLLLPACDAIYCDEDDCYDLLGVKQDANASDIKKAYYKLSLKHHPDKNPDPESRKLFVKIANAYEILKDESTRAQYDFAIEHPEEVFYNTAQYYRAYYGHKTDPRAVLIGLLLIVSAFQYINQLTRYNQAMKSVKQTPAYKNRLKALEYERTGGIASKKKGIKQVDKKVEEELSNEVELQIHGVEKPSVWRLFGVQFILWPYSVGKALTWKICWFWRYRVKKLPYTWEDACYLTWISLQIPANAWKNMDESRKEDLVRRHLWEKSNMERYTSGTRKEPKRRR

SEQ ID NO: 26893 - protein, 152 aa, Zea mays subsp. mays
  peptide (1)..(152): Ceres Seq. ID no. 12343382
  misc_feature (1)..(152): NCBI GI NO: 30696610 NR Description: DnaJ protein family [Arabidopsis thaliana]
  misc_feature (1)..(118): NCBI GI NO: 25404348 NR Description: hypothetical protein T13M11.13
  misc_feature (1)..(152): NCBI GI NO: 19347731 NR Description: unknown protein [Arabidopsis thaliana]
  misc_feature (1)..(151): NCBI GI NO: 18859921 NR Description: CG7872-PA [Drosophila melanogaster]
  misc_feature (1)..(151): NCBI GI NO: 31219417 NR Description: ENSANGP00000010358 [Anopheles gambiae]
  misc_feature (1)..(151): NCBI GI NO: 34868434 NR Description: similar to bA16L21
  misc_feature (1)..(151): NCBI GI NO: 38078426 NR Description: RIKEN cDNA 2010203O07 [Mus musculus]
  misc_feature (1)..(151): NCBI GI NO: 12313893 NR Description: bA16L21
  misc_feature (1)..(140): NCBI GI NO: 39593758 NR Description: Hypothetical protein CBG06069
  misc_feature (1)..(136): NCBI GI NO: 17538212 NR Description: DNaJ domain
MKSVKQTPAYKNRLKALEYERTGGIASKKKGIKQVDKKVEEELSNEVELQIHGVEKPSVWRLFGVQFILWPYSVGKALTWKICWFWRYRVKKLPYTWEDACYLTWISLQIPANAWKNMDESRKEDLVRRHLWEKSNMERYTSGTRKEPKRRR

SEQ ID NO: 26894 - DNA, 1195 bp, Zea mays subsp. mays
  misc_feature (1)..(1195): Ceres Seq. ID no. 12409665
cgcgactcgcgagcggcaattggacgcatcgcatcggatctcttcctccggtcttctctgacctctgggcctctgactccgcgcccacaccgccactgcctctggcctccagccacctcccgatctggccgagctcgcctccccggaggcggcgcatggatcccgcctcgtcggtggccgccgagttttggcggccgccgtaccaccacctccgggcctcgtccgtcgtcaccgccgccgcccgctccgggggcggctccagcagccgcaggagaccgcggcgcgacgccgcggcgtcgtccgaggaggagccgtccaagctcgtttccacgtcgggcaccgccgccagcagcagcgcgggctgccaggactcggctgacccagaagcaaaacggttgaaacagatagcacctagtgaaaaaaatgacagaaggacagaagctgaaacaaattcagggaacgctagcaagtctgctgataaaaagcctgcacctaaagagccaccaaaagactacatccatgtgagggctagaagaggtcaagcaacggacagccatagcctcgcagaaagagcacgacgagagaagataagtgaacggatgaaagttcttcaagatattgtccctggatgcaacaaggttatcgggaaagcatcagtccttgatgagataataaattacatccagtctttacagcgtcaagtagagtttttgtccatgaaacttgaagcgattaatgctcatgtgagcaatgcaactgtagcttttccaaccaaagattttggtgttgcgccatataatactgctcctagcctgacgttggacccacaaacgccaagggaatacgcccagggctcgatgtcagattggcttcacatgcaggtcggcaacgcatatgaaagagtgacatgaataaaacgaggaatccataaaacaagctgaattccttgtggtagccaataaagagtaccaggatcaaccgagttcacagtaccaggttcattttcttcttcttctcgtggtcatcgtgacgccaaagttagtttattttattcctagtttgggggcattagcgccgtagatgcgtcattccacatccatctaggagggagcactgtcgtttactgtatacggatttcgtgatgtatcccgggaaatttttgtagatcggactcgtagaagaagagattgcaatt

SEQ ID NO: 26895 - protein, 302 aa, Zea mays subsp. mays
  peptide (1)..(302): Ceres Seq. ID no. 12409666
  misc_feature (181)..(231): Pfam Name: Pfam Description:  Helix-loop-helix DNA-binding domain
  misc_feature (52)..(302): NCBI GI NO: 29150361 NR Description: hypothetical protein
  misc_feature (109)..(302): NCBI GI NO: 33339703 NR Description: MYC1 [Catharanthus roseus]
  misc_feature (60)..(302): NCBI GI NO: 21592490 NR Description: unknown [Arabidopsis thaliana]
  misc_feature (60)..(302): NCBI GI NO: 18406408 NR Description: bHLH protein; protein id: At1g59640
  misc_feature (15)..(302): NCBI GI NO: 15241896 NR Description: putative protein; protein id: At5g62610
  misc_feature (60)..(259): NCBI GI NO: 25404871 NR Description: protein T30E16.21
  misc_feature (260)..(302): NCBI GI NO: 25404871 NR Description: protein T30E16.21
  misc_feature (60)..(259): NCBI GI NO: 25453562 NR Description: helix-loop-helix protein homolog
  misc_feature (60)..(259): NCBI GI NO: 30696324 NR Description: bHLH protein [Arabidopsis thaliana]
  misc_feature (84)..(245): NCBI GI NO: 15239013 NR Description: putative protein; protein id: At5g48560
RLASGNWTHRIGSLPPVFSDLWASDSAPTPPLPLASSHLPIWPSSPPRRRRMDPASSVAAEFWRPPYHHLRASSVVTAAARSGGGSSSRRRPRRDAAASSEEEPSKLVSTSGTAASSSAGCQDSADPEAKRLKQIAPSEKNDRRTEAETNSGNASKSADKKPAPKEPPKDYIHVRARRGQATDSHSLAERARREKISERMKVLQDIVPGCNKVIGKASVLDEIINYIQSLQRQVEFLSMKLEAINAHVSNATVAFPTKDFGVAPYNTAPSLTLDPQTPREYAQGSMSDWLHMQVGNAYERVT

SEQ ID NO: 26896 - protein, 251 aa, Zea mays subsp. mays
  peptide (1)..(251): Ceres Seq. ID no. 12409667
  misc_feature (130)..(180): Pfam Name: Pfam Description:  Helix-loop-helix DNA-binding domain
  misc_feature (1)..(251): NCBI GI NO: 29150361 NR Description: hypothetical protein
  misc_feature (58)..(251): NCBI GI NO: 33339703 NR Description: MYC1 [Catharanthus roseus]
  misc_feature (9)..(251): NCBI GI NO: 21592490 NR Description: unknown [Arabidopsis thaliana]
  misc_feature (9)..(251): NCBI GI NO: 18406408 NR Description: bHLH protein; protein id: At1g59640
  misc_feature (1)..(251): NCBI GI NO: 15241896 NR Description: putative protein; protein id: At5g62610
  misc_feature (9)..(208): NCBI GI NO: 25404871 NR Description: protein T30E16.21
  misc_feature (209)..(251): NCBI GI NO: 25404871 NR Description: protein T30E16.21
  misc_feature (9)..(208): NCBI GI NO: 25453562 NR Description: helix-loop-helix protein homolog
  misc_feature (9)..(208): NCBI GI NO: 30696324 NR Description: bHLH protein [Arabidopsis thaliana]
  misc_feature (33)..(194): NCBI GI NO: 15239013 NR Description: putative protein; protein id: At5g48560
MDPASSVAAEFWRPPYHHLRASSVVTAAARSGGGSSSRRRPRRDAAASSEEEPSKLVSTSGTAASSSAGCQDSADPEAKRLKQIAPSEKNDRRTEAETNSGNASKSADKKPAPKEPPKDYIHVRARRGQATDSHSLAERARREKISERMKVLQDIVPGCNKVIGKASVLDEIINYIQSLQRQVEFLSMKLEAINAHVSNATVAFPTKDFGVAPYNTAPSLTLDPQTPREYAQGSMSDWLHMQVGNAYERVT

SEQ ID NO: 26897 - DNA, 923 bp, Zea mays subsp. mays
  misc_feature (1)..(923): Ceres Seq. ID no. 12349077
atacgccttttctgctgccgctgcatcttccactcgcgtcaagaaacgaaacccagctgcaccagcaacttctgccagcagacccaacgaccgaagcttttttttccctttcttttcatcgccgccgctcggggttcaaggttcagcgcgtccccgaatgacgggcacgtacgaggcctccgaccgtcctcctcctcccaactccgccggccaccggaccgacaaagtccggcggaagcggctgacggcgcagaagaggaaagagatcaaggaggcgttcgacctcttcgacatcgacggctccggcaccatcgatgcaagggagctgaacgtcgcgatgagagcccttggattcgagatgacaccggagcaaatcgggcagatgatcgcggaggtggacaaggacggcagcggcaccatcgacttcgacgagttcgtgcacatgatgacggacaagatgggcgagcgggacgcccgggacgagctgcacaaggcgttccgcatcatcgaccaggacgccaacggaaagatctcggacatggacatccagcggctggccatcgagaccggcgagcacttcacgctcgacgaggtccgggagatgatagaggccgccgacgaggacggcgacggcgagatcgacctggaggagttcatgaagatgatgaagcggacagactttggctctgggttctagtagtcacaggcaagccaatcccaacatacatccccatcggtgaaaaatacatatcacctacgctacatatgactggagtattgggatttatttgagaaataatggcgtacacacaccatacatcatagtgtactaactactgtaatatatgtgtagtgctgtccatgtacatcctagctagctacggcttgtgtatttacctacacgtaatgaaacacatattact

SEQ ID NO: 26898 - protein, 263 aa, Zea mays subsp. mays
  peptide (1)..(263): Ceres Seq. ID no. 12349078
IRLFCCRCIFHSRQETKPSCTSNFCQQTQRPKLFFPFLFIAAARGSRFSASPNDGHVRGLRPSSSSQLRRPPDRQSPAEAADGAEEERDQGGVRPLRHRRLRHHRCKGAERRDESPWIRDDTGANRADDRGGGQGRQRHHRLRRVRAHDDGQDGRAGRPGRAAQGVPHHRPGRQRKDLGHGHPAAGHRDRRALHARRGPGDDRGRRRGRRRRDRPGGVHEDDEADRLWLWVLVVTGKPIPTYIPIGEKYISPTLHMTGVLGFI

SEQ ID NO: 26899 - protein, 231 aa, Zea mays subsp. mays
  peptide (1)..(231): Ceres Seq. ID no. 12349079
  misc_feature (124)..(152): Pfam Name: Pfam Description:  EF hand
  misc_feature (70)..(230): NCBI GI NO: 37533900 NR Description: Centrin [Oryza sativa (japonica cultivar-group)]
  misc_feature (72)..(227): NCBI GI NO: 729051 NR Description: CALTRACTIN (CENTRIN)
  misc_feature (81)..(228): NCBI GI NO: 33146874 NR Description: putative caltractin
  misc_feature (81)..(228): NCBI GI NO: 34906754 NR Description: putative caltractin
  misc_feature (77)..(228): NCBI GI NO: 6358509 NR Description: centrin [Nicotiana tabacum]
  misc_feature (72)..(228): NCBI GI NO: 15229732 NR Description: centrin; protein id: At3g50360.1
  misc_feature (77)..(228): NCBI GI NO: 6358511 NR Description: centrin [Nicotiana tabacum]
  misc_feature (81)..(228): NCBI GI NO: 15234588 NR Description: caltractin-like protein; protein id: At4g37010.1
  misc_feature (81)..(228): NCBI GI NO: 21554823 NR Description: caltractin-like protein [Arabidopsis thaliana]
  misc_feature (68)..(225): NCBI GI NO: 543936 NR Description: CALTRACTIN (CENTRIN)
YAFSAAAASSTRVKKRNPAAPATSASRPNDRSFFFPFFSSPPLGVQGSARPRMTGTYEASDRPPPPNSAGHRTDKVRRKRLTAQKRKEIKEAFDLFDIDGSGTIDARELNVAMRALGFEMTPEQIGQMIAEVDKDGSGTIDFDEFVHMMTDKMGERDARDELHKAFRIIDQDANGKISDMDIQRLAIETGEHFTLDEVREMIEAADEDGDGEIDLEEFMKMMKRTDFGSGF

SEQ ID NO: 26900 - protein, 179 aa, Zea mays subsp. mays
  peptide (1)..(179): Ceres Seq. ID no. 12349080
  misc_feature (72)..(100): Pfam Name: Pfam Description:  EF hand
  misc_feature (18)..(178): NCBI GI NO: 37533900 NR Description: Centrin [Oryza sativa (japonica cultivar-group)]
  misc_feature (20)..(175): NCBI GI NO: 729051 NR Description: CALTRACTIN (CENTRIN)
  misc_feature (29)..(176): NCBI GI NO: 33146874 NR Description: putative caltractin
  misc_feature (29)..(176): NCBI GI NO: 34906754 NR Description: putative caltractin
  misc_feature (25)..(176): NCBI GI NO: 6358509 NR Description: centrin [Nicotiana tabacum]
  misc_feature (20)..(176): NCBI GI NO: 15229732 NR Description: centrin; protein id: At3g50360.1
  misc_feature (25)..(176): NCBI GI NO: 6358511 NR Description: centrin [Nicotiana tabacum]
  misc_feature (29)..(176): NCBI GI NO: 15234588 NR Description: caltractin-like protein; protein id: At4g37010.1
  misc_feature (29)..(176): NCBI GI NO: 21554823 NR Description: caltractin-like protein [Arabidopsis thaliana]
  misc_feature (16)..(173): NCBI GI NO: 543936 NR Description: CALTRACTIN (CENTRIN)
MTGTYEASDRPPPPNSAGHRTDKVRRKRLTAQKRKEIKEAFDLFDIDGSGTIDARELNVAMRALGFEMTPEQIGQMIAEVDKDGSGTIDFDEFVHMMTDKMGERDARDELHKAFRIIDQDANGKISDMDIQRLAIETGEHFTLDEVREMIEAADEDGDGEIDLEEFMKMMKRTDFGSGF

SEQ ID NO: 26901 - DNA, 851 bp, Zea mays subsp. mays
  misc_feature (1)..(851): Ceres Seq. ID no. 12353795
ccttttcgcacccggctggccggctccccacctgctcgcctctcgcgcatcctaccaggagggtgggagacccaggcagcggaggtgtgcgaagctcgcttcgcaccacgcgctgcggcctgcgggggagagatcgaggcctgagctagggtctggtggcggagatgtcgacgccggcgaggaagcgcctgatgcgggacttcaagcgccttcagcaggacccgcccgccggcatcagcggcgcgccgtacgacaacaatatcatgctctggaacgccgtcatattcgggccggatgacacgccgtgggatggaggcacgttcaagctgactctgcaatttacagaagattaccccaacaaacctccaactgttcggtttgtttcgaggatgtttcatcccaaacatctatgcggatggaagcatctgtttggacatcctacaaaatcagtggagccctatatatgatgttgcggcaatattgacctctattcagtccctgctgtgtgacccaaacccaaattctcctgctaactctgaagcagccagaatgttcagcgagaacaagcgtgagtacaaccgcaaagttcgtgaggttgtggagcagagctggacagccgactaaaactttatccgcttcgccaggcggtgtaaataaagcatctgtctttcctacttggccggtctgttttaccgttagaaatcctcagctatcgttgtgttcttgtggttcagtcccttgttgtagtgatgcctgcgggttttcctaatgtagtgctgaacggtttcataaactcggatattggtgcatatgtaacagatatagctaagtcaagttgttgcttggtttgc

SEQ ID NO: 26902 - protein, 100 aa, Zea mays subsp. mays
  peptide (1)..(100): Ceres Seq. ID no. 12353796
  misc_feature (1)..(79): NCBI GI NO: 13516451 NR Description: ubiquitin-conjugating enzyme (E2)
  misc_feature (1)..(79): NCBI GI NO: 33146810 NR Description: OsRad6 [Oryza sativa (japonica cultivar-group)]
  misc_feature (1)..(79): NCBI GI NO: 13516453 NR Description: ubiquitin-conjugating enzyme (E2)
  misc_feature (1)..(79): NCBI GI NO: 8118527 NR Description: ubiquitin conjugating protein [Avicennia marina]
  misc_feature (1)..(79): NCBI GI NO: 136640 NR Description: Ubiquitin-conjugating enzyme E2-17 kDa
  misc_feature (1)..(79): NCBI GI NO: 18844990 NR Description: Rad6 [Oryza sativa (japonica cultivar-group)]
  misc_feature (1)..(79): NCBI GI NO: 464980 NR Description: Ubiquitin-conjugating enzyme E2-17 kDa
  misc_feature (1)..(79): NCBI GI NO: 18395424 NR Description: E2, ubiquitin-conjugating enzyme 2
  misc_feature (1)..(79): NCBI GI NO: 18394114 NR Description: E2, ubiquitin-conjugating enzyme 1
  misc_feature (1)..(79): NCBI GI NO: 18424601 NR Description: E2, ubiquitin-conjugating enzyme 3
MSTPARKRLMRDFKRLQQDPPAGISGAPYDNNIMLWNAVIFGPDDTPWDGGTFKLTLQFTEDYPNKPPTVRFVSRMFHPKHLCGWKHLFGHPTKSVEPYI

SEQ ID NO: 26903 - protein, 98 aa, Zea mays subsp. mays
  peptide (1)..(98): Ceres Seq. ID no. 12353797
LFAPGWPAPHLLASRASYQEGGRPRQRRCAKLASHHALRPAGERSRPELGSGGGDVDAGEEAPDAGLQAPSAGPARRHQRRAVRQQYHALERRHIRAG

SEQ ID NO: 26904 - protein, 91 aa, Zea mays subsp. mays
  peptide (1)..(91): Ceres Seq. ID no. 12353798
  misc_feature (1)..(70): NCBI GI NO: 13516451 NR Description: ubiquitin-conjugating enzyme (E2)
  misc_feature (1)..(70): NCBI GI NO: 33146810 NR Description: OsRad6 [Oryza sativa (japonica cultivar-group)]
  misc_feature (1)..(70): NCBI GI NO: 13516453 NR Description: ubiquitin-conjugating enzyme (E2)
  misc_feature (1)..(70): NCBI GI NO: 8118527 NR Description: ubiquitin conjugating protein [Avicennia marina]
  misc_feature (1)..(70): NCBI GI NO: 136640 NR Description: Ubiquitin-conjugating enzyme E2-17 kDa
  misc_feature (1)..(70): NCBI GI NO: 18844990 NR Description: Rad6 [Oryza sativa (japonica cultivar-group)]
  misc_feature (1)..(70): NCBI GI NO: 464980 NR Description: Ubiquitin-conjugating enzyme E2-17 kDa
  misc_feature (1)..(70): NCBI GI NO: 18395424 NR Description: E2, ubiquitin-conjugating enzyme 2
  misc_feature (1)..(70): NCBI GI NO: 18394114 NR Description: E2, ubiquitin-conjugating enzyme 1
  misc_feature (1)..(70): NCBI GI NO: 18424601 NR Description: E2, ubiquitin-conjugating enzyme 3
MRDFKRLQQDPPAGISGAPYDNNIMLWNAVIFGPDDTPWDGGTFKLTLQFTEDYPNKPPTVRFVSRMFHPKHLCGWKHLFGHPTKSVEPYI

SEQ ID NO: 26905 - DNA, 1598 bp, Zea mays subsp. mays
  misc_feature (1)..(1598): Ceres Seq. ID no. 12369124
atcgcgtacaaaagtagtcacagacatatctcccctctgttccgagaagcaaacagaggccgaagccaaagatgacgaggactacgcagctcgtcgccgccatcgcggtttccttcctgtcagcggcggccgcgtccaacaccaccacgtcactccaaagcctcgtcgccgaagtgtcgcagtggcgggaaatccacctgggcggcggcgcggcggcggcgcatggcgtccggccgagcaccgtcgtggcgtgggcgctctccttcctggccgcgtccgtgtcgagcgccggcggcgtgggcggcgggtcgctgttcctgcccatcctgaacctggtggcggggctgagcctgaagcgcgccactgcctactcgtccttcatggtcaccggcggcgcggcctcgaacgtgctctacaacctcgcctgcacgggcggcggcgggagagggaggctgatcgactacgacatcgcgctactgttccagccgtgcctgctcctgggcgtgagcatcggggtggtgtgcaacgtcatgttcccggagtggctcatcaccctgctcttctccctgttcctcgccttctgcacagccaagacgtgccgcgcgggggtcaagatctggcggtccgagagcagcgggtgcgggtccggggctaggtcctcgcgcggtggacacagccacagcaaggagcccctgctgccccgcggcaccagcgacggcgacgccgagggcggcggcggaaatggcgcggggttcccgtggggagacgtggctctgcttgtcatcatctggctctgcttcttcgccctccatgtcctcattggcgataagcacgggaagggcgtgatcaggattaggccctgcggcgtcgcgtactggctgatcaccttcttccagctacctgccgctgtggctttcacagggtatattgtatacgccaagaggaagaaacgcgctgttcatagcgaaagccaagaggacggcagcaaggcagaccttgcggacgcaggagtggaagccttgccactacctacactacctctcgccgctttcgtcaccggggctctgagcggcctcttcggcatcggaggagggctgcttctgaaccctgtccttcttcagatcggaattcccccgcagaccgcggcagcgacgtcttcgttcatggtcctgttctgtgcgtccatgtccatggtccagttcatcctgctgggcgtggaaggcgtcgggcaggcctgcgtttacgccggggtatgcttcgccggctcggtcgcgggggtcgtcgtgatcgagcgagccgtcagcaagtctggccgggtctcgctcatcgtgttcctcgtcaccgccatcatggcgctcagcgctgtcatcgtcacctgcttcggagcgttagacgtctggatgcagtacaccaccggggaatacatgggcttcaagctaccttgctgacatcttgctcggtgttatgggcttcgttttggttttgcgtttgtgctcttcaccttgtaatgtctggaaagagaggccggagtaggactggttgtgcatgggcactcattgtaatttccaattttcaggttttatatagtgtgaattgtc

SEQ ID NO: 26906 - protein, 458 aa, Zea mays subsp. mays
  peptide (1)..(458): Ceres Seq. ID no. 12369125
  misc_feature (1)..(458): NCBI GI NO: 34908754 NR Description: P0415A04.10
  misc_feature (57)..(440): NCBI GI NO: 34908752 NR Description: P0415A04.9
  misc_feature (29)..(458): NCBI GI NO: 6554197 NR Description: T23J18.20 [Arabidopsis thaliana]
  misc_feature (29)..(458): NCBI GI NO: 15220419 NR Description: hypothetical protein; protein id: At1g11540.1
  misc_feature (228)..(458): NCBI GI NO: 15220600 NR Description: unknown protein; protein id: At1g61740
  misc_feature (56)..(187): NCBI GI NO: 15220600 NR Description: unknown protein; protein id: At1g61740
  misc_feature (23)..(429): NCBI GI NO: 15233579 NR Description: hypothetical protein; protein id: At4g21250.1
  misc_feature (408)..(458): NCBI GI NO: 15233579 NR Description: hypothetical protein; protein id: At4g21250.1
  misc_feature (228)..(458): NCBI GI NO: 11358507 NR Description: membrane protein
  misc_feature (68)..(187): NCBI GI NO: 11358507 NR Description: membrane protein
MTRTTQLVAAIAVSFLSAAAASNTTTSLQSLVAEVSQWREIHLGGGAAAAHGVRPSTVVAWALSFLAASVSSAGGVGGGSLFLPILNLVAGLSLKRATAYSSFMVTGGAASNVLYNLACTGGGGRGRLIDYDIALLFQPCLLLGVSIGVVCNVMFPEWLITLLFSLFLAFCTAKTCRAGVKIWRSESSGCGSGARSSRGGHSHSKEPLLPRGTSDGDAEGGGGNGAGFPWGDVALLVIIWLCFFALHVLIGDKHGKGVIRIRPCGVAYWLITFFQLPAAVAFTGYIVYAKRKKRAVHSESQEDGSKADLADAGVEALPLPTLPLAAFVTGALSGLFGIGGGLLLNPVLLQIGIPPQTAAATSSFMVLFCASMSMVQFILLGVEGVGQACVYAGVCFAGSVAGVVVIERAVSKSGRVSLIVFLVTAIMALSAVIVTCFGALDVWMQYTTGEYMGFKLPC

SEQ ID NO: 26907 - protein, 355 aa, Zea mays subsp. mays
  peptide (1)..(355): Ceres Seq. ID no. 12369126
  misc_feature (1)..(355): NCBI GI NO: 34908754 NR Description: P0415A04.10
  misc_feature (1)..(337): NCBI GI NO: 34908752 NR Description: P0415A04.9
  misc_feature (1)..(355): NCBI GI NO: 6554197 NR Description: T23J18.20 [Arabidopsis thaliana]
  misc_feature (1)..(355): NCBI GI NO: 15220419 NR Description: hypothetical protein; protein id: At1g11540.1
  misc_feature (125)..(355): NCBI GI NO: 15220600 NR Description: unknown protein; protein id: At1g61740
  misc_feature (1)..(84): NCBI GI NO: 15220600 NR Description: unknown protein; protein id: At1g61740
  misc_feature (1)..(326): NCBI GI NO: 15233579 NR Description: hypothetical protein; protein id: At4g21250.1
  misc_feature (305)..(355): NCBI GI NO: 15233579 NR Description: hypothetical protein; protein id: At4g21250.1
  misc_feature (125)..(355): NCBI GI NO: 11358507 NR Description: membrane protein
  misc_feature (1)..(84): NCBI GI NO: 11358507 NR Description: membrane protein
MVTGGAASNVLYNLACTGGGGRGRLIDYDIALLFQPCLLLGVSIGVVCNVMFPEWLITLLFSLFLAFCTAKTCRAGVKIWRSESSGCGSGARSSRGGHSHSKEPLLPRGTSDGDAEGGGGNGAGFPWGDVALLVIIWLCFFALHVLIGDKHGKGVIRIRPCGVAYWLITFFQLPAAVAFTGYIVYAKRKKRAVHSESQEDGSKADLADAGVEALPLPTLPLAAFVTGALSGLFGIGGGLLLNPVLLQIGIPPQTAAATSSFMVLFCASMSMVQFILLGVEGVGQACVYAGVCFAGSVAGVVVIERAVSKSGRVSLIVFLVTAIMALSAVIVTCFGALDVWMQYTTGEYMGFKLPC

SEQ ID NO: 26908 - protein, 305 aa, Zea mays subsp. mays
  peptide (1)..(305): Ceres Seq. ID no. 12369127
  misc_feature (1)..(305): NCBI GI NO: 34908754 NR Description: P0415A04.10
  misc_feature (1)..(287): NCBI GI NO: 34908752 NR Description: P0415A04.9
  misc_feature (1)..(305): NCBI GI NO: 6554197 NR Description: T23J18.20 [Arabidopsis thaliana]
  misc_feature (1)..(305): NCBI GI NO: 15220419 NR Description: hypothetical protein; protein id: At1g11540.1
  misc_feature (75)..(305): NCBI GI NO: 15220600 NR Description: unknown protein; protein id: At1g61740
  misc_feature (1)..(34): NCBI GI NO: 15220600 NR Description: unknown protein; protein id: At1g61740
  misc_feature (1)..(276): NCBI GI NO: 15233579 NR Description: hypothetical protein; protein id: At4g21250.1
  misc_feature (255)..(305): NCBI GI NO: 15233579 NR Description: hypothetical protein; protein id: At4g21250.1
  misc_feature (75)..(305): NCBI GI NO: 11358507 NR Description: membrane protein
  misc_feature (1)..(34): NCBI GI NO: 11358507 NR Description: membrane protein
MFPEWLITLLFSLFLAFCTAKTCRAGVKIWRSESSGCGSGARSSRGGHSHSKEPLLPRGTSDGDAEGGGGNGAGFPWGDVALLVIIWLCFFALHVLIGDKHGKGVIRIRPCGVAYWLITFFQLPAAVAFTGYIVYAKRKKRAVHSESQEDGSKADLADAGVEALPLPTLPLAAFVTGALSGLFGIGGGLLLNPVLLQIGIPPQTAAATSSFMVLFCASMSMVQFILLGVEGVGQACVYAGVCFAGSVAGVVVIERAVSKSGRVSLIVFLVTAIMALSAVIVTCFGALDVWMQYTTGEYMGFKLPC

SEQ ID NO: 26909 - DNA, 916 bp, Zea mays subsp. mays
  misc_feature (1)..(916): Ceres Seq. ID no. 13625767
  misc_feature (125)..(125): n is a, c, t, g, unknown, or other
ggttggcgagaaagagcagagggacaccgaaacagagaggagcagaggggagcgacgacaggtcagcggagatggaagcagcggcaggaggagtggaggcggagggggtgatgagggtgctggtngtggacgactcccccgtcgaccgccgggggagtcgtcacgcacgcactcctcatcttatcccccgcctcctccggtcctcccgccgctgttgctcacttctgagtcccgacgcacgagctcccaagagctagccatggcgtccaccaccctctcctccgccttcaccctcctatcccgcccctccacctccccgtgccccgccgcctcgctcccgaggtcctcccacgccgcgccccacatccgccggggccgccgcgccgtcgccgtcgcgtgcaccgccaccgagtcccccaagatcctggagctcggggacgccatcgccgggctcacgctcgaggaggcccgcagcctcgtcgaccacctccaggagcggctcggcgtcaccgccgcggccttcgcgccggccgccgtcgtcgcggcgcccggggcgggcggcggggccgcggccgaggaggaggcccccgtcgagaagacggagttcgacgtgatgatcgaagaggtgcccagcagcgcgcgtatcgccactatcaaggtggtgcgcgcgctcaccagcctcgcgctcaaggaggccaaggaccttatcgagggtctccccaagaaggtcaaggaggccgtcagcaaggacgaggccgaggacgccaagaagcagctcgaggaggtcggcgccaaggtgtctatcgcgtgacactaggtatacgaggactcctttttttttttctttagtttcttttgtttgcatccccaatctcttgtatccccactatcgttcgtaaggaattgctgtttcatg

SEQ ID NO: 26910 - protein, 269 aa, Zea mays subsp. mays
  peptide (1)..(269): Ceres Seq. ID no. 13625768
  misc_feature (201)..(269): Pfam Name: Pfam Description:  Ribosomal protein L7/L12 C-terminal domain
  misc_feature (87)..(269): NCBI GI NO: 34912074 NR Description: putative ribosomal protein L12
  misc_feature (87)..(269): NCBI GI NO: 464517 NR Description: 50S RIBOSOMAL PROTEIN L12-1, CHLOROPLAST PRECURSOR
  misc_feature (87)..(269): NCBI GI NO: 464518 NR Description: 50S RIBOSOMAL PROTEIN L12-2, CHLOROPLAST PRECURSOR
  misc_feature (73)..(260): NCBI GI NO: 1345575 NR Description: ribosomal protein L12 [Secale cereale]
  misc_feature (85)..(269): NCBI GI NO: 4176422 NR Description: ribosomal protein L12
  misc_feature (87)..(269): NCBI GI NO: 418872 NR Description: ribosomal protein L12
  misc_feature (87)..(269): NCBI GI NO: 548746 NR Description: 50S RIBOSOMAL PROTEIN L12, CHLOROPLAST PRECURSOR
  misc_feature (87)..(269): NCBI GI NO: 20020 NR Description: ribosomal protein L12-1a [Nicotiana tabacum]
  misc_feature (87)..(269): NCBI GI NO: 133088 NR Description: 50S RIBOSOMAL PROTEIN L12, CHLOROPLAST PRECURSOR
  misc_feature (87)..(268): NCBI GI NO: 133085 NR Description: 50S RIBOSOMAL PROTEIN L12, CHLOROPLAST PRECURSOR
  misc_feature (42)..(42): Xaa is any aa, unknown or other
VGEKEQRDTETERSRGERRQVSGDGSSGRRSGGGGGDEGAGXGRLPRRPPGESSRTHSSSYPPPPPVLPPLLLTSESRRTSSQELAMASTTLSSAFTLLSRPSTSPCPAASLPRSSHAAPHIRRGRRAVAVACTATESPKILELGDAIAGLTLEEARSLVDHLQERLGVTAAAFAPAAVVAAPGAGGGAAAEEEAPVEKTEFDVMIEEVPSSARIATIKVVRALTSLALKEAKDLIEGLPKKVKEAVSKDEAEDAKKQLEEVGAKVSIA

SEQ ID NO: 26911 - protein, 183 aa, Zea mays subsp. mays
  peptide (1)..(183): Ceres Seq. ID no. 13625769
  misc_feature (115)..(183): Pfam Name: Pfam Description:  Ribosomal protein L7/L12 C-terminal domain
  misc_feature (1)..(183): NCBI GI NO: 34912074 NR Description: putative ribosomal protein L12
  misc_feature (1)..(183): NCBI GI NO: 464517 NR Description: 50S RIBOSOMAL PROTEIN L12-1, CHLOROPLAST PRECURSOR
  misc_feature (1)..(183): NCBI GI NO: 464518 NR Description: 50S RIBOSOMAL PROTEIN L12-2, CHLOROPLAST PRECURSOR
  misc_feature (1)..(174): NCBI GI NO: 1345575 NR Description: ribosomal protein L12 [Secale cereale]
  misc_feature (1)..(183): NCBI GI NO: 4176422 NR Description: ribosomal protein L12
  misc_feature (1)..(183): NCBI GI NO: 418872 NR Description: ribosomal protein L12
  misc_feature (1)..(183): NCBI GI NO: 548746 NR Description: 50S RIBOSOMAL PROTEIN L12, CHLOROPLAST PRECURSOR
  misc_feature (1)..(183): NCBI GI NO: 20020 NR Description: ribosomal protein L12-1a [Nicotiana tabacum]
  misc_feature (1)..(183): NCBI GI NO: 133088 NR Description: 50S RIBOSOMAL PROTEIN L12, CHLOROPLAST PRECURSOR
  misc_feature (1)..(182): NCBI GI NO: 133085 NR Description: 50S RIBOSOMAL PROTEIN L12, CHLOROPLAST PRECURSOR
MASTTLSSAFTLLSRPSTSPCPAASLPRSSHAAPHIRRGRRAVAVACTATESPKILELGDAIAGLTLEEARSLVDHLQERLGVTAAAFAPAAVVAAPGAGGGAAAEEEAPVEKTEFDVMIEEVPSSARIATIKVVRALTSLALKEAKDLIEGLPKKVKEAVSKDEAEDAKKQLEEVGAKVSIA

SEQ ID NO: 26912 - DNA, 1220 bp, Zea mays subsp. mays
  misc_feature (1)..(1220): Ceres Seq. ID no. 12376640
aagggggaggggagctttccacttcacggctgatgagtgatgaccctaccagaaatcgacccgatacggctcctgcgccagatcgtccatcaatagcccgaatcacactcatcacaagcctcaaacttttccaaaccaatttagatgcggcgtgagtgctaaagcgctctctggactctgtttcgcagtggccgcagctgcagcgtcctcttccctttttgccatccagcatcacctgtgccgccggcgcgtaattgcaccgcggtcactggttaataggaagaagggaaggaggaggggggagcggtgtgccggggtatcgtcgtgcccatgggcgtgcacgccaggtcgatgagctggtatatggggtcgccggcgccggggagcgccgccgagggcgaggggcagcgcgcgctgagaagcagctccggtggcagcgacggcagcttcgacaccaacatggtcatcatcctcgccgcgctgctgttcgcgctcctcttcgcgatgggcctcaactcgctcgcgcgctgcctcatccgctgggcacgccgcgcgccggccggggaggacggcggcgccggcgggctaaagaagcgcgcgctccggagcatccccgtcgaggtgtacggcgcgtgcggcgccgacggggcggcggctgtcgccgccgacgtctgcgccatctgcctcggcgagttcgcggacggcgagaaggtgcgcgtgctgccgcgctgcgcccacggcttccacgtccgctgcgtcgacacctggctcctgtcgcacgactcctgccccacgtgccggggctccgtgctcgacggcgcaaaggccgccgcctctgctcccgccgccgggggcaaccggcggcagggaagcgaggctgctgccatcgcaattgtcattggatgacgtggacgtgtgggggcccgcgtgcccactggtggtggagccacacggtatgcgagactagcttcgttccgtggtagtgagatattttgctgtgatgagaagccgacgagtcgcggcggcccatctctcagtcaagacacagcatggccttcaggatattatcccttcggtctgtacttgtgcatggtcgtcgcagctgatcctgtttgtgtatactaggagtggatgatgaggtatgccgctataggcttgcaataatacagttttgtttgtacatgttcgatttgacacaattttagagcactgagcagagc

SEQ ID NO: 26913 - protein, 191 aa, Zea mays subsp. mays
  peptide (1)..(191): Ceres Seq. ID no. 12376641
  misc_feature (115)..(156): Pfam Name: RING finger Pfam Description: Zinc finger, C3HC4 type
  misc_feature (1)..(190): NCBI GI NO: 34907826 NR Description: P0485B12.26
  misc_feature (22)..(162): NCBI GI NO: 15241087 NR Description: putative protein; protein id: At5g01880.1
  misc_feature (17)..(184): NCBI GI NO: 15239062 NR Description: RING zinc finger protein-like
  misc_feature (34)..(161): NCBI GI NO: 15228395 NR Description: putative RING zinc finger protein
  misc_feature (34)..(183): NCBI GI NO: 32488364 NR Description: OSJNBb0108J11.16
  misc_feature (41)..(157): NCBI GI NO: 15227839 NR Description: putative RING zinc finger protein
  misc_feature (31)..(168): NCBI GI NO: 9293902 NR Description: contains similarity to RING zinc fingerprotein~gene_id:MVE11
  misc_feature (41)..(161): NCBI GI NO: 7489432 NR Description: probable ring finger protein - barley
  misc_feature (37)..(168): NCBI GI NO: 15222073 NR Description: RING-H2 finger protein RHA3a, putative
  misc_feature (38)..(168): NCBI GI NO: 17016985 NR Description: RING-H2 zinc finger protein [Cucumis melo]
MGVHARSMSWYMGSPAPGSAAEGEGQRALRSSSGGSDGSFDTNMVIILAALLFALLFAMGLNSLARCLIRWARRAPAGEDGGAGGLKKRALRSIPVEVYGACGADGAAAVAADVCAICLGEFADGEKVRVLPRCAHGFHVRCVDTWLLSHDSCPTCRGSVLDGAKAAASAPAAGGNRRQGSEAAAIAIVIG

SEQ ID NO: 26914 - protein, 184 aa, Zea mays subsp. mays
  peptide (1)..(184): Ceres Seq. ID no. 12376642
  misc_feature (108)..(149): Pfam Name: RING finger Pfam Description: Zinc finger, C3HC4 type
  misc_feature (1)..(183): NCBI GI NO: 34907826 NR Description: P0485B12.26
  misc_feature (15)..(155): NCBI GI NO: 15241087 NR Description: putative protein; protein id: At5g01880.1
  misc_feature (10)..(177): NCBI GI NO: 15239062 NR Description: RING zinc finger protein-like
  misc_feature (27)..(154): NCBI GI NO: 15228395 NR Description: putative RING zinc finger protein
  misc_feature (27)..(176): NCBI GI NO: 32488364 NR Description: OSJNBb0108J11.16
  misc_feature (34)..(150): NCBI GI NO: 15227839 NR Description: putative RING zinc finger protein
  misc_feature (24)..(161): NCBI GI NO: 9293902 NR Description: contains similarity to RING zinc fingerprotein~gene_id:MVE11
  misc_feature (34)..(154): NCBI GI NO: 7489432 NR Description: probable ring finger protein - barley
  misc_feature (30)..(161): NCBI GI NO: 15222073 NR Description: RING-H2 finger protein RHA3a, putative
  misc_feature (31)..(161): NCBI GI NO: 17016985 NR Description: RING-H2 zinc finger protein [Cucumis melo]
MSWYMGSPAPGSAAEGEGQRALRSSSGGSDGSFDTNMVIILAALLFALLFAMGLNSLARCLIRWARRAPAGEDGGAGGLKKRALRSIPVEVYGACGADGAAAVAADVCAICLGEFADGEKVRVLPRCAHGFHVRCVDTWLLSHDSCPTCRGSVLDGAKAAASAPAAGGNRRQGSEAAAIAIVIG

SEQ ID NO: 26915 - protein, 180 aa, Zea mays subsp. mays
  peptide (1)..(180): Ceres Seq. ID no. 12376643
  misc_feature (104)..(145): Pfam Name: RING finger Pfam Description: Zinc finger, C3HC4 type
  misc_feature (1)..(179): NCBI GI NO: 34907826 NR Description: P0485B12.26
  misc_feature (11)..(151): NCBI GI NO: 15241087 NR Description: putative protein; protein id: At5g01880.1
  misc_feature (6)..(173): NCBI GI NO: 15239062 NR Description: RING zinc finger protein-like
  misc_feature (23)..(150): NCBI GI NO: 15228395 NR Description: putative RING zinc finger protein
  misc_feature (23)..(172): NCBI GI NO: 32488364 NR Description: OSJNBb0108J11.16
  misc_feature (30)..(146): NCBI GI NO: 15227839 NR Description: putative RING zinc finger protein
  misc_feature (20)..(157): NCBI GI NO: 9293902 NR Description: contains similarity to RING zinc fingerprotein~gene_id:MVE11
  misc_feature (30)..(150): NCBI GI NO: 7489432 NR Description: probable ring finger protein - barley
  misc_feature (26)..(157): NCBI GI NO: 15222073 NR Description: RING-H2 finger protein RHA3a, putative
  misc_feature (27)..(157): NCBI GI NO: 17016985 NR Description: RING-H2 zinc finger protein [Cucumis melo]
MGSPAPGSAAEGEGQRALRSSSGGSDGSFDTNMVIILAALLFALLFAMGLNSLARCLIRWARRAPAGEDGGAGGLKKRALRSIPVEVYGACGADGAAAVAADVCAICLGEFADGEKVRVLPRCAHGFHVRCVDTWLLSHDSCPTCRGSVLDGAKAAASAPAAGGNRRQGSEAAAIAIVIG

SEQ ID NO: 26916 - DNA, 1402 bp, Zea mays subsp. mays
  misc_feature (1)..(1402): Ceres Seq. ID no. 12409656
agaagacagaggccagtcacaaggcgatagcagcaggtggtggcaagatgacggtgctccactctccggttggagttaggagcatcgtgacctccttggtggctttcttcatcctagccagctccatcgtgttcctcctcgacagaggccaggaagagcaagtgcaagtggcagtcgagcatggacgccaagaagtgcaggtgaagctggaatccgggctgcaagaaccggcgataagagggacaacccaagagggggacgccagcaacgaggagtgcaactggtccaggggaaggtgggtgtacgacaacgtgtcccgcccattgtacagcgggctcaagtgctccttcatcttccccgaggtggcctgtgacaagtatggcaggaaggatgccatgtaccagcactggagatggcagcctcatggtcatggatgcgacctcccaagatttgatgccatcaagctgcttgaaaatctgagaaacaagagaatggtgtttgtgggcgactcagtcaacaggaaccaatgggtctctctcgtgtgcatggtggaggcctcaatacctgacgacaggctcaagatacgcaccttcaatggctcactcatctccttcaaggcattggaatacaacgcaacgatagatttctactggtcaccactactggtggaatctaacagcgacaaccccattatccaccgggtggagtaccggatcataagggcagacagaattgagaagcatgccagtgtctggagggatgccgacatcattgtcttcaattcttacctgtggtggaggaagcagaaggatgacatgaggatgaaggtcatgtatggttcattcgaagatggtgatgcaaagttagacgagatggaaatggtcgatggtttcgagatagctctcaagaaactaaccgaatggctgggggagaatattgacaagaacaagactaggatatttttcgcaggatcgtcaccaacacattcctgggctagcaactggggtggagaagacaagaacaagtgccttaacgaaacagagccgatctacaaaaccggatacaaagctgcaactacagactacagcttgatggccaaagctaagcactactttcgaacattggagccgaaaggcatacatgttcagatactgaacatcaccgagctgtctgactaccgcaaggacgggcatcctacggtgtacaggaaacagtttgctcctctgacgaaagagcaaatcgcagacccagccagttacgcggattgcacgcactggtgcctccccggagttccagatgtctggaacgagtttttatatggctacctcgtgcaaaaatgatgtacaaaactgtcagtcaggttcgttttgccccttatatataatgtacaaatggcatactc

SEQ ID NO: 26917 - protein, 445 aa, Zea mays subsp. mays
  peptide (1)..(445): Ceres Seq. ID no. 12409657
  misc_feature (74)..(443): NCBI GI NO: 7487161 NR Description: hypothetical protein At2g38320
  misc_feature (74)..(443): NCBI GI NO: 18404712 NR Description: expressed protein; protein id: At2g38320
  misc_feature (85)..(442): NCBI GI NO: 18413698 NR Description: putative protein; protein id: At5g01620
  misc_feature (85)..(442): NCBI GI NO: 21536676 NR Description: unknown [Arabidopsis thaliana]
  misc_feature (85)..(442): NCBI GI NO: 11291876 NR Description: hypothetical protein F7A7
  misc_feature (85)..(442): NCBI GI NO: 28876013 NR Description: unknown protein
  misc_feature (88)..(442): NCBI GI NO: 28393743 NR Description: unknown protein [Arabidopsis thaliana]
  misc_feature (90)..(442): NCBI GI NO: 15228429 NR Description: unknown protein; protein id: At3g11030.1
  misc_feature (73)..(443): NCBI GI NO: 28876029 NR Description: hypothetical protein
  misc_feature (88)..(442): NCBI GI NO: 15226647 NR Description: hypothetical protein; protein id: At2g40320.1
KTEASHKAIAAGGGKMTVLHSPVGVRSIVTSLVAFFILASSIVFLLDRGQEEQVQVAVEHGRQEVQVKLESGLQEPAIRGTTQEGDASNEECNWSRGRWVYDNVSRPLYSGLKCSFIFPEVACDKYGRKDAMYQHWRWQPHGHGCDLPRFDAIKLLENLRNKRMVFVGDSVNRNQWVSLVCMVEASIPDDRLKIRTFNGSLISFKALEYNATIDFYWSPLLVESNSDNPIIHRVEYRIIRADRIEKHASVWRDADIIVFNSYLWWRKQKDDMRMKVMYGSFEDGDAKLDEMEMVDGFEIALKKLTEWLGENIDKNKTRIFFAGSSPTHSWASNWGGEDKNKCLNETEPIYKTGYKAATTDYSLMAKAKHYFRTLEPKGIHVQILNITELSDYRKDGHPTVYRKQFAPLTKEQIADPASYADCTHWCLPGVPDVWNEFLYGYLVQK

SEQ ID NO: 26918 - protein, 430 aa, Zea mays subsp. mays
  peptide (1)..(430): Ceres Seq. ID no. 12409658
  misc_feature (59)..(428): NCBI GI NO: 7487161 NR Description: hypothetical protein At2g38320
  misc_feature (59)..(428): NCBI GI NO: 18404712 NR Description: expressed protein; protein id: At2g38320
  misc_feature (70)..(427): NCBI GI NO: 18413698 NR Description: putative protein; protein id: At5g01620
  misc_feature (70)..(427): NCBI GI NO: 21536676 NR Description: unknown [Arabidopsis thaliana]
  misc_feature (70)..(427): NCBI GI NO: 11291876 NR Description: hypothetical protein F7A7
  misc_feature (70)..(427): NCBI GI NO: 28876013 NR Description: unknown protein
  misc_feature (73)..(427): NCBI GI NO: 28393743 NR Description: unknown protein [Arabidopsis thaliana]
  misc_feature (75)..(427): NCBI GI NO: 15228429 NR Description: unknown protein; protein id: At3g11030.1
  misc_feature (58)..(428): NCBI GI NO: 28876029 NR Description: hypothetical protein
  misc_feature (73)..(427): NCBI GI NO: 15226647 NR Description: hypothetical protein; protein id: At2g40320.1
MTVLHSPVGVRSIVTSLVAFFILASSIVFLLDRGQEEQVQVAVEHGRQEVQVKLESGLQEPAIRGTTQEGDASNEECNWSRGRWVYDNVSRPLYSGLKCSFIFPEVACDKYGRKDAMYQHWRWQPHGHGCDLPRFDAIKLLENLRNKRMVFVGDSVNRNQWVSLVCMVEASIPDDRLKIRTFNGSLISFKALEYNATIDFYWSPLLVESNSDNPIIHRVEYRIIRADRIEKHASVWRDADIIVFNSYLWWRKQKDDMRMKVMYGSFEDGDAKLDEMEMVDGFEIALKKLTEWLGENIDKNKTRIFFAGSSPTHSWASNWGGEDKNKCLNETEPIYKTGYKAATTDYSLMAKAKHYFRTLEPKGIHVQILNITELSDYRKDGHPTVYRKQFAPLTKEQIADPASYADCTHWCLPGVPDVWNEFLYGYLVQK

SEQ ID NO: 26919 - protein, 314 aa, Zea mays subsp. mays
  peptide (1)..(314): Ceres Seq. ID no. 12409659
  misc_feature (1)..(312): NCBI GI NO: 7487161 NR Description: hypothetical protein At2g38320
  misc_feature (1)..(312): NCBI GI NO: 18404712 NR Description: expressed protein; protein id: At2g38320
  misc_feature (1)..(311): NCBI GI NO: 18413698 NR Description: putative protein; protein id: At5g01620
  misc_feature (1)..(311): NCBI GI NO: 21536676 NR Description: unknown [Arabidopsis thaliana]
  misc_feature (1)..(311): NCBI GI NO: 11291876 NR Description: hypothetical protein F7A7
  misc_feature (1)..(311): NCBI GI NO: 28876013 NR Description: unknown protein
  misc_feature (1)..(311): NCBI GI NO: 28393743 NR Description: unknown protein [Arabidopsis thaliana]
  misc_feature (1)..(311): NCBI GI NO: 15228429 NR Description: unknown protein; protein id: At3g11030.1
  misc_feature (1)..(312): NCBI GI NO: 28876029 NR Description: hypothetical protein
  misc_feature (1)..(311): NCBI GI NO: 15226647 NR Description: hypothetical protein; protein id: At2g40320.1
MYQHWRWQPHGHGCDLPRFDAIKLLENLRNKRMVFVGDSVNRNQWVSLVCMVEASIPDDRLKIRTFNGSLISFKALEYNATIDFYWSPLLVESNSDNPIIHRVEYRIIRADRIEKHASVWRDADIIVFNSYLWWRKQKDDMRMKVMYGSFEDGDAKLDEMEMVDGFEIALKKLTEWLGENIDKNKTRIFFAGSSPTHSWASNWGGEDKNKCLNETEPIYKTGYKAATTDYSLMAKAKHYFRTLEPKGIHVQILNITELSDYRKDGHPTVYRKQFAPLTKEQIADPASYADCTHWCLPGVPDVWNEFLYGYLVQK

SEQ ID NO: 26920 - DNA, 891 bp, Zea mays subsp. mays
  misc_feature (1)..(891): Ceres Seq. ID no. 13498431
aagcctcctccaaattaaaccgccggcgcctccgcttcgcgttctcgcctcatctcctcacgctcaggatccggcggcgaaggtaaggcaagatgtacacagcgaggaagaagatccagaaggataagggccttgagccctccgagttcgaggactccgtcgcccaggctttcttcgacctggagaacggtaaccaggagctcaagagcgacctcaaggacctttacatcaacggtgctatccagctggatgttgccgggagcaggaaggctgttgtgatccacgtcccataccgcttgcgcaaggccttcaggaagatccatgtcaggatcgtcagggagctggagaagaaattcagcggcaaggatgtggtaattgttgccacaaggaggatcgtgaggccgcccaagaagggttcagctgttcagcgccctcgcaccaggactctgactgctgtccatgatggcatcctggaggatgttgtcttcccagctgagattgtggggaagcgtgtcaggtaccgtctggatggtgccaagatcatcaagatcttcttggacccaaaggagaggaacaacaccgaatacaagctggacacctacactacggtctaccgcaggctgtgtgggaaagatgtggtctttgagtaccctatggccgaaaatgcataaatatgacgcccggatatccccattttattttgttgaatctggatgtttctttggggtctcaactagactgctccgtatgtacttcaaaaaccatagttttgatgccaaagttgttgcctaggaatttggtactcgggaattggtagcggacgtgaacaatgttaagttttgagcatttaaatttacctttgtcatgataacatgttgcgagtttttattt

SEQ ID NO: 26921 - protein, 192 aa, Zea mays subsp. mays
  peptide (1)..(192): Ceres Seq. ID no. 13498432
  misc_feature (4)..(190): Pfam Name: Pfam Description:  Ribosomal protein S7e
  misc_feature (1)..(192): NCBI GI NO: 4588906 NR Description: ribosomal protein S7 [Secale cereale]
  misc_feature (1)..(192): NCBI GI NO: 22671664 NR Description: ribosomal protein S7
  misc_feature (1)..(192): NCBI GI NO: 14787424 NR Description: Ribosomal protein S7
  misc_feature (1)..(190): NCBI GI NO: 20139964 NR Description: 40S ribosomal protein S7
  misc_feature (1)..(190): NCBI GI NO: 20139962 NR Description: 40S ribosomal protein S7
  misc_feature (1)..(190): NCBI GI NO: 15221972 NR Description: 40S ribosomal protein S7 (RPS7A)
  misc_feature (1)..(190): NCBI GI NO: 15232926 NR Description: 40S ribosomal protein S7 (RPS7B)
  misc_feature (1)..(188): NCBI GI NO: 15237278 NR Description: 40S ribosomal protein S7 (RPS7C)
  misc_feature (1)..(188): NCBI GI NO: 21592413 NR Description: 40S ribosomal protein S7-like
  misc_feature (1)..(187): NCBI GI NO: 22758886 NR Description: ribosomal protein S7 [Argopecten irradians]
MYTARKKIQKDKGLEPSEFEDSVAQAFFDLENGNQELKSDLKDLYINGAIQLDVAGSRKAVVIHVPYRLRKAFRKIHVRIVRELEKKFSGKDVVIVATRRIVRPPKKGSAVQRPRTRTLTAVHDGILEDVVFPAEIVGKRVRYRLDGAKIIKIFLDPKERNNTEYKLDTYTTVYRRLCGKDVVFEYPMAENA

SEQ ID NO: 26922 - protein, 110 aa, Zea mays subsp. mays
  peptide (1)..(110): Ceres Seq. ID no. 13498433
MMASWRMLSSQLRLWGSVSGTVWMVPRSSRSSWTQRRGTTPNTSWTPTLRSTAGCVGKMWSLSTLWPKMHKYDARISPFYFVESGCFFGVSTRLLRMYFKNHSFDAKVVA

SEQ ID NO: 26923 - protein, 109 aa, Zea mays subsp. mays
  peptide (1)..(109): Ceres Seq. ID no. 13498434
MASWRMLSSQLRLWGSVSGTVWMVPRSSRSSWTQRRGTTPNTSWTPTLRSTAGCVGKMWSLSTLWPKMHKYDARISPFYFVESGCFFGVSTRLLRMYFKNHSFDAKVVA

SEQ ID NO: 26924 - DNA, 1442 bp, Zea mays subsp. mays
  misc_feature (1)..(1442): Ceres Seq. ID no. 12434863
acctttggcttttctggctttatataatcattcgttcaccctttatccatcaccacctaatttcccaacaaatttcaatctccatcgatcgattcctcccgaacccgacccgatggcctccgacgccgccgccgagccctcctccggcgtcacccaccccccgcgctacgtcatcggttacgcgctcgcgccgaagaagcagcagagcttcatccagccgtcgctggtggcccaggcggcgtcgcggggcatggacctcgtccccgtggatgcgtcgcagcccctcgcagagcaagggcccttccacctcctcatccacaagctctacggagacgactggcgcgcccagctcgtggccttcgccgcgcgccacccggccgtccccatcgtcgacccgccccacgccatcgaccgcctccacaaccgcatctccatgctccaggtcgtctccgagctcgaccacgccgccgaccaggacagcactttcggtatccccagccaggtcgtcgtctacgacgccgccgcgctcgccgacttcggactccttgccgcgctccgcttcccgctcatcgccaagcccctcgtcgccgacggcaccgccaagtcccacaagatgtcgctcgtctaccaccgcgagggcctcggcaagctccgcccgccgcttgtgctccaggagttcgtcaaccatggcggcgtcatcttcaaggtctacgtcgtcggcggccacgtcacttgcgtcaagcgccgtagccttcccgacgtgtcccccgaggatgacgcatcggcccagggatccgtctccttctcccaggtctccaacctccccactgagcgcacggcggaggagtactacggcgaaaagagtctcgaggacgccgtcgtgccgcccgccgcattcatcaaccagatcgcgggcggcctccgccgcgcgctgggcctgcaactcttcaacttcgacatgatccgcgacgtccgcgccggcgaccgctatctcgtcattgacatcaactacttcccgggctacgccaagatgccaggatacgagactgtcctcacggatttcttctgggagatggtccatgaggacggcgtgggcaaccaacaggaggagaaaggggccaaccatgttgtcgtgaaataagatgatgattgatggcactggatatctggcgaatgctgctgattctggatgcagaattcgatgaggggatttagttggttgtagtatctggcgaatgctgctggttctggatgcagaatttgatgaggggatttagttggatttcaacccacagcatgccgaggacctcctagctctttccagaccagttgtttaggtatcttttctgggtaagtcagcttcatctagtttagtctgtctgaacaaaagagtgggacatgacccaaacggaattctaatgaaaaatgagctctctatctgc

SEQ ID NO: 26925 - protein, 379 aa, Zea mays subsp. mays
  peptide (1)..(379): Ceres Seq. ID no. 12434864
  misc_feature (55)..(357): Pfam Name: Pfam Description:  Inositol 1, 3, 4-trisphosphate 5/6-kinase
  misc_feature (38)..(379): NCBI GI NO: 27549256 NR Description: inositol phosphate kinase [Zea mays]
  misc_feature (42)..(362): NCBI GI NO: 37537118 NR Description: putative inositol 1,3,4-trisphosphate 5/6-kinase
  misc_feature (55)..(359): NCBI GI NO: 7487924 NR Description: inositol 1,3,4-trisphosphate 5/6-kinase (EC 2
  misc_feature (55)..(359): NCBI GI NO: 15237403 NR Description: Inositol 1,3,4-Trisphosphate 5/6 kinase
  misc_feature (57)..(359): NCBI GI NO: 18413088 NR Description: inositol 1
  misc_feature (31)..(359): NCBI GI NO: 37530372 NR Description: putative inositol 1,3,4-trisphosphate 5/6-kinase
  misc_feature (37)..(354): NCBI GI NO: 27311236 NR Description: Putative inositol 1,3,4-trisphosphate 5/6-kinase
  misc_feature (57)..(340): NCBI GI NO: 7487925 NR Description: inositol 1
  misc_feature (182)..(355): NCBI GI NO: 30689810 NR Description: expressed protein [Arabidopsis thaliana]
  misc_feature (55)..(189): NCBI GI NO: 30689810 NR Description: expressed protein [Arabidopsis thaliana]
PLAFLALYNHSFTLYPSPPNFPTNFNLHRSIPPEPDPMASDAAAEPSSGVTHPPRYVIGYALAPKKQQSFIQPSLVAQAASRGMDLVPVDASQPLAEQGPFHLLIHKLYGDDWRAQLVAFAARHPAVPIVDPPHAIDRLHNRISMLQVVSELDHAADQDSTFGIPSQVVVYDAAALADFGLLAALRFPLIAKPLVADGTAKSHKMSLVYHREGLGKLRPPLVLQEFVNHGGVIFKVYVVGGHVTCVKRRSLPDVSPEDDASAQGSVSFSQVSNLPTERTAEEYYGEKSLEDAVVPPAAFINQIAGGLRRALGLQLFNFDMIRDVRAGDRYLVIDINYFPGYAKMPGYETVLTDFFWEMVHEDGVGNQQEEKGANHVVVK

SEQ ID NO: 26926 - protein, 342 aa, Zea mays subsp. mays
  peptide (1)..(342): Ceres Seq. ID no. 12434865
  misc_feature (18)..(320): Pfam Name: Pfam Description:  Inositol 1, 3, 4-trisphosphate 5/6-kinase
  misc_feature (1)..(342): NCBI GI NO: 27549256 NR Description: inositol phosphate kinase [Zea mays]
  misc_feature (5)..(325): NCBI GI NO: 37537118 NR Description: putative inositol 1,3,4-trisphosphate 5/6-kinase
  misc_feature (18)..(322): NCBI GI NO: 7487924 NR Description: inositol 1,3,4-trisphosphate 5/6-kinase (EC 2
  misc_feature (18)..(322): NCBI GI NO: 15237403 NR Description: Inositol 1,3,4-Trisphosphate 5/6 kinase
  misc_feature (20)..(322): NCBI GI NO: 18413088 NR Description: inositol 1
  misc_feature (1)..(322): NCBI GI NO: 37530372 NR Description: putative inositol 1,3,4-trisphosphate 5/6-kinase
  misc_feature (1)..(317): NCBI GI NO: 27311236 NR Description: Putative inositol 1,3,4-trisphosphate 5/6-kinase
  misc_feature (20)..(303): NCBI GI NO: 7487925 NR Description: inositol 1
  misc_feature (145)..(318): NCBI GI NO: 30689810 NR Description: expressed protein [Arabidopsis thaliana]
  misc_feature (18)..(152): NCBI GI NO: 30689810 NR Description: expressed protein [Arabidopsis thaliana]
MASDAAAEPSSGVTHPPRYVIGYALAPKKQQSFIQPSLVAQAASRGMDLVPVDASQPLAEQGPFHLLIHKLYGDDWRAQLVAFAARHPAVPIVDPPHAIDRLHNRISMLQVVSELDHAADQDSTFGIPSQVVVYDAAALADFGLLAALRFPLIAKPLVADGTAKSHKMSLVYHREGLGKLRPPLVLQEFVNHGGVIFKVYVVGGHVTCVKRRSLPDVSPEDDASAQGSVSFSQVSNLPTERTAEEYYGEKSLEDAVVPPAAFINQIAGGLRRALGLQLFNFDMIRDVRAGDRYLVIDINYFPGYAKMPGYETVLTDFFWEMVHEDGVGNQQEEKGANHVVVK

SEQ ID NO: 26927 - protein, 319 aa, Zea mays subsp. mays
  peptide (1)..(319): Ceres Seq. ID no. 12434866
  misc_feature (34)..(319): Pfam Name: Pfam Description:  Equine herpesvirus glycoprotein gp2
  misc_feature (33)..(319): NCBI GI NO: 13592175 NR Description: ppg3 [Leishmania major]
  misc_feature (45)..(319): NCBI GI NO: 13592175 NR Description: ppg3 [Leishmania major]
  misc_feature (40)..(319): NCBI GI NO: 13592175 NR Description: ppg3 [Leishmania major]
  misc_feature (13)..(319): NCBI GI NO: 13592175 NR Description: ppg3 [Leishmania major]
  misc_feature (40)..(319): NCBI GI NO: 13592175 NR Description: ppg3 [Leishmania major]
  misc_feature (40)..(319): NCBI GI NO: 13592175 NR Description: ppg3 [Leishmania major]
  misc_feature (33)..(283): NCBI GI NO: 11359723 NR Description: proteophosphoglycan, membrane-associated
  misc_feature (13)..(319): NCBI GI NO: 5420387 NR Description: proteophosphoglycan [Leishmania major]
  misc_feature (33)..(319): NCBI GI NO: 23017082 NR Description: hypothetical protein [Thermobifida fusca]
  misc_feature (95)..(319): NCBI GI NO: 5420387 NR Description: proteophosphoglycan [Leishmania major]
LWLFWLYIIIRSPFIHHHLISQQISISIDRFLPNPTRWPPTPPPSPPPASPTPRATSSVTRSRRRSSRASSSRRWWPRRRRGAWTSSPWMRRSPSQSKGPSTSSSTSSTETTGAPSSWPSPRATRPSPSSTRPTPSTASTTASPCSRSSPSSTTPPTRTALSVSPARSSSTTPPRSPTSDSLPRSASRSSPSPSSPTAPPSPTRCRSSTTARASASSARRLCSRSSSTMAASSSRSTSSAATSLASSAVAFPTCPPRMTHRPRDPSPSPRSPTSPLSARRRSTTAKRVSRTPSCRPPHSSTRSRAASAARWACNSSTST

SEQ ID NO: 26928 - DNA, 1400 bp, Zea mays subsp. mays
  misc_feature (1)..(1400): Ceres Seq. ID no. 13501217
  misc_feature (696)..(696): n is a, c, t, g, unknown, or other
  misc_feature (649)..(649): n is a, c, t, g, unknown, or other
  misc_feature (648)..(648): n is a, c, t, g, unknown, or other
gcacgagaccattacctagaacatcctaatcgaaaagaaagactattcccctcaaccctccaaaagaagagaggactgttgaaacttggatgccatggcatacgtccacacgccaccgtaccagtcgagatcaagacggcaataatagacaagaacaaggtgcgtggcagtgcactcgacgatattaatggagctgctttgcacgggcggcagacagccgtagacagagcagtgacggtcgtcgtacacagatcacgatgctgctcccacactcttcgtcagcctctgcaactgctaccactcgtgggctagcactagcagcagcagcagcagcaccgccgcgtccgaccgctcgcccccggcgcgcgcgcctcctgcctccacgcgcgcgggccgagacgcatgcgacgggcgttggcgccgaccgcgcggccgaggcgcttctccaaagcgggctgcgccgtgagtcgctgccgcggcacgtcgcggtggtgatggacgggaactcgcggtgggcgcgcgagcgggggctgacgcccgcggacggccacaaggccggcggccgcaacctggagcgggtcgttgcgctgtcgcgcgcctggggcatccgcgcgctcaccgccttcgtctgctcccgcgagaacttgnnccgccccaaggccgaggtcgactacatgatgggcttgtccgagtggntgataggcgacaacatcgacaagctctcgaggcaggggatccggctgcaggtgatcggcgacgccgcgaagatgccagcctctctgcggagcgcagcggcgcaggccgacgaggccacgaggcacaactcgcagctgcacgtgatgctggccatctgctacagcgggcgatgggacatggtccaggcgtgccgggagctggcccgggaggcgcaggcgaaccggctcagtccggacgacatcgacgagtcggtcatcgccggcaagctcgcgacgagcgccgccggcgagttctcctgtcccgacctggtcatcagaaccagcggcgagatgaggctcagcaacttcttgctgtggcagtcggcgtactcggagttgttcttcaccggcaagatgtggcctgactttggggaggctgagtacctggaagcgttgcgctccttccagggcagagaccgccgcttcggccaatcaaaattactctaacagtctaactcgatggagccacgaagtggagcgccagtatatgtgaagagttatggattgttcggttagctttcattccatttagattaaataagattgaatgaatttaaatcttaagtaagttaaactttttttaaaatttttttaatcccatcaaataaatgagtaacaggattaatggaacaaagtcttaattggaatttgtcctgttttttaaac

SEQ ID NO: 26929 - protein, 307 aa, Zea mays subsp. mays
  peptide (1)..(307): Ceres Seq. ID no. 13501218
  misc_feature (79)..(302): Pfam Name: Pfam Description:  Putative undecaprenyl diphosphate synthase
  misc_feature (24)..(306): NCBI GI NO: 34908428 NR Description: putative undecaprenyl pyrophosphate synthetase
  misc_feature (60)..(305): NCBI GI NO: 15237748 NR Description: dehydrodolichyl diphosphate synthase
  misc_feature (56)..(302): NCBI GI NO: 7447521 NR Description: hypothetical protein At2g23410
  misc_feature (56)..(302): NCBI GI NO: 18400264 NR Description: dehydrodolichyl diphosphate synthase
  misc_feature (70)..(307): NCBI GI NO: 17230924 NR Description: undecaprenyl pyrophosphate synthetase
  misc_feature (63)..(305): NCBI GI NO: 23125792 NR Description: hypothetical protein [Nostoc punctiforme]
  misc_feature (67)..(302): NCBI GI NO: 18424144 NR Description: dehydrodolichyl diphosphate synthase
  misc_feature (67)..(303): NCBI GI NO: 17230487 NR Description: undecaprenyl pyrophosphate synthetase
  misc_feature (63)..(303): NCBI GI NO: 37519677 NR Description: undecaprenyl pyrophosphate synthetase
  misc_feature (69)..(303): NCBI GI NO: 8843800 NR Description: cis-prenyltransferase homolog-like
  misc_feature (131)..(131): Xaa is any aa, unknown or other
  misc_feature (147)..(147): Xaa is any aa, unknown or other
MLLPHSSSASATATTRGLALAAAAAAPPRPTARPRRARLLPPRARAETHATGVGADRAAEALLQSGLRRESLPRHVAVVMDGNSRWARERGLTPADGHKAGGRNLERVVALSRAWGIRALTAFVCSRENLXRPKAEVDYMMGLSEWXIGDNIDKLSRQGIRLQVIGDAAKMPASLRSAAAQADEATRHNSQLHVMLAICYSGRWDMVQACRELAREAQANRLSPDDIDESVIAGKLATSAAGEFSCPDLVIRTSGEMRLSNFLLWQSAYSELFFTGKMWPDFGEAEYLEALRSFQGRDRRFGQSKLL

SEQ ID NO: 26930 - protein, 228 aa, Zea mays subsp. mays
  peptide (1)..(228): Ceres Seq. ID no. 13501219
  misc_feature (1)..(223): Pfam Name: Pfam Description:  Putative undecaprenyl diphosphate synthase
  misc_feature (1)..(227): NCBI GI NO: 34908428 NR Description: putative undecaprenyl pyrophosphate synthetase
  misc_feature (1)..(226): NCBI GI NO: 15237748 NR Description: dehydrodolichyl diphosphate synthase
  misc_feature (1)..(223): NCBI GI NO: 7447521 NR Description: hypothetical protein At2g23410
  misc_feature (1)..(223): NCBI GI NO: 18400264 NR Description: dehydrodolichyl diphosphate synthase
  misc_feature (1)..(228): NCBI GI NO: 17230924 NR Description: undecaprenyl pyrophosphate synthetase
  misc_feature (1)..(226): NCBI GI NO: 23125792 NR Description: hypothetical protein [Nostoc punctiforme]
  misc_feature (1)..(223): NCBI GI NO: 18424144 NR Description: dehydrodolichyl diphosphate synthase
  misc_feature (1)..(224): NCBI GI NO: 17230487 NR Description: undecaprenyl pyrophosphate synthetase
  misc_feature (1)..(224): NCBI GI NO: 37519677 NR Description: undecaprenyl pyrophosphate synthetase
  misc_feature (1)..(224): NCBI GI NO: 8843800 NR Description: cis-prenyltransferase homolog-like
  misc_feature (52)..(52): Xaa is any aa, unknown or other
  misc_feature (68)..(68): Xaa is any aa, unknown or other
MDGNSRWARERGLTPADGHKAGGRNLERVVALSRAWGIRALTAFVCSRENLXRPKAEVDYMMGLSEWXIGDNIDKLSRQGIRLQVIGDAAKMPASLRSAAAQADEATRHNSQLHVMLAICYSGRWDMVQACRELAREAQANRLSPDDIDESVIAGKLATSAAGEFSCPDLVIRTSGEMRLSNFLLWQSAYSELFFTGKMWPDFGEAEYLEALRSFQGRDRRFGQSKLL

SEQ ID NO: 26931 - protein, 168 aa, Zea mays subsp. mays
  peptide (1)..(168): Ceres Seq. ID no. 13501220
  misc_feature (1)..(163): Pfam Name: Pfam Description:  Putative undecaprenyl diphosphate synthase
  misc_feature (1)..(167): NCBI GI NO: 34908428 NR Description: putative undecaprenyl pyrophosphate synthetase
  misc_feature (1)..(166): NCBI GI NO: 15237748 NR Description: dehydrodolichyl diphosphate synthase
  misc_feature (1)..(163): NCBI GI NO: 7447521 NR Description: hypothetical protein At2g23410
  misc_feature (1)..(163): NCBI GI NO: 18400264 NR Description: dehydrodolichyl diphosphate synthase
  misc_feature (1)..(168): NCBI GI NO: 17230924 NR Description: undecaprenyl pyrophosphate synthetase
  misc_feature (1)..(166): NCBI GI NO: 23125792 NR Description: hypothetical protein [Nostoc punctiforme]
  misc_feature (1)..(163): NCBI GI NO: 18424144 NR Description: dehydrodolichyl diphosphate synthase
  misc_feature (1)..(164): NCBI GI NO: 17230487 NR Description: undecaprenyl pyrophosphate synthetase
  misc_feature (1)..(164): NCBI GI NO: 37519677 NR Description: undecaprenyl pyrophosphate synthetase
  misc_feature (1)..(164): NCBI GI NO: 8843800 NR Description: cis-prenyltransferase homolog-like
  misc_feature (8)..(8): Xaa is any aa, unknown or other
MMGLSEWXIGDNIDKLSRQGIRLQVIGDAAKMPASLRSAAAQADEATRHNSQLHVMLAICYSGRWDMVQACRELAREAQANRLSPDDIDESVIAGKLATSAAGEFSCPDLVIRTSGEMRLSNFLLWQSAYSELFFTGKMWPDFGEAEYLEALRSFQGRDRRFGQSKLL

SEQ ID NO: 26932 - DNA, 1668 bp, Zea mays subsp. mays
  misc_feature (1)..(1668): Ceres Seq. ID no. 12406933
attccacgctgcctcggccggcacctacctcccccacttcgccgccggcgggtggagtcgggccggagcagccgctagctcgcctctgttaccccaaaaaagacaaaaaaaataaagagagagtaccaagcaagccgccggcagctcgggcagccatggggcacggcgtcagctgcgctcgcacgggcgacgagcacaactacttccgcgcggcgcaggtcggggacctcgacgccctggacgcgctcctcgccgccgacccctccctcgcccgccgcgccacgctctacgaccgtctctccgcgctgcacatcaccgccgccaatggccacctcgaggtgatgtccatgatcttgaatcacggggtaccgccggacgccgtgaaccggcacaagcagacgccgctgatgctcgcggcgatgcacggcaagatcgactgcgcgcggaagctcctgcaggccggcgccaatatcctgatgttcgactccctgcacgggcggacctgcctgcaccacgcgtcctacttcggccacgtcgactgcctgcgggccatcctcgcggcggcgcggaccacgccggtggccgactcatggggtttcgcccggttcgtcaacgtcagggacgaccgcggcgccacgccgctgcacctcgccgccaggcagggccgccccgcctgcgtgcaggtgctgctggagaacggcgccattgtctccgccctcaccggctcctacgggttccccggcagcacgtcgctgcatctggccgctcgaagcgggaacctggactgcatccggaaactgctcgcctggggcggggatcgtctccagagggactcagcagggaggattccttacgccgtggcgctgaagcgcaaccacggggcgtgcgcggcgctgctgaacccgtcggcggcggagcccatggtgtggccttccccgctcaagttcatcagcgagctggacccggaggcgaaggctctcctggaagcggcactgatggacgccaatagggagagggaggagaagatcctcaagggcatcaccaagtatccgcaggcatcgcctacttcgccttgcgagcacgatgccattgacgaagcgtcctcggaggccagcgacgcggagctgtgctgcatctgcttcgagcaggcgtgcagcatcgaggtgcaggactgcgggcaccagatgtgcgcggcgtgcacgctggcgctgtgctgccacagcaagccgaacccggcgacgctgacgccgccgtcgccggcctgcccgttctgccgcggcagcatctcgaggctgctggtggcccgggcgagccccgacgccgatgacgacaaggccgccgccgccgcctcgtccccgcagctcgtccggcggcgaccgcacaacctcagctgggcggcggcgacggcgtggacaagcccgagcacgacctgtgatcgccatttgatgctgtgcgtggctgagcagacagcagagcacgaccattttaaaagctgaagcaggcattgccactggctttccaagatgagagacatcacatccaagcgtgattatctactacttgtaatgcatcctcttcttctcccccatgtttggtctatttttgggcgtgctaggatgcacctggccggcatgcagctgcgcgatatggttgagctgagcttgagcc

SEQ ID NO: 26933 - protein, 497 aa, Zea mays subsp. mays
  peptide (1)..(497): Ceres Seq. ID no. 12406934
  misc_feature (246)..(278): Pfam Name: Pfam Description:  Ankyrin repeat
  misc_feature (52)..(474): NCBI GI NO: 14279688 NR Description: receptor-like kinase Xa21-binding protein 3
  misc_feature (52)..(451): NCBI GI NO: 34906062 NR Description: putative receptor-like kinase Xa21-binding protein3
  misc_feature (52)..(435): NCBI GI NO: 30684032 NR Description: RING zinc finger ankyrin protein -related
  misc_feature (83)..(435): NCBI GI NO: 25408016 NR Description: probable RING zinc finger ankyrin protein
  misc_feature (52)..(268): NCBI GI NO: 16226319 NR Description: At2g28840/F8N16.13 [Arabidopsis thaliana]
  misc_feature (331)..(474): NCBI GI NO: 25044835 NR Description: RING zinc finger protein [Ananas comosus]
  misc_feature (52)..(258): NCBI GI NO: 15240746 NR Description: putative protein; protein id: At5g07270.1
  misc_feature (365)..(429): NCBI GI NO: 15240746 NR Description: putative protein; protein id: At5g07270.1
  misc_feature (307)..(388): NCBI GI NO: 37535186 NR Description: hypothetical protein
  misc_feature (52)..(227): NCBI GI NO: 34898056 NR Description: Similar to mouse ankyrin 3 (AC005727)
STLPRPAPTSPTSPPAGGVGPEQPLARLCYPKKDKKNKERVPSKPPAARAAMGHGVSCARTGDEHNYFRAAQVGDLDALDALLAADPSLARRATLYDRLSALHITAANGHLEVMSMILNHGVPPDAVNRHKQTPLMLAAMHGKIDCARKLLQAGANILMFDSLHGRTCLHHASYFGHVDCLRAILAAARTTPVADSWGFARFVNVRDDRGATPLHLAARQGRPACVQVLLENGAIVSALTGSYGFPGSTSLHLAARSGNLDCIRKLLAWGGDRLQRDSAGRIPYAVALKRNHGACAALLNPSAAEPMVWPSPLKFISELDPEAKALLEAALMDANREREEKILKGITKYPQASPTSPCEHDAIDEASSEASDAELCCICFEQACSIEVQDCGHQMCAACTLALCCHSKPNPATLTPPSPACPFCRGSISRLLVARASPDADDDKAAAAASSPQLVRRRPHNLSWAAATAWTSPSTTCDRHLMLCVAEQTAEHDHFKS

SEQ ID NO: 26934 - protein, 446 aa, Zea mays subsp. mays
  peptide (1)..(446): Ceres Seq. ID no. 12406935
  misc_feature (195)..(227): Pfam Name: Pfam Description:  Ankyrin repeat
  misc_feature (1)..(423): NCBI GI NO: 14279688 NR Description: receptor-like kinase Xa21-binding protein 3
  misc_feature (1)..(400): NCBI GI NO: 34906062 NR Description: putative receptor-like kinase Xa21-binding protein3
  misc_feature (1)..(384): NCBI GI NO: 30684032 NR Description: RING zinc finger ankyrin protein -related
  misc_feature (32)..(384): NCBI GI NO: 25408016 NR Description: probable RING zinc finger ankyrin protein
  misc_feature (1)..(217): NCBI GI NO: 16226319 NR Description: At2g28840/F8N16.13 [Arabidopsis thaliana]
  misc_feature (280)..(423): NCBI GI NO: 25044835 NR Description: RING zinc finger protein [Ananas comosus]
  misc_feature (1)..(207): NCBI GI NO: 15240746 NR Description: putative protein; protein id: At5g07270.1
  misc_feature (314)..(378): NCBI GI NO: 15240746 NR Description: putative protein; protein id: At5g07270.1
  misc_feature (256)..(337): NCBI GI NO: 37535186 NR Description: hypothetical protein
  misc_feature (1)..(176): NCBI GI NO: 34898056 NR Description: Similar to mouse ankyrin 3 (AC005727)
MGHGVSCARTGDEHNYFRAAQVGDLDALDALLAADPSLARRATLYDRLSALHITAANGHLEVMSMILNHGVPPDAVNRHKQTPLMLAAMHGKIDCARKLLQAGANILMFDSLHGRTCLHHASYFGHVDCLRAILAAARTTPVADSWGFARFVNVRDDRGATPLHLAARQGRPACVQVLLENGAIVSALTGSYGFPGSTSLHLAARSGNLDCIRKLLAWGGDRLQRDSAGRIPYAVALKRNHGACAALLNPSAAEPMVWPSPLKFISELDPEAKALLEAALMDANREREEKILKGITKYPQASPTSPCEHDAIDEASSEASDAELCCICFEQACSIEVQDCGHQMCAACTLALCCHSKPNPATLTPPSPACPFCRGSISRLLVARASPDADDDKAAAAASSPQLVRRRPHNLSWAAATAWTSPSTTCDRHLMLCVAEQTAEHDHFKS

SEQ ID NO: 26935 - protein, 384 aa, Zea mays subsp. mays
  peptide (1)..(384): Ceres Seq. ID no. 12406936
  misc_feature (133)..(165): Pfam Name: Pfam Description:  Ankyrin repeat
  misc_feature (1)..(361): NCBI GI NO: 14279688 NR Description: receptor-like kinase Xa21-binding protein 3
  misc_feature (1)..(338): NCBI GI NO: 34906062 NR Description: putative receptor-like kinase Xa21-binding protein3
  misc_feature (1)..(322): NCBI GI NO: 30684032 NR Description: RING zinc finger ankyrin protein -related
  misc_feature (1)..(322): NCBI GI NO: 25408016 NR Description: probable RING zinc finger ankyrin protein
  misc_feature (1)..(155): NCBI GI NO: 16226319 NR Description: At2g28840/F8N16.13 [Arabidopsis thaliana]
  misc_feature (218)..(361): NCBI GI NO: 25044835 NR Description: RING zinc finger protein [Ananas comosus]
  misc_feature (1)..(145): NCBI GI NO: 15240746 NR Description: putative protein; protein id: At5g07270.1
  misc_feature (252)..(316): NCBI GI NO: 15240746 NR Description: putative protein; protein id: At5g07270.1
  misc_feature (194)..(275): NCBI GI NO: 37535186 NR Description: hypothetical protein
  misc_feature (1)..(114): NCBI GI NO: 34898056 NR Description: Similar to mouse ankyrin 3 (AC005727)
MSMILNHGVPPDAVNRHKQTPLMLAAMHGKIDCARKLLQAGANILMFDSLHGRTCLHHASYFGHVDCLRAILAAARTTPVADSWGFARFVNVRDDRGATPLHLAARQGRPACVQVLLENGAIVSALTGSYGFPGSTSLHLAARSGNLDCIRKLLAWGGDRLQRDSAGRIPYAVALKRNHGACAALLNPSAAEPMVWPSPLKFISELDPEAKALLEAALMDANREREEKILKGITKYPQASPTSPCEHDAIDEASSEASDAELCCICFEQACSIEVQDCGHQMCAACTLALCCHSKPNPATLTPPSPACPFCRGSISRLLVARASPDADDDKAAAAASSPQLVRRRPHNLSWAAATAWTSPSTTCDRHLMLCVAEQTAEHDHFKS

SEQ ID NO: 26936 - DNA, 1202 bp, Zea mays subsp. mays
  misc_feature (1)..(1202): Ceres Seq. ID no. 12356239
atcctttgctggcacgaccaaaaacttctcttcatccaatctgcaactccctcccgcaccaaaccttacccaggactaggaggaggaaagaaatggaggaataaagcagagtgagaagagaagaggaagcgaggcctctgctccagctcctatacaggagcgagcgacccagacgcctctgcttcggtgcttcccagtgccagtagtcgccaatccgcccaggtctcatgcttcggtccacgcacccacccagccccagcagcggcagctccgacgccacgatggtcgggggcggcgccccgagcggcgccaagctgctgcagatcctcaacgtgcgggtggtgggcagcggcgaccgcgtggtggtgctgtcccacgggttcggcacggaccagtcggcgtggagccgcgtgctcccctacctcacccgcgaccaccgcgtggtgctctacgacctcgtctgcgccggcagcgtcaacccggagcacttcgacttccgccgctacgacacgctggactcgtacgtcgacgacctgctcgccatcctcgacgcgctccgcgtctcgcgctgcgccttcgtcgggcactccgtgtccgccatgatcggcatcctcgcctccatccgccgccccgagctcttcgccaaggctcgtcctcatcggcgcgtcgcccaggttcctgaacgaccacgactaccacggcgggttcgagctgccggagatccagcaggtgttcgacgcgatggcggccaactactcggcgtgggcgaccgggtacgccccgctggcggttggcgcggacgtgcccgcggcggtgcaggagttcagccgcacgctcttcaacatgcggccggacatctcgctccacgtctgccgcaccgtgttcaacacggacctccgcggcgtgctgggcatggtgcgcgccccctgcgtggtggtgcagaccacccgcgacgtctccgtcccggcctccgtcgccgcctacctcaaggcccacctcggcggccgcaccgccgtcgagttcctccagaccgagggccacctcccgcacctcagcgcccccggcctcctcgcccaggtgctccgccgcgcgctcgcccggtactagcagccgggccggccaggcctgtttttaccgcctcgatttacccctgccgagaccgagaatcaagaaatggcgcgactcgcgccgtttgctgtgtc

SEQ ID NO: 26937 - protein, 325 aa, Zea mays subsp. mays
  peptide (1)..(325): Ceres Seq. ID no. 12356240
  misc_feature (70)..(140): Pfam Name: Pfam Description:  alpha/beta hydrolase fold
  misc_feature (30)..(140): NCBI GI NO: 21593927 NR Description: unknown [Arabidopsis thaliana]
  misc_feature (30)..(140): NCBI GI NO: 18396732 NR Description: expressed protein; protein id: At3g03990
  misc_feature (35)..(140): NCBI GI NO: 15235567 NR Description: putative protein; protein id: At4g37470
  misc_feature (35)..(140): NCBI GI NO: 40736991 NR Description: putative hydrolases
  misc_feature (35)..(140): NCBI GI NO: 24216360 NR Description: Predicted hydrolases or acyltransferases
  misc_feature (30)..(138): NCBI GI NO: 15230110 NR Description: unknown protein; protein id: At3g24420.1
  misc_feature (34)..(138): NCBI GI NO: 34912326 NR Description: P0451D05.26
  misc_feature (36)..(140): NCBI GI NO: 22298700 NR Description: ORF_ID:tlr1157~hypothetical protein
  misc_feature (35)..(139): NCBI GI NO: 16080463 NR Description: similar to hydrolase [Bacillus subtilis]
  misc_feature (35)..(151): NCBI GI NO: 22987307 NR Description: hypothetical protein [Burkholderia fungorum]
MLRSTHPPSPSSGSSDATMVGGGAPSGAKLLQILNVRVVGSGDRVVVLSHGFGTDQSAWSRVLPYLTRDHRVVLYDLVCAGSVNPEHFDFRRYDTLDSYVDDLLAILDALRVSRCAFVGHSVSAMIGILASIRRPELFAKARPHRRVAQVPERPRLPRRVRAAGDPAGVRRDGGQLLGVGDRVRPAGGWRGRARGGAGVQPHALQHAAGHLAPRLPHRVQHGPPRRAGHGARPLRGGADHPRRLRPGLRRRLPQGPPRRPHRRRVPPDRGPPPAPQRPRPPRPGAPPRARPVLAAGPARPVFTASIYPCRDRESRNGATRAVCCV

SEQ ID NO: 26938 - protein, 307 aa, Zea mays subsp. mays
  peptide (1)..(307): Ceres Seq. ID no. 12356241
  misc_feature (52)..(122): Pfam Name: Pfam Description:  alpha/beta hydrolase fold
  misc_feature (12)..(122): NCBI GI NO: 21593927 NR Description: unknown [Arabidopsis thaliana]
  misc_feature (12)..(122): NCBI GI NO: 18396732 NR Description: expressed protein; protein id: At3g03990
  misc_feature (17)..(122): NCBI GI NO: 15235567 NR Description: putative protein; protein id: At4g37470
  misc_feature (17)..(122): NCBI GI NO: 40736991 NR Description: putative hydrolases
  misc_feature (17)..(122): NCBI GI NO: 24216360 NR Description: Predicted hydrolases or acyltransferases
  misc_feature (12)..(120): NCBI GI NO: 15230110 NR Description: unknown protein; protein id: At3g24420.1
  misc_feature (16)..(120): NCBI GI NO: 34912326 NR Description: P0451D05.26
  misc_feature (18)..(122): NCBI GI NO: 22298700 NR Description: ORF_ID:tlr1157~hypothetical protein
  misc_feature (17)..(121): NCBI GI NO: 16080463 NR Description: similar to hydrolase [Bacillus subtilis]
  misc_feature (17)..(133): NCBI GI NO: 22987307 NR Description: hypothetical protein [Burkholderia fungorum]
MVGGGAPSGAKLLQILNVRVVGSGDRVVVLSHGFGTDQSAWSRVLPYLTRDHRVVLYDLVCAGSVNPEHFDFRRYDTLDSYVDDLLAILDALRVSRCAFVGHSVSAMIGILASIRRPELFAKARPHRRVAQVPERPRLPRRVRAAGDPAGVRRDGGQLLGVGDRVRPAGGWRGRARGGAGVQPHALQHAAGHLAPRLPHRVQHGPPRRAGHGARPLRGGADHPRRLRPGLRRRLPQGPPRRPHRRRVPPDRGPPPAPQRPRPPRPGAPPRARPVLAAGPARPVFTASIYPCRDRESRNGATRAVCCV

SEQ ID NO: 26939 - protein, 201 aa, Zea mays subsp. mays
  peptide (1)..(201): Ceres Seq. ID no. 12356242
  misc_feature (140)..(190): Pfam Name: Pfam Description:  Glycoprotein GG/GX
  misc_feature (1)..(16): NCBI GI NO: 21593927 NR Description: unknown [Arabidopsis thaliana]
  misc_feature (1)..(16): NCBI GI NO: 18396732 NR Description: expressed protein; protein id: At3g03990
  misc_feature (1)..(16): NCBI GI NO: 15235567 NR Description: putative protein; protein id: At4g37470
  misc_feature (1)..(16): NCBI GI NO: 40736991 NR Description: putative hydrolases
  misc_feature (1)..(16): NCBI GI NO: 24216360 NR Description: Predicted hydrolases or acyltransferases
  misc_feature (1)..(14): NCBI GI NO: 15230110 NR Description: unknown protein; protein id: At3g24420.1
  misc_feature (1)..(14): NCBI GI NO: 34912326 NR Description: P0451D05.26
  misc_feature (1)..(16): NCBI GI NO: 22298700 NR Description: ORF_ID:tlr1157~hypothetical protein
  misc_feature (1)..(15): NCBI GI NO: 16080463 NR Description: similar to hydrolase [Bacillus subtilis]
  misc_feature (1)..(27): NCBI GI NO: 22987307 NR Description: hypothetical protein [Burkholderia fungorum]
MIGILASIRRPELFAKARPHRRVAQVPERPRLPRRVRAAGDPAGVRRDGGQLLGVGDRVRPAGGWRGRARGGAGVQPHALQHAAGHLAPRLPHRVQHGPPRRAGHGARPLRGGADHPRRLRPGLRRRLPQGPPRRPHRRRVPPDRGPPPAPQRPRPPRPGAPPRARPVLAAGPARPVFTASIYPCRDRESRNGATRAVCCV

SEQ ID NO: 26940 - DNA, 1227 bp, Zea mays subsp. mays
  misc_feature (1)..(1227): Ceres Seq. ID no. 12409649
actacctcaggctgcttgaagtagtatgcatcagcggccctggtcctctctcccgctcccgctcaagggcagcagagaaagcagctgagcgctgactgtggatctcatccgtatcgcgtatatacgtcgtcctgtttggatccaccgcgttttgctaattcccttcgaaccggccggtggccttcgttctcccaccaggcctgtctgtctgctgtatccgccagagcttccatggattccaccctcttcatcatcggcgtcataggcaacatcatctcagttctcgtcttcatatcgcctatcaagacgttctggaggatcgtgcggggcgggacgacggaggagttcgagccggcgccgtacgtgttgacgctgctcaacgcgctgctgtggctctactacggcctcaccaagcccgacggcttcctcgtcgccaccgtcaatggctttggggctgtcatggaggccatctacgtcgtcctcttcatcgtctacgccgccaaccatgccacaagggttaagaccgcaaagctggcagcagcgttggacatcggtggcttcggagtcgtgtttgcggccaccacattcgccatcagtgaatttgaattgagaattatggtgataggaatgatatgtgcctgcctcaatgtgctcatgtacgggtcaccccttgcttctatgaaaacggtgatcacgacaaagagcgtggagttcatgccattcttcctgtccttcttcctcttcctcaacggaggcgtctgggcaacgtacgcggtgcttgaccgcgacatcttcctcgggatccccaatgggataggcttcgtgcttggcaccatccagctgatcgtctacgcgatctacatgaacagcaaggcctcccaatgcagcaaggaaacagcgtcctcgcctcttctgatggcctccgaccggggagaagcatctagccatgtctgatgatgagcttcgatcagtgcgcgcgctggagtatagcatagaagtctcttgctgtcaaaaacttcccagaccaacggtacctaccagcatgcatgcatgcaagaggttaccaatttttattgtttgaaaattcatgtaaaacttgtgacctccatggattgtttctttctttggtataagcttccaagatgttagattattagcacgatagttttgccagagaaggatgttgtcaatataatgaagaaatggtgaaaatccatacctttgatt

SEQ ID NO: 26941 - protein, 240 aa, Zea mays subsp. mays
  peptide (1)..(240): Ceres Seq. ID no. 12409650
  misc_feature (130)..(212): Pfam Name: Pfam Description:  MtN3/saliva family
  misc_feature (1)..(214): NCBI GI NO: 27754697 NR Description: putative cytochrome c oxidoreductase
  misc_feature (1)..(214): NCBI GI NO: 30683457 NR Description: nodulin MtN3 family protein [Arabidopsis thaliana]
  misc_feature (6)..(214): NCBI GI NO: 30684193 NR Description: nodulin MtN3 family protein [Arabidopsis thaliana]
  misc_feature (1)..(221): NCBI GI NO: 1619602 NR Description: MtN3 [Medicago truncatula]
  misc_feature (6)..(239): NCBI GI NO: 15240040 NR Description: senescence-associated protein
  misc_feature (6)..(239): NCBI GI NO: 21593422 NR Description: senescence-associated protein (SAG29)
  misc_feature (2)..(213): NCBI GI NO: 14715258 NR Description: N3 like protein [Medicago truncatula]
  misc_feature (6)..(214): NCBI GI NO: 15237803 NR Description: MtN3-like protein; protein id: At5g23660
  misc_feature (1)..(238): NCBI GI NO: 34912462 NR Description: MtN3-like protein
  misc_feature (7)..(221): NCBI GI NO: 18413388 NR Description: putative protein; protein id: At4g10850
MDSTLFIIGVIGNIISVLVFISPIKTFWRIVRGGTTEEFEPAPYVLTLLNALLWLYYGLTKPDGFLVATVNGFGAVMEAIYVVLFIVYAANHATRVKTAKLAAALDIGGFGVVFAATTFAISEFELRIMVIGMICACLNVLMYGSPLASMKTVITTKSVEFMPFFLSFFLFLNGGVWATYAVLDRDIFLGIPNGIGFVLGTIQLIVYAIYMNSKASQCSKETASSPLLMASDRGEASSHV

SEQ ID NO: 26942 - protein, 164 aa, Zea mays subsp. mays
  peptide (1)..(164): Ceres Seq. ID no. 12409651
  misc_feature (54)..(136): Pfam Name: Pfam Description:  MtN3/saliva family
  misc_feature (1)..(138): NCBI GI NO: 27754697 NR Description: putative cytochrome c oxidoreductase
  misc_feature (1)..(138): NCBI GI NO: 30683457 NR Description: nodulin MtN3 family protein [Arabidopsis thaliana]
  misc_feature (1)..(138): NCBI GI NO: 30684193 NR Description: nodulin MtN3 family protein [Arabidopsis thaliana]
  misc_feature (1)..(145): NCBI GI NO: 1619602 NR Description: MtN3 [Medicago truncatula]
  misc_feature (1)..(163): NCBI GI NO: 15240040 NR Description: senescence-associated protein
  misc_feature (1)..(163): NCBI GI NO: 21593422 NR Description: senescence-associated protein (SAG29)
  misc_feature (1)..(137): NCBI GI NO: 14715258 NR Description: N3 like protein [Medicago truncatula]
  misc_feature (1)..(138): NCBI GI NO: 15237803 NR Description: MtN3-like protein; protein id: At5g23660
  misc_feature (1)..(162): NCBI GI NO: 34912462 NR Description: MtN3-like protein
  misc_feature (1)..(145): NCBI GI NO: 18413388 NR Description: putative protein; protein id: At4g10850
MEAIYVVLFIVYAANHATRVKTAKLAAALDIGGFGVVFAATTFAISEFELRIMVIGMICACLNVLMYGSPLASMKTVITTKSVEFMPFFLSFFLFLNGGVWATYAVLDRDIFLGIPNGIGFVLGTIQLIVYAIYMNSKASQCSKETASSPLLMASDRGEASSHV

SEQ ID NO: 26943 - DNA, 1718 bp, Zea mays subsp. mays
  misc_feature (1)..(1718): Ceres Seq. ID no. 12409645
attcagcagcaccggcggcaccccgcagtcccggcgtcccgcacccacgccctacaggcagaccaagcaaatggcgatctcgatctcgcaggaggccttcgactccatggtccgggagaacatggaggacctcggcatggaccccgatgaggccctcgctgacgccgttgaggcgctcaccctccagggcgccgatctctcaggtatcgttaagcgcgtgccgggagaggccaccgcggcggaggtgagcccggtggtgcgggttctggacgaactgaaggcctctctcagcgccagcggcggggtcggagcaggatctcgacggactcgtctctctgttcgatgagttgcgcaatctgtgctgctccggcgagggttcggagaatgcagcgatcgcggtacggaatggcgtcgtggaggcgctcgtcgccctgtgcgcgtccgctcgggtcgagcaggagaggttgcttgcttcggccttgaagagtctgagctccgtactccgtgatgtggcaagcactgaaaagttcagacgaagtgagggacccaaaattgtcatggatctcttgcaaggaggctcagaaaattcagatttattggatgctggatttagtgttgtggcagcaggttctgctggcaatgaagttgtgaaagagtcctttatggacctgaaggtcgatgaactcattctgcgggttatgaaggataaatcaaaatctaatgtgcaaagtttgtatgatgccatacgtgttctgttgaaacctgatgacaaccgagtggtagcttctcaggtatatggatactcccggagatttgctgaaatcggggttgcagaagttcttgtcaatgcacttcgtgagcaagtcgctccttccagtttgccatctgcttgtgctgctttaaagtcgattgcagtcaatgatgaaatatgccgttccatatctgaaaatggtggaattgatgtgcttcttcaatgcatcgacgaggcaggtgagcagaagaacaaagttgtagcaagatcttgctgctctttgttgtccaagcttgctgcaagcgatgcaaacaagtccattatcattcagcgaggtggttttgataggttcctaaagttgacatccagattttctgaagatcctgctataattcaagaggttatgtctatggtgacggtcctcacactgaggtcaccagaaaatgcagcacgtgcaatggaagaaggctatgggacactggctatacagtcaatgcaaaggttcccctcctccgggcagactcagaagcaagcatgccttatgattcgcaatcttgttgcccgaaaccctgagaacaggaccgtcctgcttaatgatggtgcagaaaagcttattagaaaggccatggccctgcacggaagctgtaaagatgctgcctcgtctgccttgagggacctgggcctcgacaactacaatgcatagacaccagtgaccagtcacaccatagaaagtgtgcgtcgagttagtttggtcgcggtagaatgttttggaggagaaatacattgtgagttatcgaggtgccgcactgaaatgagtttgtagaattgcgctactgtggttgcatcaatggtttcagtttgttgggcaatcaaacttcagggctattaggttgtctccggtaaatcttacatatgatcatacaatttttttttacagagtgaagtttaaaataggaaatgtttcaag

SEQ ID NO: 26944 - protein, 298 aa, Zea mays subsp. mays
  peptide (1)..(298): Ceres Seq. ID no. 12409646
  misc_feature (1)..(297): NCBI GI NO: 18418335 NR Description: putative protein; protein id: At4g33945
  misc_feature (1)..(297): NCBI GI NO: 7485612 NR Description: hypothetical protein F17I5
  misc_feature (1)..(292): NCBI GI NO: 29789345 NR Description: arginine/serine-rich 14 splicing factor
  misc_feature (1)..(292): NCBI GI NO: 26348633 NR Description: unnamed protein product [Mus musculus]
  misc_feature (1)..(292): NCBI GI NO: 26340074 NR Description: unnamed protein product [Mus musculus]
  misc_feature (1)..(292): NCBI GI NO: 34877647 NR Description: similar to hypothetical gene MGC19595
  misc_feature (1)..(292): NCBI GI NO: 15529984 NR Description: hypothetical gene MGC19595 [Homo sapiens]
  misc_feature (1)..(292): NCBI GI NO: 4106984 NR Description: R30923_1 [Homo sapiens]
  misc_feature (62)..(292): NCBI GI NO: 13543170 NR Description: Unknown (protein for IMAGE:3601378) [Mus musculus]
  misc_feature (62)..(292): NCBI GI NO: 20988329 NR Description: Unknown (protein for IMAGE:1364175) [Mus musculus]
MDLLQGGSENSDLLDAGFSVVAAGSAGNEVVKESFMDLKVDELILRVMKDKSKSNVQSLYDAIRVLLKPDDNRVVASQVYGYSRRFAEIGVAEVLVNALREQVAPSSLPSACAALKSIAVNDEICRSISENGGIDVLLQCIDEAGEQKNKVVARSCCSLLSKLAASDANKSIIIQRGGFDRFLKLTSRFSEDPAIIQEVMSMVTVLTLRSPENAARAMEEGYGTLAIQSMQRFPSSGQTQKQACLMIRNLVARNPENRTVLLNDGAEKLIRKAMALHGSCKDAASSALRDLGLDNYNA

SEQ ID NO: 26945 - protein, 263 aa, Zea mays subsp. mays
  peptide (1)..(263): Ceres Seq. ID no. 12409647
  misc_feature (1)..(262): NCBI GI NO: 18418335 NR Description: putative protein; protein id: At4g33945
  misc_feature (1)..(262): NCBI GI NO: 7485612 NR Description: hypothetical protein F17I5
  misc_feature (1)..(257): NCBI GI NO: 29789345 NR Description: arginine/serine-rich 14 splicing factor
  misc_feature (1)..(257): NCBI GI NO: 26348633 NR Description: unnamed protein product [Mus musculus]
  misc_feature (1)..(257): NCBI GI NO: 26340074 NR Description: unnamed protein product [Mus musculus]
  misc_feature (1)..(257): NCBI GI NO: 34877647 NR Description: similar to hypothetical gene MGC19595
  misc_feature (1)..(257): NCBI GI NO: 15529984 NR Description: hypothetical gene MGC19595 [Homo sapiens]
  misc_feature (1)..(257): NCBI GI NO: 4106984 NR Description: R30923_1 [Homo sapiens]
  misc_feature (27)..(257): NCBI GI NO: 13543170 NR Description: Unknown (protein for IMAGE:3601378) [Mus musculus]
  misc_feature (27)..(257): NCBI GI NO: 20988329 NR Description: Unknown (protein for IMAGE:1364175) [Mus musculus]
MDLKVDELILRVMKDKSKSNVQSLYDAIRVLLKPDDNRVVASQVYGYSRRFAEIGVAEVLVNALREQVAPSSLPSACAALKSIAVNDEICRSISENGGIDVLLQCIDEAGEQKNKVVARSCCSLLSKLAASDANKSIIIQRGGFDRFLKLTSRFSEDPAIIQEVMSMVTVLTLRSPENAARAMEEGYGTLAIQSMQRFPSSGQTQKQACLMIRNLVARNPENRTVLLNDGAEKLIRKAMALHGSCKDAASSALRDLGLDNYNA

SEQ ID NO: 26946 - protein, 251 aa, Zea mays subsp. mays
  peptide (1)..(251): Ceres Seq. ID no. 12409648
  misc_feature (1)..(250): NCBI GI NO: 18418335 NR Description: putative protein; protein id: At4g33945
  misc_feature (1)..(250): NCBI GI NO: 7485612 NR Description: hypothetical protein F17I5
  misc_feature (1)..(245): NCBI GI NO: 29789345 NR Description: arginine/serine-rich 14 splicing factor
  misc_feature (1)..(245): NCBI GI NO: 26348633 NR Description: unnamed protein product [Mus musculus]
  misc_feature (1)..(245): NCBI GI NO: 26340074 NR Description: unnamed protein product [Mus musculus]
  misc_feature (1)..(245): NCBI GI NO: 34877647 NR Description: similar to hypothetical gene MGC19595
  misc_feature (1)..(245): NCBI GI NO: 15529984 NR Description: hypothetical gene MGC19595 [Homo sapiens]
  misc_feature (1)..(245): NCBI GI NO: 4106984 NR Description: R30923_1 [Homo sapiens]
  misc_feature (15)..(245): NCBI GI NO: 13543170 NR Description: Unknown (protein for IMAGE:3601378) [Mus musculus]
  misc_feature (15)..(245): NCBI GI NO: 20988329 NR Description: Unknown (protein for IMAGE:1364175) [Mus musculus]
MKDKSKSNVQSLYDAIRVLLKPDDNRVVASQVYGYSRRFAEIGVAEVLVNALREQVAPSSLPSACAALKSIAVNDEICRSISENGGIDVLLQCIDEAGEQKNKVVARSCCSLLSKLAASDANKSIIIQRGGFDRFLKLTSRFSEDPAIIQEVMSMVTVLTLRSPENAARAMEEGYGTLAIQSMQRFPSSGQTQKQACLMIRNLVARNPENRTVLLNDGAEKLIRKAMALHGSCKDAASSALRDLGLDNYNA

SEQ ID NO: 26947 - DNA, 1636 bp, Zea mays subsp. mays
  misc_feature (1)..(1636): Ceres Seq. ID no. 13498765
acacatttttacccctcgcggcggccccaccgaccgccggggcgcagcggcgtcgccgcgggcaacgccgtcacgtcacgtgcatcacgacaatctcctcctccgcctcgtcttcctgccaggccgcgggagcaccagcccagcggcagatcagtcgacgcgggcgattccagggtttagagaggagcggagatggtgaaggtcatccaggggcgcccggccgagatggggttccggatgccggcggagtgggagccgcacgagcagtgctggatgggatggcctgagcgtccagataactggagggagaatgctggtccagctcaagaggtatttgctagaactgcaattgccatttcaaagtttgaacccgtcacgttatgtgcaagtgccaagcagtaccccaaagtccacgagctgatggaacatgaaaccaacatcagggtcgttgagatgagcatgaacgattcctggttccgcgacatgggccccacttttgtcactcataaaggggattcaggaattgcagaacaaacaatagcaggaattgattggcaattcaatgcctggggaggaatctatgacgactggagtcttgacagcgatgttgccaagaaaatagtcgagatcgagaggatccctaggtttccccaaaaaattatccttgagggtggaagcattcatgtagatggagaaggtacatgcattacaacggaagaatgcttgctgaatcctaataggaaccccaacatgaccaaactagagatagagaatgagctgaaggattttcttggagtctcgaaggtcatctggatacctcgtggactttatggtgacgaggatacaaacggccacgttgacaacctgtgctgcttcatcaaacccggtgtgatcctgctgtcgtggaccgacgacgagaaggaccatcagtacgaacggtcggtcgaggcgctgtctgttctctcccagtccgtcgacgcgaaagggcggcagctccaagtggtgaagatccacgtccccgggcctctgtacatgacagaggaagaggcacagggcgttgtttcatcggggcattctgtaccgaggccagcgggcacgaggttggccgcctcgtacgtcaacttctacatcgccaatggggggatcatagcgccttccttcggtgacaggtgggacgaggaggcgtatgcggttctccagaaggcgtttcctgatcacgaggtggtgatggtcgaaggcggacgggagatcgcgctgggaggtgggaacattcactgcatcacgcagcagcagcccgtgcgcccgtcctaggtgaaaccggcgtcgacgcgaagcgatgaagagtatgctgctcctgtgtttaagcaggtgggttggtcccctgtcgttattacgctcaccaatacgcgcgcgaaataagccgtaggtacaagttccttgacaaatactgtatgagtactattaggccttgttggtgggtcggaacgattcctaaccgaattgtttatctaatttatataaattttgattagctggaacgattccgggtgtaatccgatagaaacgaacaaggccttatactatacggcacaaatgccacagtcgtggatcaaaatggtactagttcctgtctacg

SEQ ID NO: 26948 - protein, 372 aa, Zea mays subsp. mays
  peptide (1)..(372): Ceres Seq. ID no. 13498766
  misc_feature (14)..(368): Pfam Name: Pfam Description:  Porphyromonas-type peptidyl-arginine deiminase
  misc_feature (5)..(348): NCBI GI NO: 38606518 NR Description: OSJNBa0016O02.3
  misc_feature (9)..(372): NCBI GI NO: 15241536 NR Description: expressed protein [Arabidopsis thaliana]
  misc_feature (9)..(372): NCBI GI NO: 26452202 NR Description: unknown protein [Arabidopsis thaliana]
  misc_feature (9)..(372): NCBI GI NO: 14289303 NR Description: hypothetical protein [Arabidopsis thaliana]
  misc_feature (9)..(368): NCBI GI NO: 15595489 NR Description: conserved hypothetical protein
  misc_feature (5)..(368): NCBI GI NO: 23472721 NR Description: hypothetical protein
  misc_feature (5)..(368): NCBI GI NO: 28872501 NR Description: conserved hypothetical protein
  misc_feature (1)..(368): NCBI GI NO: 23105724 NR Description: hypothetical protein [Azotobacter vinelandii]
  misc_feature (2)..(368): NCBI GI NO: 26987008 NR Description: conserved hypothetical protein
  misc_feature (5)..(368): NCBI GI NO: 23061592 NR Description: hypothetical protein
MVKVIQGRPAEMGFRMPAEWEPHEQCWMGWPERPDNWRENAGPAQEVFARTAIAISKFEPVTLCASAKQYPKVHELMEHETNIRVVEMSMNDSWFRDMGPTFVTHKGDSGIAEQTIAGIDWQFNAWGGIYDDWSLDSDVAKKIVEIERIPRFPQKIILEGGSIHVDGEGTCITTEECLLNPNRNPNMTKLEIENELKDFLGVSKVIWIPRGLYGDEDTNGHVDNLCCFIKPGVILLSWTDDEKDHQYERSVEALSVLSQSVDAKGRQLQVVKIHVPGPLYMTEEEAQGVVSSGHSVPRPAGTRLAASYVNFYIANGGIIAPSFGDRWDEEAYAVLQKAFPDHEVVMVEGGREIALGGGNIHCITQQQPVRPS

SEQ ID NO: 26949 - protein, 361 aa, Zea mays subsp. mays
  peptide (1)..(361): Ceres Seq. ID no. 13498767
  misc_feature (3)..(357): Pfam Name: Pfam Description:  Porphyromonas-type peptidyl-arginine deiminase
  misc_feature (1)..(337): NCBI GI NO: 38606518 NR Description: OSJNBa0016O02.3
  misc_feature (1)..(361): NCBI GI NO: 15241536 NR Description: expressed protein [Arabidopsis thaliana]
  misc_feature (1)..(361): NCBI GI NO: 26452202 NR Description: unknown protein [Arabidopsis thaliana]
  misc_feature (1)..(361): NCBI GI NO: 14289303 NR Description: hypothetical protein [Arabidopsis thaliana]
  misc_feature (1)..(357): NCBI GI NO: 15595489 NR Description: conserved hypothetical protein
  misc_feature (1)..(357): NCBI GI NO: 23472721 NR Description: hypothetical protein
  misc_feature (1)..(357): NCBI GI NO: 28872501 NR Description: conserved hypothetical protein
  misc_feature (1)..(357): NCBI GI NO: 23105724 NR Description: hypothetical protein [Azotobacter vinelandii]
  misc_feature (1)..(357): NCBI GI NO: 26987008 NR Description: conserved hypothetical protein
  misc_feature (1)..(357): NCBI GI NO: 23061592 NR Description: hypothetical protein
MGFRMPAEWEPHEQCWMGWPERPDNWRENAGPAQEVFARTAIAISKFEPVTLCASAKQYPKVHELMEHETNIRVVEMSMNDSWFRDMGPTFVTHKGDSGIAEQTIAGIDWQFNAWGGIYDDWSLDSDVAKKIVEIERIPRFPQKIILEGGSIHVDGEGTCITTEECLLNPNRNPNMTKLEIENELKDFLGVSKVIWIPRGLYGDEDTNGHVDNLCCFIKPGVILLSWTDDEKDHQYERSVEALSVLSQSVDAKGRQLQVVKIHVPGPLYMTEEEAQGVVSSGHSVPRPAGTRLAASYVNFYIANGGIIAPSFGDRWDEEAYAVLQKAFPDHEVVMVEGGREIALGGGNIHCITQQQPVRPS

SEQ ID NO: 26950 - protein, 357 aa, Zea mays subsp. mays
  peptide (1)..(357): Ceres Seq. ID no. 13498768
  misc_feature (1)..(353): Pfam Name: Pfam Description:  Porphyromonas-type peptidyl-arginine deiminase
  misc_feature (1)..(333): NCBI GI NO: 38606518 NR Description: OSJNBa0016O02.3
  misc_feature (1)..(357): NCBI GI NO: 15241536 NR Description: expressed protein [Arabidopsis thaliana]
  misc_feature (1)..(357): NCBI GI NO: 26452202 NR Description: unknown protein [Arabidopsis thaliana]
  misc_feature (1)..(357): NCBI GI NO: 14289303 NR Description: hypothetical protein [Arabidopsis thaliana]
  misc_feature (1)..(353): NCBI GI NO: 15595489 NR Description: conserved hypothetical protein
  misc_feature (1)..(353): NCBI GI NO: 23472721 NR Description: hypothetical protein
  misc_feature (1)..(353): NCBI GI NO: 28872501 NR Description: conserved hypothetical protein
  misc_feature (1)..(353): NCBI GI NO: 23105724 NR Description: hypothetical protein [Azotobacter vinelandii]
  misc_feature (1)..(353): NCBI GI NO: 26987008 NR Description: conserved hypothetical protein
  misc_feature (1)..(353): NCBI GI NO: 23061592 NR Description: hypothetical protein
MPAEWEPHEQCWMGWPERPDNWRENAGPAQEVFARTAIAISKFEPVTLCASAKQYPKVHELMEHETNIRVVEMSMNDSWFRDMGPTFVTHKGDSGIAEQTIAGIDWQFNAWGGIYDDWSLDSDVAKKIVEIERIPRFPQKIILEGGSIHVDGEGTCITTEECLLNPNRNPNMTKLEIENELKDFLGVSKVIWIPRGLYGDEDTNGHVDNLCCFIKPGVILLSWTDDEKDHQYERSVEALSVLSQSVDAKGRQLQVVKIHVPGPLYMTEEEAQGVVSSGHSVPRPAGTRLAASYVNFYIANGGIIAPSFGDRWDEEAYAVLQKAFPDHEVVMVEGGREIALGGGNIHCITQQQPVRPS

SEQ ID NO: 26951 - DNA, 964 bp, Zea mays subsp. mays
  misc_feature (1)..(964): Ceres Seq. ID no. 12409637
cccaccatcccagggccgccgcgctgcttctctttcccgtcgcacctccaacgctgccgccgcggcagattaatccaacaccgggccgggatacgtgacaggtttctgagctcgcagctctacgccagcgatgccggagacggcggcgccgatcggcctgtcatgggcgcccaagcttccttccttcgcaacgaccagcggcggcagcaagagcgaccacgcgccgaacccgagcgctgcgcagggatcgctctggaaccgcgcgagcgacctcgtggacgggctgttcgttgccccgagggaccctaggcagctgaataagctggccaggaagaacgtcaaggacactgccggcaagggctggttcgacatgccagctccgaccatcactcccgagttgaagaaggatctcgagattttgcagctgaggcacgtaattgacccaaaaaggcacttcaagcgggcaggaaaatccaaggcccttcccaagtacttccaagtcggtacggtcgttgagcctgcatctgagttctactcaagtaggctgaaaaatagggaacgcaaggcaacattggttgacgagctgttatcagatcaatctctgaagagctacaggatgcgcaaggtacgtgaaattcaggagatccgtacaccaggaggcaaccaaaagtggaagaacaagggcaagaaaacgctcaagagggccaaggataggaggaaatgagactggcgtgctagccttgtggtccagttgtgagagaacagattggagaagtgaaccaaggagcgccttcaaataccccctctctcgatttgtgcggggtatatagattctggttccagtgtagtgtggtgaacttcagtaacatgatgaattgctttagatacttcaaaaaatgttgctgtaagtctgtaacacacatgtatggttttcagcccgtggttatcaattctgtcggttggg

SEQ ID NO: 26952 - protein, 197 aa, Zea mays subsp. mays
  peptide (1)..(197): Ceres Seq. ID no. 12409638
  misc_feature (1)..(196): NCBI GI NO: 30692242 NR Description: expressed protein [Arabidopsis thaliana]
  misc_feature (1)..(196): NCBI GI NO: 15221891 NR Description: hypothetical protein; protein id: At1g54770.1
  misc_feature (1)..(173): NCBI GI NO: 25405768 NR Description: T22H22.18 [imported] - Arabidopsis thaliana
  misc_feature (67)..(182): NCBI GI NO: 19114999 NR Description: hypothetical protein [Schizosaccharomyces pombe]
  misc_feature (61)..(186): NCBI GI NO: 8218113 NR Description: dJ561L24.2 (acidic 82 kDa protein) [Homo sapiens]
  misc_feature (61)..(187): NCBI GI NO: 34859943 NR Description: similar to expressed sequence AA408582
  misc_feature (61)..(186): NCBI GI NO: 24418931 NR Description: hypothetical protein MGC27716 [Mus musculus]
  misc_feature (64)..(197): NCBI GI NO: 17537287 NR Description: Acidic protein mRNA (29.6 kD)
  misc_feature (63)..(197): NCBI GI NO: 39580393 NR Description: Hypothetical protein CBG17763
  misc_feature (54)..(191): NCBI GI NO: 6323080 NR Description: Protein required for cell viability; Ylr051cp
MPETAAPIGLSWAPKLPSFATTSGGSKSDHAPNPSAAQGSLWNRASDLVDGLFVAPRDPRQLNKLARKNVKDTAGKGWFDMPAPTITPELKKDLEILQLRHVIDPKRHFKRAGKSKALPKYFQVGTVVEPASEFYSSRLKNRERKATLVDELLSDQSLKSYRMRKVREIQEIRTPGGNQKWKNKGKKTLKRAKDRRK

SEQ ID NO: 26953 - protein, 117 aa, Zea mays subsp. mays; identical to SEQ ID NO: 23969
  peptide (1)..(117): Ceres Seq. ID no. 12409639
  misc_feature (1)..(116): NCBI GI NO: 30692242 NR Description: expressed protein [Arabidopsis thaliana]
  misc_feature (1)..(116): NCBI GI NO: 15221891 NR Description: hypothetical protein; protein id: At1g54770.1
  misc_feature (1)..(93): NCBI GI NO: 25405768 NR Description: T22H22.18 [imported] - Arabidopsis thaliana
  misc_feature (1)..(102): NCBI GI NO: 19114999 NR Description: hypothetical protein [Schizosaccharomyces pombe]
  misc_feature (1)..(106): NCBI GI NO: 8218113 NR Description: dJ561L24.2 (acidic 82 kDa protein) [Homo sapiens]
  misc_feature (1)..(107): NCBI GI NO: 34859943 NR Description: similar to expressed sequence AA408582
  misc_feature (1)..(106): NCBI GI NO: 24418931 NR Description: hypothetical protein MGC27716 [Mus musculus]
  misc_feature (1)..(117): NCBI GI NO: 17537287 NR Description: Acidic protein mRNA (29.6 kD)
  misc_feature (1)..(117): NCBI GI NO: 39580393 NR Description: Hypothetical protein CBG17763
  misc_feature (1)..(111): NCBI GI NO: 6323080 NR Description: Protein required for cell viability; Ylr051cp

SEQ ID NO: 26954 - protein, 102 aa, Zea mays subsp. mays
  peptide (1)..(102): Ceres Seq. ID no. 12409640
PTIPGPPRCFSFPSHLQRCRRGRLIQHRAGIRDRFLSSQLYASDAGDGGADRPVMGAQASFLRNDQRRQQERPRAEPERCAGIALEPRERPRGRAVRCPEGP

SEQ ID NO: 26955 - DNA, 1140 bp, Zea mays subsp. mays; identical to SEQ ID NO: 26494
  misc_feature (1)..(1140): Ceres Seq. ID no. 12386869

SEQ ID NO: 26956 - protein, 274 aa, Zea mays subsp. mays; identical to SEQ ID NO: 26495
  peptide (1)..(274): Ceres Seq. ID no. 12386870
  misc_feature (92)..(270): Pfam Name: phosphoriboisomerase A Pfam Description: Ribose 5-phosphate isomerase A
  misc_feature (1)..(274): NCBI GI NO: 34393835 NR Description: putative ribose-5-phosphate isomerase
  misc_feature (31)..(274): NCBI GI NO: 34393836 NR Description: putative ribose-5-phosphate isomerase
  misc_feature (29)..(274): NCBI GI NO: 18654317 NR Description: ribose-5-phosphate isomerase [Spinacia oleracea]
  misc_feature (1)..(274): NCBI GI NO: 21594002 NR Description: putative ribose 5-phosphate isomerase
  misc_feature (1)..(274): NCBI GI NO: 15229349 NR Description: putative ribose 5-phosphate isomerase
  misc_feature (26)..(274): NCBI GI NO: 15226223 NR Description: putative ribose 5-phosphate isomerase
  misc_feature (26)..(274): NCBI GI NO: 21592672 NR Description: putative ribose 5-phosphate isomerase
  misc_feature (26)..(274): NCBI GI NO: 15223936 NR Description: putative ribose 5-phosphate isomerase
  misc_feature (26)..(274): NCBI GI NO: 13430836 NR Description: putative ribose 5-phosphate isomerase
  misc_feature (34)..(268): NCBI GI NO: 38347196 NR Description: OSJNBa0023J03.8

SEQ ID NO: 26957 - protein, 212 aa, Zea mays subsp. mays; identical to SEQ ID NO: 26496
  peptide (1)..(212): Ceres Seq. ID no. 12386871
  misc_feature (30)..(208): Pfam Name: phosphoriboisomerase A Pfam Description: Ribose 5-phosphate isomerase A
  misc_feature (1)..(212): NCBI GI NO: 34393835 NR Description: putative ribose-5-phosphate isomerase
  misc_feature (1)..(212): NCBI GI NO: 34393836 NR Description: putative ribose-5-phosphate isomerase
  misc_feature (1)..(212): NCBI GI NO: 18654317 NR Description: ribose-5-phosphate isomerase [Spinacia oleracea]
  misc_feature (1)..(212): NCBI GI NO: 21594002 NR Description: putative ribose 5-phosphate isomerase
  misc_feature (1)..(212): NCBI GI NO: 15229349 NR Description: putative ribose 5-phosphate isomerase
  misc_feature (1)..(212): NCBI GI NO: 15226223 NR Description: putative ribose 5-phosphate isomerase
  misc_feature (1)..(212): NCBI GI NO: 21592672 NR Description: putative ribose 5-phosphate isomerase
  misc_feature (1)..(212): NCBI GI NO: 15223936 NR Description: putative ribose 5-phosphate isomerase
  misc_feature (1)..(212): NCBI GI NO: 13430836 NR Description: putative ribose 5-phosphate isomerase
  misc_feature (1)..(206): NCBI GI NO: 38347196 NR Description: OSJNBa0023J03.8

SEQ ID NO: 26958 - protein, 178 aa, Zea mays subsp. mays; identical to SEQ ID NO: 26497
  peptide (1)..(178): Ceres Seq. ID no. 12386872

SEQ ID NO: 26959 - DNA, 1635 bp, Zea mays subsp. mays
  misc_feature (1)..(1635): Ceres Seq. ID no. 12358682
aaggagatagagagagagggagtgagaagaaggagacgcgaggagagagagagagcggcaggcaggcaggcaggcaataaatggcagttttggtgcgcgcaggctgatggcggcgtggcaggtcctctctgtcgcctcaccgtcttaactccggccgcgcgccggcaccacaaaccacaccgctcggctgcgagcacgcgggttttaatccgtcgcagagcgcatgagcacgccgcccagagcgcagactacgacgagcagccgtctgtagagggggagggaccgagggagagatcagggcgtcaggccgttgtctctcagcttcaccttcaccttgccgggcacggcgaacggcacggcggcctatggatttggccacatggcggggttccctctaggtggaggaggccacagccgcgacgcccccgcgtcgtccgtcccgccggtgcacccctccgacgcagcgtccttcctctacgccgcgcgcgcgggagcgggcctgcagctatggcagcagcacgagcagcaacagcagcacccgttctacacctccaacatcatccgcttctccgatgacccgaccggcgccccgccctcgctcacgggcgccgcgtcgtcgtcgtcttcgcgcggcacgaggggccggcgcgggaagcggcggcggaggcggcggcggggtcagctgccaggactgcggcaaccaggccaagaaggactgcgtgcaccagcgctgccgcacctgctgcaagagccgcggcttcacctgcagcacccacgtcaagtccacctgggtccctgccgccaagagacgcgagcgccagcagcagctcgccgtgctagcggcctccgccgccgccacaaccgccggcgccggcccatcccgcgacccgaccaagcgccctcgcgcgcgcctctccgtcgccacccccgccacgtcctcggatggtcacggtcgcggagaggttcccacgggaggtgagctcggaggcggtgttccggtgcgtgcgcctggggccggtcgaccaggccgaggcggaggtcgcgtaccagaccaccgtcagcatcggcggccacgtgttcaagggcatccttcacgacgttggccctcacagcttgcctgccgctggagtcggaggcggcgccatcgagtaccacttccgccacgccggggacggattgccgccgagcacggcagccactggcgaagcaggcggcggtggcgtggggagtgtcgtcgtgtcatcggctgtggtgatggacccgtacccgacgcccggaccctacgccgccttccccgccggcgcgccgttcttccacggccacccgagacagtgaccgccggctcgctcgctcgccagcagccgtcccgctgtgtaacgacatcacgactcccatctctggctcgctcgatctgtcaatttcgttagcttcctaatttcttagcctcttgttgagatgcataaattcatgttccttctagagcctagctagctagcttaggcgcgggttagacttgtttgcttcttgagatcaattcatgaggtgagtagcaatatactcagtggctgcaagtggctaaaaatctgacatttaggaaccttgatgagacatttgagatggtttcttgcactgtgc

SEQ ID NO: 26960 - protein, 284 aa, Zea mays subsp. mays
  peptide (1)..(284): Ceres Seq. ID no. 12358683
  misc_feature (30)..(132): Pfam Name: DUF702 Pfam Description: Domain of unknown function
  misc_feature (30)..(132): NCBI GI NO: 15239350 NR Description: zinc finger protein SHI-like; protein id:At5g66350
  misc_feature (36)..(123): NCBI GI NO: 15234365 NR Description: putative protein; protein id: At4g36260.1
  misc_feature (34)..(108): NCBI GI NO: 15223669 NR Description: hypothetical protein; protein id: At1g19790.1
  misc_feature (34)..(96): NCBI GI NO: 15222285 NR Description: unknown protein; protein id: At1g75520.1
  misc_feature (36)..(105): NCBI GI NO: 15224110 NR Description: unknown protein; protein id: At2g18120.1
  misc_feature (35)..(92): NCBI GI NO: 15226540 NR Description: hypothetical protein; protein id: At2g21400.1
  misc_feature (1)..(123): NCBI GI NO: 34906658 NR Description: putative LRP(lateral root primordia) 1
  misc_feature (26)..(132): NCBI GI NO: 15230389 NR Description: putative protein; protein id: At3g51060.1
  misc_feature (35)..(82): NCBI GI NO: 33945875 NR Description: hypothetical protein
  misc_feature (42)..(92): NCBI GI NO: 26984075 NR Description: hypothetical protein [Arabidopsis thaliana]
MTRPAPRPRSRAPRRRRLRAARGAGAGSGGGGGGGVSCQDCGNQAKKDCVHQRCRTCCKSRGFTCSTHVKSTWVPAAKRRERQQQLAVLAASAAATTAGAGPSRDPTKRPRARLSVATPATSSDGHGRGEVPTGGELGGGVPVRAPGAGRPGRGGGRVPDHRQHRRPRVQGHPSRRWPSQLACRWSRRRRHRVPLPPRRGRIAAEHGSHWRSRRRWRGECRRVIGCGDGPVPDARTLRRLPRRRAVLPRPPETVTAGSLARQQPSRCVTTSRLPSLARSICQFR

SEQ ID NO: 26961 - protein, 199 aa, Zea mays subsp. mays
  peptide (1)..(199): Ceres Seq. ID no. 12358684
MAGFPLGGGGHSRDAPASSVPPVHPSDAASFLYAARAGAGLQLWQQHEQQQQHPFYTSNIIRFSDDPTGAPPSLTGAASSSSSRGTRGRRGKRRRRRRRGQLPGLRQPGQEGLRAPALPHLLQEPRLHLQHPRQVHLGPCRQETRAPAAARRASGLRRRHNRRRRPIPRPDQAPSRAPLRRHPRHVLGWSRSRRGSHGR

SEQ ID NO: 26962 - protein, 191 aa, Zea mays subsp. mays
  peptide (1)..(191): Ceres Seq. ID no. 12358685
  misc_feature (125)..(191): Pfam Name: Pfam Description:  Glycoprotein GG/GX
  misc_feature (167)..(191): NCBI GI NO: 485464 NR Description: hypothetical protein 4
  misc_feature (9)..(191): NCBI GI NO: 25989119 NR Description: unknown [Streptomyces aureofaciens]
  misc_feature (138)..(191): NCBI GI NO: 485464 NR Description: hypothetical protein 4
  misc_feature (135)..(191): NCBI GI NO: 151046 NR Description: alginate regulatory protein AlgR3
  misc_feature (135)..(191): NCBI GI NO: 482295 NR Description: regulatory protein algP - Pseudomonas aeruginosa
  misc_feature (141)..(191): NCBI GI NO: 485464 NR Description: hypothetical protein 4
  misc_feature (126)..(191): NCBI GI NO: 13559031 NR Description: bA11M20
  misc_feature (135)..(191): NCBI GI NO: 151002 NR Description: transcription regulatory protein
  misc_feature (135)..(191): NCBI GI NO: 94816 NR Description: regulatory protein algR3 - Pseudomonas aeruginosa
  misc_feature (126)..(191): NCBI GI NO: 4507349 NR Description: TBP-associated factor 4; TATA box binding protein
KEIEREGVRRRRREERERAAGRQAGNKWQFWCAQADGGVAGPLCRLTVLTPAARRHHKPHRSAASTRVLIRRRAHEHAAQSADYDEQPSVEGEGPRERSGRQAVVSQLHLHLAGHGERHGGLWIWPHGGVPSRWRRPQPRRPRVVRPAGAPLRRSVLPLRRARGSGPAAMAAARAATAAPVLHLQHHPLLR

SEQ ID NO: 26963 - DNA, 1544 bp, Zea mays subsp. mays
  misc_feature (1)..(1544): Ceres Seq. ID no. 12566452
aagtacacagagatacaaatacagagaggcagagggcaggcggaggcaccatctccctcccttcttcatcgcccacacaagtcctctcatctcctctctgtttcgtgcaagaaacttccttggacaaagatgggagtgcagagttactacaggttattctgctgcgggtgcggcgccaatgcggcggccggcgaccgggaaggcgacgaggacgggggtttcgaggcgttcgccgacaagggggccgccgaagccgggccgcgggggctgtcgtgggcgcaggtggaggcgatgacgggcaggttcacctcggccgtcgtcggcgagggcgggttcagcaccgtgtacctcgcgcgcctctccggcggcgcgctggccgccgtcaaggtccaccgcagcagcgagcgcctccaccgcgtgttccgccaggagctcgacgcgctccgacgcgtccgccacccgcacatcgtccgcctccttgccttctgcgaccagcaagaggaaggcgtgctggtgctggagttcgcggcgaacgggaacctgcacgagcggctccacggcgggggcaaggcggcgggcacgatgccgtgggcgcggcgggtgtcggcggcgctgcaggtggcgcgggcgctcgagtacctgcacgaccgctgcgagccgcaggtggtgcacggcgacgtgaaggcctccaacgtgctcctggacgcggccatgtccgccaagctgtgcgacttcgggtcggcgcggacggggttctcggccgccgtgcgcccgcggccgtccgcgcgcaccgccatgctcggctccccggggtacgtcgacccgcactacatccgctcgggcgtcgtcaccaagaagaccgacgtgtacagcttcggcgtcctgctcctggagctcctcacggggatggaggccttctgcgcggaggagggcggccgcctcctcaccgccgccgtcgcgccgcggctcagggccggcgacccgccccgcgggatggtcgacgagaggctcggcaccgcctacgacgccgccgaggccgccgccgtggcggcgctggccgctgcctgtgtcggcgagaaccccagcctccggccgtccatggccgacgtggtgcgcaccctggagcagagcgcgcagggatccatctccgccgtggggatggcatcggacggtcactggaaggtgtgagtcaccagtggaaagtcgtcgcctccgccgacgcgctcagatctggctccccgagtcgttaacttgcggtgctcatgcgcatgcgtcgcgcacgtggcgcccatccattggttgcgaggagaacaaagcgttgttagtaggcgagcatatcaaaaagaaagaggggacaaaagcgtggtgaaaaaacgttgatttccatagctaaattaggggaagacttggggagataaaaaggcagagctaagttgtgtgctgatggggatttccatcatattatgccaaagcggcatctacttgagagagacaaaaaaaagagaggatctttgcagcgcacgattccaagattttgttgattc

SEQ ID NO: 26964 - protein, 415 aa, Zea mays subsp. mays
  peptide (1)..(415): Ceres Seq. ID no. 12566453
  misc_feature (62)..(311): NCBI GI NO: 29829093 NR Description: putative translation initiation factor IF-2
VHRDTNTERQRAGGGTISLPSSSPTQVLSSPLCFVQETSLDKDGSAELLQVILLRVRRQCGGRRPGRRRGRGFRGVRRQGGRRSRAAGAVVGAGGGDDGQVHLGRRRRGRVQHRVPRAPLRRRAGRRQGPPQQRAPPPRVPPGARRAPTRPPPAHRPPPCLLRPARGRRAGAGVRGEREPARAAPRRGQGGGHDAVGAAGVGGAAGGAGARVPARPLRAAGGARRREGLQRAPGRGHVRQAVRLRVGADGVLGRRAPAAVRAHRHARLPGVRRPALHPLGRRHQEDRRVQLRRPAPGAPHGDGGLLRGGGRPPPHRRRRAAAQGRRPAPRDGRREARHRLRRRRGRRRGGAGRCLCRREPQPPAVHGRRGAHPGAERAGIHLRRGDGIGRSLEGVSHQWKVVASADALRSGSPSR

SEQ ID NO: 26965 - protein, 395 aa, Zea mays subsp. mays
  peptide (1)..(395): Ceres Seq. ID no. 12566454
  misc_feature (106)..(374): Pfam Name: Pfam Description:  Protein kinase domain
  misc_feature (50)..(395): NCBI GI NO: 37536060 NR Description: putative receptor protein kinase
  misc_feature (50)..(379): NCBI GI NO: 27476081 NR Description: Hypothetical protein
  misc_feature (56)..(390): NCBI GI NO: 38344983 NR Description: OSJNBa0011L07.13
  misc_feature (67)..(386): NCBI GI NO: 30692836 NR Description: protein kinase family [Arabidopsis thaliana]
  misc_feature (91)..(386): NCBI GI NO: 15235071 NR Description: putative protein kinase; protein id: At4g10390
  misc_feature (67)..(315): NCBI GI NO: 25403176 NR Description: probable protein kinase
  misc_feature (201)..(386): NCBI GI NO: 29367339 NR Description: putative receptor protein kinase
  misc_feature (86)..(388): NCBI GI NO: 18402188 NR Description: unknown protein; protein id: At3g19300.1
  misc_feature (88)..(376): NCBI GI NO: 15227018 NR Description: putative receptor-like protein kinase
  misc_feature (70)..(374): NCBI GI NO: 11358842 NR Description: serine/threonine-specific protein kinase-likeprotein
KYTEIQIQRGRGQAEAPSPSLLHRPHKSSHLLSVSCKKLPWTKMGVQSYYRLFCCGCGANAAAGDREGDEDGGFEAFADKGAAEAGPRGLSWAQVEAMTGRFTSAVVGEGGFSTVYLARLSGGALAAVKVHRSSERLHRVFRQELDALRRVRHPHIVRLLAFCDQQEEGVLVLEFAANGNLHERLHGGGKAAGTMPWARRVSAALQVARALEYLHDRCEPQVVHGDVKASNVLLDAAMSAKLCDFGSARTGFSAAVRPRPSARTAMLGSPGYVDPHYIRSGVVTKKTDVYSFGVLLLELLTGMEAFCAEEGGRLLTAAVAPRLRAGDPPRGMVDERLGTAYDAAEAAAVAALAAACVGENPSLRPSMADVVRTLEQSAQGSISAVGMASDGHWKV

SEQ ID NO: 26966 - protein, 352 aa, Zea mays subsp. mays
  peptide (1)..(352): Ceres Seq. ID no. 12566455
  misc_feature (63)..(331): Pfam Name: Pfam Description:  Protein kinase domain
  misc_feature (7)..(352): NCBI GI NO: 37536060 NR Description: putative receptor protein kinase
  misc_feature (7)..(336): NCBI GI NO: 27476081 NR Description: Hypothetical protein
  misc_feature (13)..(347): NCBI GI NO: 38344983 NR Description: OSJNBa0011L07.13
  misc_feature (24)..(343): NCBI GI NO: 30692836 NR Description: protein kinase family [Arabidopsis thaliana]
  misc_feature (48)..(343): NCBI GI NO: 15235071 NR Description: putative protein kinase; protein id: At4g10390
  misc_feature (24)..(272): NCBI GI NO: 25403176 NR Description: probable protein kinase
  misc_feature (158)..(343): NCBI GI NO: 29367339 NR Description: putative receptor protein kinase
  misc_feature (43)..(345): NCBI GI NO: 18402188 NR Description: unknown protein; protein id: At3g19300.1
  misc_feature (45)..(333): NCBI GI NO: 15227018 NR Description: putative receptor-like protein kinase
  misc_feature (27)..(331): NCBI GI NO: 11358842 NR Description: serine/threonine-specific protein kinase-likeprotein
MGVQSYYRLFCCGCGANAAAGDREGDEDGGFEAFADKGAAEAGPRGLSWAQVEAMTGRFTSAVVGEGGFSTVYLARLSGGALAAVKVHRSSERLHRVFRQELDALRRVRHPHIVRLLAFCDQQEEGVLVLEFAANGNLHERLHGGGKAAGTMPWARRVSAALQVARALEYLHDRCEPQVVHGDVKASNVLLDAAMSAKLCDFGSARTGFSAAVRPRPSARTAMLGSPGYVDPHYIRSGVVTKKTDVYSFGVLLLELLTGMEAFCAEEGGRLLTAAVAPRLRAGDPPRGMVDERLGTAYDAAEAAAVAALAAACVGENPSLRPSMADVVRTLEQSAQGSISAVGMASDGHWKV

SEQ ID NO: 26967 - DNA, 1415 bp, Zea mays subsp. mays
  misc_feature (1)..(1415): Ceres Seq. ID no. 12409621
gtcggcgaccccaaacctctgtcgagagtttcacctccggtcgctggtttcctccaatctccgtggtagttcagcgcgagcgggcggcggggtttgagctcgatggccacttccggcgaacaatcggctggcggcgggtctgcggcgagggcgtcgaagctgcggtacccgctgcggtcggcgagcaaggggaaggcggcggtcgttcccccggcggctgatgctcctcccaccatctctgctccgcgacgggcaaaaccatcttcagatgtcagcaagagcatgtgtttagacctttctgtgaaggataattctgccaaacccccacggaggcactcaatacaaaccaagctaggagctagtccaaggccaacaccttctggaactgtgactccggtgtctggggttcggtcaaagagatcggaaagccaggggaggtttgataccccgacatcagaagtgtccatgtccatctcaaggcgcaagttcagcacgctttcttcaatctcgtactggatgacacagatcaggctggcagaggctgcttccaagcactcggtttctctgggcttctttaagcttgctcttgaatcagaatgtgagcctttggaccggatgagggaagaactcaagtcctacgtagcacggcatggcctggcgacagaattggaggacccagttaaggacattctccaggtttatgatattttggatgattttgagaagctgaagatctctgcagagccctcacagcaaccaaaaaagtctgacaaggctgctcgtactgccacaaatgcgtcaccgaatggtaacctgaagccaagatcactgaactctgatgctactgaaagcaaggatgctgtaaagaaagagggcatccagaaagtaaatcctggtgcaagggtcagaggctcctgtaacaggaatccagtcaaaaacaccaccgcaaaggaagcagttgccaagaacaccggtaaggaaaccaagaaaggggccaagggtcagcaggaagttagcgaggctccgtcagcccttccaaatcaggaatctgctgatgttgtgaaggagatgacccatgaagataaagagaacaatggcgatattgaaatggcagtggatgttgccgtagcccaagatatctagaacagccggaccaacttcagattcgatccccttttttttctatcgctgaagatgaagtgttagcgtgtggttgcttattttggttttcaattgttaatatgttattagtagagcttgtctgtgtgattgctgtctggctggaccttgaacggtcttcaagagcgtgtcataagttgatgattgctttcattcctctgtcaagtttgcggctttgcatgtgataatccgtgcaactgaatatagttgaatttatctattctcgtggttcctcc

SEQ ID NO: 26968 - protein, 346 aa, Zea mays subsp. mays
  peptide (1)..(346): Ceres Seq. ID no. 12409622
  misc_feature (1)..(329): NCBI GI NO: 15241865 NR Description: unknown protein; protein id: At5g62550.1
MATSGEQSAGGGSAARASKLRYPLRSASKGKAAVVPPAADAPPTISAPRRAKPSSDVSKSMCLDLSVKDNSAKPPRRHSIQTKLGASPRPTPSGTVTPVSGVRSKRSESQGRFDTPTSEVSMSISRRKFSTLSSISYWMTQIRLAEAASKHSVSLGFFKLALESECEPLDRMREELKSYVARHGLATELEDPVKDILQVYDILDDFEKLKISAEPSQQPKKSDKAARTATNASPNGNLKPRSLNSDATESKDAVKKEGIQKVNPGARVRGSCNRNPVKNTTAKEAVAKNTGKETKKGAKGQQEVSEAPSALPNQESADVVKEMTHEDKENNGDIEMAVDVAVAQDI

SEQ ID NO: 26969 - protein, 286 aa, Zea mays subsp. mays
  peptide (1)..(286): Ceres Seq. ID no. 12409623
  misc_feature (1)..(269): NCBI GI NO: 15241865 NR Description: unknown protein; protein id: At5g62550.1
MCLDLSVKDNSAKPPRRHSIQTKLGASPRPTPSGTVTPVSGVRSKRSESQGRFDTPTSEVSMSISRRKFSTLSSISYWMTQIRLAEAASKHSVSLGFFKLALESECEPLDRMREELKSYVARHGLATELEDPVKDILQVYDILDDFEKLKISAEPSQQPKKSDKAARTATNASPNGNLKPRSLNSDATESKDAVKKEGIQKVNPGARVRGSCNRNPVKNTTAKEAVAKNTGKETKKGAKGQQEVSEAPSALPNQESADVVKEMTHEDKENNGDIEMAVDVAVAQDI

SEQ ID NO: 26970 - protein, 225 aa, Zea mays subsp. mays
  peptide (1)..(225): Ceres Seq. ID no. 12409624
  misc_feature (1)..(208): NCBI GI NO: 15241865 NR Description: unknown protein; protein id: At5g62550.1
MSISRRKFSTLSSISYWMTQIRLAEAASKHSVSLGFFKLALESECEPLDRMREELKSYVARHGLATELEDPVKDILQVYDILDDFEKLKISAEPSQQPKKSDKAARTATNASPNGNLKPRSLNSDATESKDAVKKEGIQKVNPGARVRGSCNRNPVKNTTAKEAVAKNTGKETKKGAKGQQEVSEAPSALPNQESADVVKEMTHEDKENNGDIEMAVDVAVAQDI

SEQ ID NO: 26971 - DNA, 1097 bp, Zea mays subsp. mays; identical to SEQ ID NO: 25504
  misc_feature (1)..(1097): Ceres Seq. ID no. 13494437

SEQ ID NO: 26972 - protein, 225 aa, Zea mays subsp. mays; identical to SEQ ID NO: 25505
  peptide (1)..(225): Ceres Seq. ID no. 13494438
  misc_feature (70)..(141): Pfam Name: Pfam Description:  linker histone H1 and H5 family
  misc_feature (1)..(225): NCBI GI NO: 6006363 NR Description: ESTs AU078183
  misc_feature (26)..(220): NCBI GI NO: 7439658 NR Description: histone H1, stress-inducible - tomato
  misc_feature (27)..(220): NCBI GI NO: 23506611 NR Description: histone H1D [Nicotiana tabacum]
  misc_feature (22)..(220): NCBI GI NO: 7595978 NR Description: histone H1 variant [Lycopersicon chilense]
  misc_feature (21)..(220): NCBI GI NO: 27529850 NR Description: stress-inducible H1 histone-like protein
  misc_feature (27)..(220): NCBI GI NO: 729668 NR Description: Histone H1
  misc_feature (27)..(220): NCBI GI NO: 5726575 NR Description: histone H1C [Nicotiana tabacum]
  misc_feature (77)..(215): NCBI GI NO: 7489483 NR Description: histone H1 homolog - rice
  misc_feature (1)..(225): NCBI GI NO: 2623960 NR Description: histone H1 [Apium graveolens]
  misc_feature (15)..(225): NCBI GI NO: 13540391 NR Description: histone H1 [Pisum sativum]

SEQ ID NO: 26973 - protein, 149 aa, Zea mays subsp. mays; identical to SEQ ID NO: 25506
  peptide (1)..(149): Ceres Seq. ID no. 13494439
  misc_feature (1)..(65): Pfam Name: Pfam Description:  linker histone H1 and H5 family
  misc_feature (1)..(149): NCBI GI NO: 6006363 NR Description: ESTs AU078183
  misc_feature (1)..(144): NCBI GI NO: 7439658 NR Description: histone H1, stress-inducible - tomato
  misc_feature (1)..(144): NCBI GI NO: 23506611 NR Description: histone H1D [Nicotiana tabacum]
  misc_feature (1)..(144): NCBI GI NO: 7595978 NR Description: histone H1 variant [Lycopersicon chilense]
  misc_feature (1)..(144): NCBI GI NO: 27529850 NR Description: stress-inducible H1 histone-like protein
  misc_feature (1)..(144): NCBI GI NO: 729668 NR Description: Histone H1
  misc_feature (1)..(144): NCBI GI NO: 5726575 NR Description: histone H1C [Nicotiana tabacum]
  misc_feature (1)..(139): NCBI GI NO: 7489483 NR Description: histone H1 homolog - rice
  misc_feature (1)..(149): NCBI GI NO: 2623960 NR Description: histone H1 [Apium graveolens]
  misc_feature (1)..(149): NCBI GI NO: 13540391 NR Description: histone H1 [Pisum sativum]

SEQ ID NO: 26974 - protein, 125 aa, Zea mays subsp. mays; identical to SEQ ID NO: 25507
  peptide (1)..(125): Ceres Seq. ID no. 13494440
  misc_feature (1)..(125): NCBI GI NO: 6006363 NR Description: ESTs AU078183
  misc_feature (1)..(120): NCBI GI NO: 7439658 NR Description: histone H1, stress-inducible - tomato
  misc_feature (1)..(120): NCBI GI NO: 23506611 NR Description: histone H1D [Nicotiana tabacum]
  misc_feature (1)..(120): NCBI GI NO: 7595978 NR Description: histone H1 variant [Lycopersicon chilense]
  misc_feature (1)..(120): NCBI GI NO: 27529850 NR Description: stress-inducible H1 histone-like protein
  misc_feature (1)..(120): NCBI GI NO: 729668 NR Description: Histone H1
  misc_feature (1)..(120): NCBI GI NO: 5726575 NR Description: histone H1C [Nicotiana tabacum]
  misc_feature (1)..(115): NCBI GI NO: 7489483 NR Description: histone H1 homolog - rice
  misc_feature (1)..(125): NCBI GI NO: 2623960 NR Description: histone H1 [Apium graveolens]
  misc_feature (1)..(125): NCBI GI NO: 13540391 NR Description: histone H1 [Pisum sativum]

SEQ ID NO: 26975 - DNA, 1465 bp, Zea mays subsp. mays
  misc_feature (1)..(1465): Ceres Seq. ID no. 12409617
agctgcagccagagccacccaccttatcgtcatcctcgctcgctcctcatcgccagcgcctcctcctcctcctccttcttccccaccgctgccgacatggctgcgcaagaagagaagaccgctgttgttgttgctgctgctgccgatgtcgcgacagaggagcctacgccggcggcggagcagcaacctcagccggctggggcggcgcgcagggcaggaccatcggcgcccggcggggctccgcccaaccccttcgacttctccaccatgatgaaccttctcaatgaccctagcatcaaggagatggcagagcagatcgccaaggacccggcgttcacggagatggcggagcagctgcagaagacggtggtgtccccgcggcagcaacagcagcagcaggcgcggcagcagcagcagcagctggacccgcagaagtacgtggcgacgatgcagcagctgatgcagaacccgcagttcgtggccatggcggagcggctaggcagcgcgctgatgcaggaccctgccatgtccgccatgctggggggcctcaccaacccggcgcacaaggagcagctggaggcccgcgtcgcgcgcatgaaagaggaccccacgctcaagcccatcctcgacgagatcgagtccggcggccccgccgccatgatgaagtactggaacgaccctgaggctctgcagaagttcggccgcgcgatgggcgtcggcgtcggcccgtccggcgaggccggcggtgcggagcacgccgaggcggaggacgacgctggggaggaaggcgagtatgaggacgagtccatcgtccaccacaccgccagtgttggcgacgtcgagggcctcaagaaagcgctggaggacggcgcggacaaggacgaggaggactcggaagggcggcgtggcctccacttcgcgtgcggctacggcgagctccagtgcgcgcaggcgctcctggaggccggcgccgcggtggacgccgtcgacaagaacaagaacaccgcgctgcactacgccgccggatacggccgcaaggactgcgtcgcgctccttctcgagagcggcgccgccgtgacgctgcagaacctggacgggaagacgcccatcgacgtggccaagctcaacaaccaggatgacgtcctcaagctgctggagaagcacgccttcgtatagacgtcccatgccgccggccggcccgtcttgctcgtctgctcctgtcgccgccgccgccgccacgtcgcttgcctctgctactgctgctgccgccaccgccattaatgctttgttaatttctctcctggtgtagacaacgcaggttccttcatcacttcactgttgagtatttgcattgggtgtgtatgtatcggattttgctttgcgtgatcacggtatcatatttatttgtcggactcctcgttcatcaggaggttttcgtaatgaataaggaagaaatttccatttc

SEQ ID NO: 26976 - protein, 391 aa, Zea mays subsp. mays
  peptide (1)..(391): Ceres Seq. ID no. 12409618
  misc_feature (332)..(364): Pfam Name: Pfam Description:  Ankyrin repeat
  misc_feature (33)..(391): NCBI GI NO: 27573339 NR Description: unknown protein
  misc_feature (38)..(391): NCBI GI NO: 13310811 NR Description: ankyrin-repeat protein HBP1 [Nicotiana tabacum]
  misc_feature (38)..(391): NCBI GI NO: 24637568 NR Description: ankyrin domain protein [Nicotiana tabacum]
  misc_feature (38)..(391): NCBI GI NO: 29826242 NR Description: TGB12K interacting protein 2 [Nicotiana tabacum]
  misc_feature (38)..(391): NCBI GI NO: 29826244 NR Description: TGB12K interacting protein 3 [Nicotiana tabacum]
  misc_feature (50)..(391): NCBI GI NO: 15237008 NR Description: ankyrin repeat-containing protein 2
  misc_feature (50)..(391): NCBI GI NO: 3478700 NR Description: AFT protein [Arabidopsis thaliana]
  misc_feature (50)..(391): NCBI GI NO: 4205079 NR Description: ankyrin repeat-containing protein 2
  misc_feature (33)..(391): NCBI GI NO: 15227825 NR Description: putative glucanase; protein id: At2g17390.1
  misc_feature (83)..(391): NCBI GI NO: 30690372 NR Description: ankyrin repeat-containing protein 2
SCSQSHPPYRHPRSLLIASASSSSSFFPTAADMAAQEEKTAVVVAAAADVATEEPTPAAEQQPQPAGAARRAGPSAPGGAPPNPFDFSTMMNLLNDPSIKEMAEQIAKDPAFTEMAEQLQKTVVSPRQQQQQQARQQQQQLDPQKYVATMQQLMQNPQFVAMAERLGSALMQDPAMSAMLGGLTNPAHKEQLEARVARMKEDPTLKPILDEIESGGPAAMMKYWNDPEALQKFGRAMGVGVGPSGEAGGAEHAEAEDDAGEEGEYEDESIVHHTASVGDVEGLKKALEDGADKDEEDSEGRRGLHFACGYGELQCAQALLEAGAAVDAVDKNKNTALHYAAGYGRKDCVALLLESGAAVTLQNLDGKTPIDVAKLNNQDDVLKLLEKHAFV

SEQ ID NO: 26977 - protein, 359 aa, Zea mays subsp. mays
  peptide (1)..(359): Ceres Seq. ID no. 12409619
  misc_feature (300)..(332): Pfam Name: Pfam Description:  Ankyrin repeat
  misc_feature (1)..(359): NCBI GI NO: 27573339 NR Description: unknown protein
  misc_feature (6)..(359): NCBI GI NO: 13310811 NR Description: ankyrin-repeat protein HBP1 [Nicotiana tabacum]
  misc_feature (6)..(359): NCBI GI NO: 24637568 NR Description: ankyrin domain protein [Nicotiana tabacum]
  misc_feature (6)..(359): NCBI GI NO: 29826242 NR Description: TGB12K interacting protein 2 [Nicotiana tabacum]
  misc_feature (6)..(359): NCBI GI NO: 29826244 NR Description: TGB12K interacting protein 3 [Nicotiana tabacum]
  misc_feature (18)..(359): NCBI GI NO: 15237008 NR Description: ankyrin repeat-containing protein 2
  misc_feature (18)..(359): NCBI GI NO: 3478700 NR Description: AFT protein [Arabidopsis thaliana]
  misc_feature (18)..(359): NCBI GI NO: 4205079 NR Description: ankyrin repeat-containing protein 2
  misc_feature (1)..(359): NCBI GI NO: 15227825 NR Description: putative glucanase; protein id: At2g17390.1
  misc_feature (51)..(359): NCBI GI NO: 30690372 NR Description: ankyrin repeat-containing protein 2
MAAQEEKTAVVVAAAADVATEEPTPAAEQQPQPAGAARRAGPSAPGGAPPNPFDFSTMMNLLNDPSIKEMAEQIAKDPAFTEMAEQLQKTVVSPRQQQQQQARQQQQQLDPQKYVATMQQLMQNPQFVAMAERLGSALMQDPAMSAMLGGLTNPAHKEQLEARVARMKEDPTLKPILDEIESGGPAAMMKYWNDPEALQKFGRAMGVGVGPSGEAGGAEHAEAEDDAGEEGEYEDESIVHHTASVGDVEGLKKALEDGADKDEEDSEGRRGLHFACGYGELQCAQALLEAGAAVDAVDKNKNTALHYAAGYGRKDCVALLLESGAAVTLQNLDGKTPIDVAKLNNQDDVLKLLEKHAFV

SEQ ID NO: 26978 - protein, 302 aa, Zea mays subsp. mays
  peptide (1)..(302): Ceres Seq. ID no. 12409620
  misc_feature (243)..(275): Pfam Name: Pfam Description:  Ankyrin repeat
  misc_feature (1)..(302): NCBI GI NO: 27573339 NR Description: unknown protein
  misc_feature (1)..(302): NCBI GI NO: 13310811 NR Description: ankyrin-repeat protein HBP1 [Nicotiana tabacum]
  misc_feature (1)..(302): NCBI GI NO: 24637568 NR Description: ankyrin domain protein [Nicotiana tabacum]
  misc_feature (1)..(302): NCBI GI NO: 29826242 NR Description: TGB12K interacting protein 2 [Nicotiana tabacum]
  misc_feature (1)..(302): NCBI GI NO: 29826244 NR Description: TGB12K interacting protein 3 [Nicotiana tabacum]
  misc_feature (1)..(302): NCBI GI NO: 15237008 NR Description: ankyrin repeat-containing protein 2
  misc_feature (1)..(302): NCBI GI NO: 3478700 NR Description: AFT protein [Arabidopsis thaliana]
  misc_feature (1)..(302): NCBI GI NO: 4205079 NR Description: ankyrin repeat-containing protein 2
  misc_feature (1)..(302): NCBI GI NO: 15227825 NR Description: putative glucanase; protein id: At2g17390.1
  misc_feature (1)..(302): NCBI GI NO: 30690372 NR Description: ankyrin repeat-containing protein 2
MMNLLNDPSIKEMAEQIAKDPAFTEMAEQLQKTVVSPRQQQQQQARQQQQQLDPQKYVATMQQLMQNPQFVAMAERLGSALMQDPAMSAMLGGLTNPAHKEQLEARVARMKEDPTLKPILDEIESGGPAAMMKYWNDPEALQKFGRAMGVGVGPSGEAGGAEHAEAEDDAGEEGEYEDESIVHHTASVGDVEGLKKALEDGADKDEEDSEGRRGLHFACGYGELQCAQALLEAGAAVDAVDKNKNTALHYAAGYGRKDCVALLLESGAAVTLQNLDGKTPIDVAKLNNQDDVLKLLEKHAFV

SEQ ID NO: 26979 - DNA, 1486 bp, Zea mays subsp. mays
  misc_feature (1)..(1486): Ceres Seq. ID no. 12356243
  misc_feature (943)..(943): n is a, c, t, g, unknown, or other
acgggaccggtaacttctagaacccaccaccttccatccttccttcctttcctctctctctctctctcctcgcgcccacggtgcccgccagccagatccgcgcgttcaccggcgccatggccgccgagcatgccaccgccgcggtgggtgagccgcctcccgccacgtcgcagccggcggagggcgtgacggcggcggcgggccagaggtccgtgcccacgccgttcctcagcaagacgtaccagctggtggacgacccggcggtggacgacatcatctcgtggaacgacgacgggtctgccttcatcgtgtggcgcccggcggagttcgcgcgcgatctgttgcccaagtacttcaagcacaacaacttctccagcttcgtgcgccagctcaacacctacgggttcaggaagatcgtgccggacaggtgggagttcgcgaacgactgcttccgccgaggggagaagcggctgctctgcgacatacaccgccggaaggtgtcgccggccacgggggcggtcacggtggccgccgccgccgctgcggccatcccgatggcgctgcccgtgggctctccggtgtactccggcgaggagcaggtgctgtcaagctcgtccccggagcccccgtcgctgcagcagcacccgccggcgccgtccgggtcgggctccggcggggtggtctcgggcgacgtgggcgaggagaacgagcggttgcggcgggagaacgcgcggctggcgcgcgagctcggacagatgaagaagctctgcaacaacatcctcctcctcatgtccaagtacgccgccactcagcagccggacgccgccaaggaggcggccgccgggaactgcaccggcgagtcgtcggatgccgccgcggcgcctccgctcccttcgatcctggagctcctaccctcgtgccgcgccgaccccgcgcccgctgnagccggaacggatcacgaggatgacgaaaaggcgggcgctaggctgttcggcgtctccatcgggcggaaacgaatgcgggacgagagcgaccaccacgccggcgtctgcgcagcggaggtgaaagccgagccggtggacgcgcgtcccgaccagcagcggcagcgcaacgccacggagccgcagtcgtggcccatttaccggcccaggcctgtgtaccacccgctccgggcctgcaacggctcgggcagcgctgggagcgaccacgacgggtccaacgactcgaggtgacgggagcaatcgtcgatctgccctcagtaaattagtattacacttactaatggtactaggtaactatattacaggttaaactaggatgtgagctctaaatctctaattatgtggggatttactgaccgatcctatgtaaaaatctccagtgtttatgtagttgatctcatattactgcaagtaccgagtatcctttctgtaccataaaactagaggttaacttatgcacagtagactaatattttctttaagtc

SEQ ID NO: 26980 - protein, 371 aa, Zea mays subsp. mays
  peptide (1)..(371): Ceres Seq. ID no. 12356244
  misc_feature (35)..(237): Pfam Name: Pfam Description:  HSF-type DNA-binding
  misc_feature (6)..(365): NCBI GI NO: 33591098 NR Description: heat shock factor RHSF2
  misc_feature (30)..(339): NCBI GI NO: 6624618 NR Description: heat shock factor 7 [Arabidopsis thaliana]
  misc_feature (30)..(339): NCBI GI NO: 15234264 NR Description: heat shock transcription factor - like protein
  misc_feature (18)..(235): NCBI GI NO: 30697614 NR Description: heat shock transcription factor 6 (HSF6)
  misc_feature (272)..(304): NCBI GI NO: 30697614 NR Description: heat shock transcription factor 6 (HSF6)
  misc_feature (36)..(228): NCBI GI NO: 38344369 NR Description: OSJNBb0032E06.3
  misc_feature (20)..(310): NCBI GI NO: 33146640 NR Description: putative heat shock transcription factor HSF5
  misc_feature (30)..(317): NCBI GI NO: 123684 NR Description: HEAT SHOCK FACTOR PROTEIN HSF24
  misc_feature (44)..(228): NCBI GI NO: 33591096 NR Description: heat shock factor RHSF1
  misc_feature (29)..(234): NCBI GI NO: 15220101 NR Description: heat shock transcription factor, putative
  misc_feature (276)..(276): Xaa is any aa, unknown or other
MAAEHATAAVGEPPPATSQPAEGVTAAAGQRSVPTPFLSKTYQLVDDPAVDDIISWNDDGSAFIVWRPAEFARDLLPKYFKHNNFSSFVRQLNTYGFRKIVPDRWEFANDCFRRGEKRLLCDIHRRKVSPATGAVTVAAAAAAAIPMALPVGSPVYSGEEQVLSSSSPEPPSLQQHPPAPSGSGSGGVVSGDVGEENERLRRENARLARELGQMKKLCNNILLLMSKYAATQQPDAAKEAAAGNCTGESSDAAAAPPLPSILELLPSCRADPAPAXAGTDHEDDEKAGARLFGVSIGRKRMRDESDHHAGVCAAEVKAEPVDARPDQQRQRNATEPQSWPIYRPRPVYHPLRACNGSGSAGSDHDGSNDSR

SEQ ID NO: 26981 - protein, 225 aa, Zea mays subsp. mays
  peptide (1)..(225): Ceres Seq. ID no. 12356245
  misc_feature (1)..(91): Pfam Name: Pfam Description:  HSF-type DNA-binding
  misc_feature (1)..(219): NCBI GI NO: 33591098 NR Description: heat shock factor RHSF2
  misc_feature (1)..(193): NCBI GI NO: 6624618 NR Description: heat shock factor 7 [Arabidopsis thaliana]
  misc_feature (1)..(193): NCBI GI NO: 15234264 NR Description: heat shock transcription factor - like protein
  misc_feature (1)..(89): NCBI GI NO: 30697614 NR Description: heat shock transcription factor 6 (HSF6)
  misc_feature (126)..(158): NCBI GI NO: 30697614 NR Description: heat shock transcription factor 6 (HSF6)
  misc_feature (1)..(82): NCBI GI NO: 38344369 NR Description: OSJNBb0032E06.3
  misc_feature (1)..(164): NCBI GI NO: 33146640 NR Description: putative heat shock transcription factor HSF5
  misc_feature (1)..(171): NCBI GI NO: 123684 NR Description: HEAT SHOCK FACTOR PROTEIN HSF24
  misc_feature (1)..(82): NCBI GI NO: 33591096 NR Description: heat shock factor RHSF1
  misc_feature (1)..(88): NCBI GI NO: 15220101 NR Description: heat shock transcription factor, putative
  misc_feature (130)..(130): Xaa is any aa, unknown or other
MALPVGSPVYSGEEQVLSSSSPEPPSLQQHPPAPSGSGSGGVVSGDVGEENERLRRENARLARELGQMKKLCNNILLLMSKYAATQQPDAAKEAAAGNCTGESSDAAAAPPLPSILELLPSCRADPAPAXAGTDHEDDEKAGARLFGVSIGRKRMRDESDHHAGVCAAEVKAEPVDARPDQQRQRNATEPQSWPIYRPRPVYHPLRACNGSGSAGSDHDGSNDSR

SEQ ID NO: 26982 - DNA, 1513 bp, Zea mays subsp. mays
  misc_feature (1)..(1513): Ceres Seq. ID no. 12409609
accccacccccacgcgaagaggaagaggaagaacccagccaaatcctcagtcctcaggctgctcacagttcgtgctatccgctcgcgctcccggtagtctgcctgctcggcaattcggcatggcgctccaggccgcgacgtccttcctcccctcggccctctcggcgcgcaaggaggggtcgtcggtgaaggactcggcgttcttgggtgtccatctcgcggacgatggcctcaagctggagaccgctgctctgggcctacgcaccaagagggtgatcacgtcggtggccatccgcgcgcaggcggcagcggtgtcctcaccatcagtaacccccgcgtcgccgtccggcaagaagacgctccgcaagggcacggcgatcataaccggcgcgtcgtccggtctcggcctggccacggcgaaggccctggcggagaccggcaagtggcacgtcatcatggcctgccgcgattttctcaaggcgtcgcgcgcggccaaagcggccggcatggacaaggacagcttcaccgtcgtgcacctggacctcgcctccctcgacagcgtccgccagttcgtcaagaacgtgcgccagctggagatgcccgtcgacgtggtggtctgcaacgccgccgtgtaccagcccaccgccaaggagccgtcctacaccgccgacggcttcgagatgagcgtcggcgtcaaccacctcggccacttcctcctcgcccgcgagctcctcagcgacctccagtcctccgactatccctccaagcgcctcatcatcgtcggctccatcaccgggaacacgaacacgctggcggggaacgtgccgccgaaggcgaacctgggtgacctgcgcggcctcgccggcggcctcaacggcattggcggctccgcgatgatcgacggcggggagttcgacggggccaaggcatacaaggacagcaaggtgtgcaacatgctgacgatgcaggagttccaccgccggtaccacgaggagacgggcgtgaccttcgcgtcgctctaccccggctgcatcgccaccacgggcctgttccgcgagcacatcccgctgttccgcctgctcttcccgccattccagaagtacatcaccaaggggtacgtctccgaggaggaggccgggaagcggctgtcgcaggtcgtgagcgaccccagcctgaccaagtccggcgtgtactggagctggaacaagaactcggcgtccttcgagaaccagctctctgaggaggccagcgacgccgacaaggccaagaagctctgggagatcagcgagaagctcgtcggcttggcgtgacgacctgatgcccaccgtggccggcgccggcagccggtgacagttttttcctaggacatgttcgttacttgatctcagtcgacgcgtggtgcactcgtgtcagagtgacaggagaggaagtgtgtacactgtacacgtgtaggcatgtttggttgacttttttgttacgaggttttctgataatatagctgtggagagaatct

SEQ ID NO: 26983 - protein, 435 aa, Zea mays subsp. mays
  peptide (1)..(435): Ceres Seq. ID no. 12409610
  misc_feature (40)..(435): NCBI GI NO: 10720236 NR Description: Protochlorophyllide reductase B
  misc_feature (40)..(435): NCBI GI NO: 10720233 NR Description: Protochlorophyllide reductase
  misc_feature (40)..(435): NCBI GI NO: 10720220 NR Description: Protochlorophyllide reductase
  misc_feature (40)..(435): NCBI GI NO: 266742 NR Description: Protochlorophyllide reductase
  misc_feature (40)..(435): NCBI GI NO: 81946 NR Description: protochlorophyllide reductase (EC 1
  misc_feature (40)..(435): NCBI GI NO: 15234129 NR Description: protochlorophyllide reductase precursor
  misc_feature (40)..(435): NCBI GI NO: 21068893 NR Description: NADPH:protochlorophyllide oxidoreductase
  misc_feature (40)..(435): NCBI GI NO: 15239574 NR Description: NADPH:protochlorophyllide oxidoreductase A
  misc_feature (40)..(435): NCBI GI NO: 968975 NR Description: NADPH:protochlorophyllide oxidoreductase A
  misc_feature (39)..(434): NCBI GI NO: 10720231 NR Description: Protochlorophyllide reductase
PTPTRRGRGRTQPNPQSSGCSQFVLSARAPGSLPARQFGMALQAATSFLPSALSARKEGSSVKDSAFLGVHLADDGLKLETAALGLRTKRVITSVAIRAQAAAVSSPSVTPASPSGKKTLRKGTAIITGASSGLGLATAKALAETGKWHVIMACRDFLKASRAAKAAGMDKDSFTVVHLDLASLDSVRQFVKNVRQLEMPVDVVVCNAAVYQPTAKEPSYTADGFEMSVGVNHLGHFLLARELLSDLQSSDYPSKRLIIVGSITGNTNTLAGNVPPKANLGDLRGLAGGLNGIGGSAMIDGGEFDGAKAYKDSKVCNMLTMQEFHRRYHEETGVTFASLYPGCIATTGLFREHIPLFRLLFPPFQKYITKGYVSEEEAGKRLSQVVSDPSLTKSGVYWSWNKNSASFENQLSEEASDADKAKKLWEISEKLVGLA

SEQ ID NO: 26984 - protein, 396 aa, Zea mays subsp. mays
  peptide (1)..(396): Ceres Seq. ID no. 12409611
  misc_feature (1)..(396): NCBI GI NO: 10720236 NR Description: Protochlorophyllide reductase B
  misc_feature (1)..(396): NCBI GI NO: 10720233 NR Description: Protochlorophyllide reductase
  misc_feature (1)..(396): NCBI GI NO: 10720220 NR Description: Protochlorophyllide reductase
  misc_feature (1)..(396): NCBI GI NO: 266742 NR Description: Protochlorophyllide reductase
  misc_feature (1)..(396): NCBI GI NO: 81946 NR Description: protochlorophyllide reductase (EC 1
  misc_feature (1)..(396): NCBI GI NO: 15234129 NR Description: protochlorophyllide reductase precursor
  misc_feature (1)..(396): NCBI GI NO: 21068893 NR Description: NADPH:protochlorophyllide oxidoreductase
  misc_feature (1)..(396): NCBI GI NO: 15239574 NR Description: NADPH:protochlorophyllide oxidoreductase A
  misc_feature (1)..(396): NCBI GI NO: 968975 NR Description: NADPH:protochlorophyllide oxidoreductase A
  misc_feature (1)..(395): NCBI GI NO: 10720231 NR Description: Protochlorophyllide reductase
MALQAATSFLPSALSARKEGSSVKDSAFLGVHLADDGLKLETAALGLRTKRVITSVAIRAQAAAVSSPSVTPASPSGKKTLRKGTAIITGASSGLGLATAKALAETGKWHVIMACRDFLKASRAAKAAGMDKDSFTVVHLDLASLDSVRQFVKNVRQLEMPVDVVVCNAAVYQPTAKEPSYTADGFEMSVGVNHLGHFLLARELLSDLQSSDYPSKRLIIVGSITGNTNTLAGNVPPKANLGDLRGLAGGLNGIGGSAMIDGGEFDGAKAYKDSKVCNMLTMQEFHRRYHEETGVTFASLYPGCIATTGLFREHIPLFRLLFPPFQKYITKGYVSEEEAGKRLSQVVSDPSLTKSGVYWSWNKNSASFENQLSEEASDADKAKKLWEISEKLVGLA

SEQ ID NO: 26985 - protein, 284 aa, Zea mays subsp. mays
  peptide (1)..(284): Ceres Seq. ID no. 12409612
  misc_feature (1)..(284): NCBI GI NO: 10720236 NR Description: Protochlorophyllide reductase B
  misc_feature (1)..(284): NCBI GI NO: 10720233 NR Description: Protochlorophyllide reductase
  misc_feature (1)..(284): NCBI GI NO: 10720220 NR Description: Protochlorophyllide reductase
  misc_feature (1)..(284): NCBI GI NO: 266742 NR Description: Protochlorophyllide reductase
  misc_feature (1)..(284): NCBI GI NO: 81946 NR Description: protochlorophyllide reductase (EC 1
  misc_feature (1)..(284): NCBI GI NO: 15234129 NR Description: protochlorophyllide reductase precursor
  misc_feature (1)..(284): NCBI GI NO: 21068893 NR Description: NADPH:protochlorophyllide oxidoreductase
  misc_feature (1)..(284): NCBI GI NO: 15239574 NR Description: NADPH:protochlorophyllide oxidoreductase A
  misc_feature (1)..(284): NCBI GI NO: 968975 NR Description: NADPH:protochlorophyllide oxidoreductase A
  misc_feature (1)..(283): NCBI GI NO: 10720231 NR Description: Protochlorophyllide reductase
MACRDFLKASRAAKAAGMDKDSFTVVHLDLASLDSVRQFVKNVRQLEMPVDVVVCNAAVYQPTAKEPSYTADGFEMSVGVNHLGHFLLARELLSDLQSSDYPSKRLIIVGSITGNTNTLAGNVPPKANLGDLRGLAGGLNGIGGSAMIDGGEFDGAKAYKDSKVCNMLTMQEFHRRYHEETGVTFASLYPGCIATTGLFREHIPLFRLLFPPFQKYITKGYVSEEEAGKRLSQVVSDPSLTKSGVYWSWNKNSASFENQLSEEASDADKAKKLWEISEKLVGLA

SEQ ID NO: 26986 - DNA, 848 bp, Zea mays subsp. mays
  misc_feature (1)..(848): Ceres Seq. ID no. 13498757
acacaccccagtttcttccttccttcctcggtctaaagaagcaagcagccatggacggcgacgtcgcgaccggcggcgtgcgggggcaccagcatccacatcacggcgctggacggcatcgtgaacgtgaattcgctcttcaccctggccgccttcctgggcctggcgtggcggccctcctccgacgggccggggctcgccgacggcgccgaccgcacgggcaacccctgcgccgcgggggaccgcgccgagtcggacctcgtctccttccacgtgctcgccttcgcctgcttcctcttctccagcctcgtcgcgctctgcctcaagcagctcgtccgcacctaccccgcgccccaccgccgccgcgccgcctccgcctccgcctccgccgccggcggcccgcaccgcgcggatcaaccgcgcggcgctccgcgtcgggatcctcgcgtccgccgtggggtccgtcgccggatgcggcttcctgatgatggccctcgtcaacgtggtgcaggtgaagctcgggcgactcgggtgcggcgccggcggggccgccgcctgggccgccgtcgtgccgctcgtcaccctcgtcccttccgccatgctcatctacatcggcaccgtcttctacgccttcacacgctagtcggtggcggatcaaggaacactctgaccaaagcacccgtttttcgatcagatctttatctgtgtgatccctcctcagtctttcttgtgtgtgattggtggtgatggcgtgagagaacttccaggggggaacaatgcagctgacttttgtagatttaagatatgtaaaatccatgcgatattatgattgtgttttggagttttgg

SEQ ID NO: 26987 - protein, 160 aa, Zea mays subsp. mays
  peptide (1)..(160): Ceres Seq. ID no. 13498758
  misc_feature (134)..(160): NCBI GI NO: 11359723 NR Description: proteophosphoglycan, membrane-associated
  misc_feature (134)..(160): NCBI GI NO: 13592175 NR Description: ppg3 [Leishmania major]
  misc_feature (134)..(160): NCBI GI NO: 13592175 NR Description: ppg3 [Leishmania major]
  misc_feature (134)..(160): NCBI GI NO: 13592175 NR Description: ppg3 [Leishmania major]
  misc_feature (134)..(160): NCBI GI NO: 13592175 NR Description: ppg3 [Leishmania major]
  misc_feature (134)..(160): NCBI GI NO: 11359723 NR Description: proteophosphoglycan, membrane-associated
  misc_feature (134)..(160): NCBI GI NO: 13592175 NR Description: ppg3 [Leishmania major]
  misc_feature (134)..(160): NCBI GI NO: 13592175 NR Description: ppg3 [Leishmania major]
  misc_feature (134)..(160): NCBI GI NO: 13592175 NR Description: ppg3 [Leishmania major]
  misc_feature (134)..(160): NCBI GI NO: 13592175 NR Description: ppg3 [Leishmania major]
TPQFLPSFLGLKKQAAMDGDVATGGVRGHQHPHHGAGRHREREFALHPGRLPGPGVAALLRRAGARRRRRPHGQPLRRGGPRRVGPRLLPRARLRLLPLLQPRRALPQAARPHLPRAPPPPRRLRLRLRRRRPAPRGSTARRSASGSSRPPWGPSPDAAS

SEQ ID NO: 26988 - protein, 144 aa, Zea mays subsp. mays
  peptide (1)..(144): Ceres Seq. ID no. 13498759
  misc_feature (118)..(144): NCBI GI NO: 11359723 NR Description: proteophosphoglycan, membrane-associated
  misc_feature (118)..(144): NCBI GI NO: 13592175 NR Description: ppg3 [Leishmania major]
  misc_feature (118)..(144): NCBI GI NO: 13592175 NR Description: ppg3 [Leishmania major]
  misc_feature (118)..(144): NCBI GI NO: 13592175 NR Description: ppg3 [Leishmania major]
  misc_feature (118)..(144): NCBI GI NO: 13592175 NR Description: ppg3 [Leishmania major]
  misc_feature (118)..(144): NCBI GI NO: 11359723 NR Description: proteophosphoglycan, membrane-associated
  misc_feature (118)..(144): NCBI GI NO: 13592175 NR Description: ppg3 [Leishmania major]
  misc_feature (118)..(144): NCBI GI NO: 13592175 NR Description: ppg3 [Leishmania major]
  misc_feature (118)..(144): NCBI GI NO: 13592175 NR Description: ppg3 [Leishmania major]
  misc_feature (118)..(144): NCBI GI NO: 13592175 NR Description: ppg3 [Leishmania major]
MDGDVATGGVRGHQHPHHGAGRHREREFALHPGRLPGPGVAALLRRAGARRRRRPHGQPLRRGGPRRVGPRLLPRARLRLLPLLQPRRALPQAARPHLPRAPPPPRRLRLRLRRRRPAPRGSTARRSASGSSRPPWGPSPDAAS

SEQ ID NO: 26989 - protein, 91 aa, Zea mays subsp. mays
  peptide (1)..(91): Ceres Seq. ID no. 13498760
MRLPDDGPRQRGAGEARATRVRRRRGRRLGRRRAARHPRPFRHAHLHRHRLLRLHTLVGGGSRNTLTKAPVFRSDLYLCDPSSVFLVCDWW

SEQ ID NO: 26990 - DNA, 1629 bp, Zea mays subsp. mays
  misc_feature (1)..(1629): Ceres Seq. ID no. 12409598
actaccgtcctgctccacgctcctcggttcccgtgctcgtgtcatcgaccgccggggcccactcaccagtctcccaacacgcagcgagcggcagctcctcctcgtctctcaaagtcgagccgccactcgattaagcgattccaaggcggagcggtgaggtggctatggagtacaggagggtgaaggatcagatttatgatgatttatctcagaaggatgtggaaagcctgagtgggaggacactatctagtgccaatactacagctattggtcccgcttctgcaggaggcgcaaaagccaactctagttggaagctaaagtctgttgttactcttgcattgacattgctaacaagttctcaggcaatattaattgtgtggtcaaaaagagctggaaaatatgaatatagtgtcacaacagctaatttttcggtggaggctttaaaatgccttctatcactagctgctctttttaggacgtggaactgccatggtgtcactgatgataatagattaaccacatcttttgatgaagttggtgtatatccgattcctgctgttctttacatggtaaagaacttattgcagtactatatctttgtctacgtggatgcaccagcttatcaaatcttgaagaacctaaatatcatcagcacaggtgttttgtaccgcatcattttgaagaaaaagctaagtgaaattcagtgggcagcatttgttcttctatgtgctggttgcacaacagctcaacttaatccttcgtctgaccatgtgcttcaaactcctattcaaggttggatgatggcaattgtgatggctcttttgagtggttttgctggggtgtatacagaagctatcattaaaaaacggccatcaagaaacatcaacgtgcagaacttttggctatacatatttggggtgatcttcaatctagttgcaatttgtgttcaggattatgatgcagtcatgaataaaggctttttccatgggtattcattcatcacagttttgatgattctgaaccacgcactgagtggaattgctgtttcaatggtgatgaaatatgctgataacatagtcaaggtctattcaacttcagttgcaatgcttctgacagcagttgtatctgtcttcttgttcaacttccatttatccctcgcattcttccttggatccacagttgtttccgtctcagtgtacctgcactcaattggaaaacttcaaccacagaaataaggattggtgaagatggaatatgggattcattatcggtgtttggtgctttgaggctataagaaaagcttcagtggagatgagatttgattgcatagttgtgaaagttagtaggtggtcaaagtaagaaccagaaatgtatttttggaggggttctagctattatccggtctagtttttgttctattctatcaagtcgagttcgttgatcgctaaccgcatccgtgcctagtttttgatatatcaaacgcacatttattgtaatgctagtattttgaaatactaggtagtacccaattgttgtatggagctagttgtcttttcattctaatgtatagaattaccattctttttaccaccgagcgtgtggaccgatgttgaggccctttttactccc

SEQ ID NO: 26991 - protein, 356 aa, Zea mays subsp. mays
  peptide (1)..(356): Ceres Seq. ID no. 12409599
  misc_feature (115)..(336): Pfam Name: Pfam Description:  Nucleotide-sugar transporter
  misc_feature (1)..(356): NCBI GI NO: 34393556 NR Description: putative CMP-sialic acid transporter
  misc_feature (1)..(289): NCBI GI NO: 30690310 NR Description: hypothetical protein [Arabidopsis thaliana]
  misc_feature (55)..(347): NCBI GI NO: 18422134 NR Description: CMP-sialic acid transporter-like protein
  misc_feature (66)..(347): NCBI GI NO: 10177360 NR Description: CMP-sialic acid transporter-like protein
  misc_feature (254)..(353): NCBI GI NO: 7488414 NR Description: UDP-galactose transport protein homolog F23E12
  misc_feature (38)..(141): NCBI GI NO: 7486015 NR Description: hypothetical protein F23E12
  misc_feature (43)..(349): NCBI GI NO: 6755558 NR Description: solute carrier family 35
  misc_feature (59)..(349): NCBI GI NO: 5453621 NR Description: solute carrier family 35
  misc_feature (18)..(348): NCBI GI NO: 39579880 NR Description: Hypothetical protein CBG24372
  misc_feature (43)..(349): NCBI GI NO: 2499225 NR Description: CMP-sialic acid transporter
MEYRRVKDQIYDDLSQKDVESLSGRTLSSANTTAIGPASAGGAKANSSWKLKSVVTLALTLLTSSQAILIVWSKRAGKYEYSVTTANFSVEALKCLLSLAALFRTWNCHGVTDDNRLTTSFDEVGVYPIPAVLYMVKNLLQYYIFVYVDAPAYQILKNLNIISTGVLYRIILKKKLSEIQWAAFVLLCAGCTTAQLNPSSDHVLQTPIQGWMMAIVMALLSGFAGVYTEAIIKKRPSRNINVQNFWLYIFGVIFNLVAICVQDYDAVMNKGFFHGYSFITVLMILNHALSGIAVSMVMKYADNIVKVYSTSVAMLLTAVVSVFLFNFHLSLAFFLGSTVVSVSVYLHSIGKLQPQK

SEQ ID NO: 26992 - protein, 222 aa, Zea mays subsp. mays
  peptide (1)..(222): Ceres Seq. ID no. 12409600
  misc_feature (1)..(202): Pfam Name: Pfam Description:  Nucleotide-sugar transporter
  misc_feature (1)..(222): NCBI GI NO: 34393556 NR Description: putative CMP-sialic acid transporter
  misc_feature (1)..(155): NCBI GI NO: 30690310 NR Description: hypothetical protein [Arabidopsis thaliana]
  misc_feature (1)..(213): NCBI GI NO: 18422134 NR Description: CMP-sialic acid transporter-like protein
  misc_feature (1)..(213): NCBI GI NO: 10177360 NR Description: CMP-sialic acid transporter-like protein
  misc_feature (120)..(219): NCBI GI NO: 7488414 NR Description: UDP-galactose transport protein homolog F23E12
  misc_feature (1)..(215): NCBI GI NO: 6755558 NR Description: solute carrier family 35
  misc_feature (1)..(215): NCBI GI NO: 5453621 NR Description: solute carrier family 35
  misc_feature (1)..(214): NCBI GI NO: 39579880 NR Description: Hypothetical protein CBG24372
  misc_feature (1)..(215): NCBI GI NO: 2499225 NR Description: CMP-sialic acid transporter
  misc_feature (1)..(215): NCBI GI NO: 18252814 NR Description: CMP-sialic acid transporter [Canis familiaris]
MVKNLLQYYIFVYVDAPAYQILKNLNIISTGVLYRIILKKKLSEIQWAAFVLLCAGCTTAQLNPSSDHVLQTPIQGWMMAIVMALLSGFAGVYTEAIIKKRPSRNINVQNFWLYIFGVIFNLVAICVQDYDAVMNKGFFHGYSFITVLMILNHALSGIAVSMVMKYADNIVKVYSTSVAMLLTAVVSVFLFNFHLSLAFFLGSTVVSVSVYLHSIGKLQPQK

SEQ ID NO: 26993 - DNA, 1710 bp, Zea mays subsp. mays
  misc_feature (1)..(1710): Ceres Seq. ID no. 12366888
gcacgagaccattacctagaacatcctaatcgaaaaattgcgattaatcctcccatcatccatgtccattatatactatactccctagctagctcctagcaggcagagcagtgagctagctgtgtaagaagaagaggaggactggaggaggaagaagactatcgatcgatcgatccatccatccatccatccatcgaattaatggcggcgacaacaccgtacaagcccaagaggatcctgatcacgggcgccgcggggttcatcgcgtcccacgtggcgatccgcatcgtgaacaggtaccctgagtacaaggtggtggtgctggacaagcttgactactgctccaacctcaagaacctcctccccgtcatgggctccggcggcaacaacaacttcaagttcgtcaagggcgacatcgccagcgccgacctcgtcagcttcatcctggccaccgagggcatcgacaccgtgatgcacttcgcggcgcagacccacgtggacaactccttcggcaactccttggagttcaccaagaacaacatctacggcacccacgtcctcctcgagtcctgccgcaccgccgccgcccagatccgccgcttcatccacgtcagcaccgacgaggtgtacggcgagactgacggcgacgccgtggtgggcaaccacgaggcgtcgcagctgctgccccaccaacccgtacgcggccaccaaggcccggggcccgagatgctggtgatggcgtacggccggagctacggcctccccgtcatcaccacgcgcgggaacaacgtgtacgggcccaaccagttcccggagaagctcatccccaagttcatgctgctggccatgaggggccagcgcctgcccatccacggcgacggctccaacgtccgcagctacctctactgcgacgacgtggccgaggcgttcgaggtcgtcctccaccgcggcgaggtgggccacgtctacaacatcggcaccaagaaggagcgcacggtgatggacgtggccagggacatcagcggcctcttcggcgtgcgcccggaggaggccatccagttcgtcgacaacaggcccttcaacgaccagaggtacttcctcgacgacgagaagctcaaggggctcggctggcgcgagaggacgcgctgggaggatggcctcaggaagaccatggagtggtacgtggccaaccccgactactggggggacgtgtccggggcgctgctgccgcatcccaaggcgggcggcgtcagcgtcatgaccaccacgacggaccacggcgcccggagatcgtcgtcggagatgctcgacgatcgtttcatttccatcccctcttctccgggagcggcgacggttgcaggaaacgacgatgacggcgcaccagctgcaatgccgtacagcaatggcggcgccaccaatggaaccaccaccgtgcattgattgcatgcctgcctgggtcgtcgtttcgtcatatcacatcacatccacacctgaacaattataattgttttttcaagctattatttgtattatttgctactactactagatcgagtattattgttatgtagtatgttgtttgagtccgcacgtgccgttgtattccgctgttttgttggatccatcacctcccgttggattaaagtgagtatttaaactgtaaggacaaatttattattttaaaatggatatatatgaaatttgttgttg

SEQ ID NO: 26994 - protein, 412 aa, Zea mays subsp. mays
  peptide (1)..(412): Ceres Seq. ID no. 12366889
  misc_feature (12)..(331): Pfam Name: Pfam Description:  NAD dependent epimerase/dehydratase family
  misc_feature (5)..(346): NCBI GI NO: 25405640 NR Description: hypothetical protein F22G10.13
  misc_feature (7)..(346): NCBI GI NO: 15218420 NR Description: dTDP-glucose 4,6-dehydratase, putative
  misc_feature (7)..(346): NCBI GI NO: 15231926 NR Description: dTDP-glucose 4,6-dehydratase, putative
  misc_feature (176)..(346): NCBI GI NO: 18404494 NR Description: dTDP-D-glucose 4,6-dehydratase, putative
  misc_feature (176)..(346): NCBI GI NO: 15081769 NR Description: At1g53500/F22G10_13 [Arabidopsis thaliana]
  misc_feature (10)..(345): NCBI GI NO: 7657641 NR Description: dTDP-D-glucose 4,6-dehydratase [Homo sapiens]
  misc_feature (10)..(345): NCBI GI NO: 30173340 NR Description: dTDP-D-glucose 4,6-dehydratase
  misc_feature (102)..(345): NCBI GI NO: 34875984 NR Description: similar to 2610025M23Rik protein
  misc_feature (10)..(69): NCBI GI NO: 34875984 NR Description: similar to 2610025M23Rik protein
  misc_feature (65)..(121): NCBI GI NO: 34875984 NR Description: similar to 2610025M23Rik protein
MAATTPYKPKRILITGAAGFIASHVAIRIVNRYPEYKVVVLDKLDYCSNLKNLLPVMGSGGNNNFKFVKGDIASADLVSFILATEGIDTVMHFAAQTHVDNSFGNSLEFTKNNIYGTHVLLESCRTAAAQIRRFIHVSTDEVYGETDGDAVVGNHEASQLLPHQPVRGHQGPGPEMLVMAYGRSYGLPVITTRGNNVYGPNQFPEKLIPKFMLLAMRGQRLPIHGDGSNVRSYLYCDDVAEAFEVVLHRGEVGHVYNIGTKKERTVMDVARDISGLFGVRPEEAIQFVDNRPFNDQRYFLDDEKLKGLGWRERTRWEDGLRKTMEWYVANPDYWGDVSGALLPHPKAGGVSVMTTTTDHGARRSSSEMLDDRFISIPSSPGAATVAGNDDDGAPAAMPYSNGGATNGTTTVH

SEQ ID NO: 26995 - protein, 356 aa, Zea mays subsp. mays
  peptide (1)..(356): Ceres Seq. ID no. 12366890
  misc_feature (1)..(275): Pfam Name: Pfam Description:  NAD dependent epimerase/dehydratase family
  misc_feature (1)..(290): NCBI GI NO: 25405640 NR Description: hypothetical protein F22G10.13
  misc_feature (1)..(290): NCBI GI NO: 15218420 NR Description: dTDP-glucose 4,6-dehydratase, putative
  misc_feature (1)..(290): NCBI GI NO: 15231926 NR Description: dTDP-glucose 4,6-dehydratase, putative
  misc_feature (120)..(290): NCBI GI NO: 18404494 NR Description: dTDP-D-glucose 4,6-dehydratase, putative
  misc_feature (120)..(290): NCBI GI NO: 15081769 NR Description: At1g53500/F22G10_13 [Arabidopsis thaliana]
  misc_feature (1)..(289): NCBI GI NO: 7657641 NR Description: dTDP-D-glucose 4,6-dehydratase [Homo sapiens]
  misc_feature (1)..(289): NCBI GI NO: 30173340 NR Description: dTDP-D-glucose 4,6-dehydratase
  misc_feature (46)..(289): NCBI GI NO: 34875984 NR Description: similar to 2610025M23Rik protein
  misc_feature (1)..(13): NCBI GI NO: 34875984 NR Description: similar to 2610025M23Rik protein
  misc_feature (9)..(65): NCBI GI NO: 34875984 NR Description: similar to 2610025M23Rik protein
MGSGGNNNFKFVKGDIASADLVSFILATEGIDTVMHFAAQTHVDNSFGNSLEFTKNNIYGTHVLLESCRTAAAQIRRFIHVSTDEVYGETDGDAVVGNHEASQLLPHQPVRGHQGPGPEMLVMAYGRSYGLPVITTRGNNVYGPNQFPEKLIPKFMLLAMRGQRLPIHGDGSNVRSYLYCDDVAEAFEVVLHRGEVGHVYNIGTKKERTVMDVARDISGLFGVRPEEAIQFVDNRPFNDQRYFLDDEKLKGLGWRERTRWEDGLRKTMEWYVANPDYWGDVSGALLPHPKAGGVSVMTTTTDHGARRSSSEMLDDRFISIPSSPGAATVAGNDDDGAPAAMPYSNGGATNGTTTVH

SEQ ID NO: 26996 - protein, 322 aa, Zea mays subsp. mays
  peptide (1)..(322): Ceres Seq. ID no. 12366891
  misc_feature (1)..(241): Pfam Name: Pfam Description:  NAD dependent epimerase/dehydratase family
  misc_feature (1)..(256): NCBI GI NO: 25405640 NR Description: hypothetical protein F22G10.13
  misc_feature (1)..(256): NCBI GI NO: 15218420 NR Description: dTDP-glucose 4,6-dehydratase, putative
  misc_feature (1)..(256): NCBI GI NO: 15231926 NR Description: dTDP-glucose 4,6-dehydratase, putative
  misc_feature (86)..(256): NCBI GI NO: 18404494 NR Description: dTDP-D-glucose 4,6-dehydratase, putative
  misc_feature (86)..(256): NCBI GI NO: 15081769 NR Description: At1g53500/F22G10_13 [Arabidopsis thaliana]
  misc_feature (1)..(255): NCBI GI NO: 7657641 NR Description: dTDP-D-glucose 4,6-dehydratase [Homo sapiens]
  misc_feature (1)..(255): NCBI GI NO: 30173340 NR Description: dTDP-D-glucose 4,6-dehydratase
  misc_feature (12)..(255): NCBI GI NO: 34875984 NR Description: similar to 2610025M23Rik protein
  misc_feature (1)..(31): NCBI GI NO: 34875984 NR Description: similar to 2610025M23Rik protein
  misc_feature (1)..(233): NCBI GI NO: 21313168 NR Description: RIKEN cDNA 2610025M23 [Mus musculus]
MHFAAQTHVDNSFGNSLEFTKNNIYGTHVLLESCRTAAAQIRRFIHVSTDEVYGETDGDAVVGNHEASQLLPHQPVRGHQGPGPEMLVMAYGRSYGLPVITTRGNNVYGPNQFPEKLIPKFMLLAMRGQRLPIHGDGSNVRSYLYCDDVAEAFEVVLHRGEVGHVYNIGTKKERTVMDVARDISGLFGVRPEEAIQFVDNRPFNDQRYFLDDEKLKGLGWRERTRWEDGLRKTMEWYVANPDYWGDVSGALLPHPKAGGVSVMTTTTDHGARRSSSEMLDDRFISIPSSPGAATVAGNDDDGAPAAMPYSNGGATNGTTTVH

SEQ ID NO: 26997 - DNA, 1318 bp, Zea mays subsp. mays
  misc_feature (1)..(1318): Ceres Seq. ID no. 12365440
gctcactcgcccctcctcttctcctcgctcgcagcaagccgggaacgtacgaacagcacgagcaggggggaggggaagaagaggaggagacctaccataccatagattcagagccagatacccaatcagtatcctgctgtaccattaccaccaggcacgcaccagcaggttaccaaaatctcgtgtggagggaaatggcgcccagcagctacgaggtggcggcttccatcctcctctgcgccgaggacagcagcagcatcctggacctcgaagcggaggccgaggaggaagcgctactggcgcggagcggggagccccgcggcggcgcggagttccccgtgccgtccgaggaatgcgtcgccggtttcctggagactgaggcggcgcacatgccgcgggaggactacgccgagaggctgcgcggcgcggggatggatctccgcgtccggacggacgccatcgactggatttggaaggttcacacgtgctacggtttcggccctctcactgcctgcttggccgtcaactacctggaccgcttcctctcgctctaccagcttccggaaggcaaggcttggatgacacagctgctgtccgtggcgtgcttgtccctggccgccaagatggaggagacctacgtcccttcgtccctggacctgcaggccggggacgcgcggtacgtgttcgaggcgaagacgatccagaggatggagctcctggtcctcagcacgctcaagtggaggatgcaagcggtcacccccttgtcgtacgtcgactacttcctccaccggctccgaggcggcgccgcgccgagcagacgcgccgtcctccgatccgcggagctcatcctgtgcatcgccagagggacgcactgcttggatttcaggccctcggagatcgccttggccgtcgccgccaccgtggccggcgaagagcgcgccgtggacatcgacagggccttcacccaccgtgtacataaggagagggtgtcgcgatgcctcgaagcgatccagcaggccaccgccaccatggccctgccgcagccgctgaaaagtgaaggcccgagcagcagcggccgcagggcctcgtcttcctcggccaccgtgccgcggagccccaccggggtgctggacgctggctgcctgagctacaggagagccgccgccgccgccgcctcgcacgcgagctccagctggcgcgacgaggacgacgacgactgccccccggctgtctgcagcaagaggaggaagattagcagatgattaaagccaatgatggacggatgaaaaagtcaagcggtttttgatcgcactgactg

SEQ ID NO: 26998 - protein, 419 aa, Zea mays subsp. mays
  peptide (1)..(419): Ceres Seq. ID no. 12365441
  misc_feature (117)..(249): Pfam Name: Pfam Description:  Cyclin, N-terminal domain
  misc_feature (73)..(415): NCBI GI NO: 18916916 NR Description: cyclin [Oryza sativa (japonica cultivar-group)]
  misc_feature (65)..(418): NCBI GI NO: 19070615 NR Description: D-type cyclin [Zea mays]
  misc_feature (65)..(231): NCBI GI NO: 19070617 NR Description: D-type cyclin [Zea mays]
  misc_feature (66)..(384): NCBI GI NO: 4160298 NR Description: cyclin D2.1 protein [Nicotiana tabacum]
  misc_feature (81)..(394): NCBI GI NO: 19070611 NR Description: D-type cyclin [Zea mays]
  misc_feature (73)..(418): NCBI GI NO: 34906810 NR Description: D-type cyclin-like protein
  misc_feature (111)..(419): NCBI GI NO: 7484663 NR Description: cyclin D-like protein - red goosefoot
  misc_feature (77)..(419): NCBI GI NO: 22091622 NR Description: cyclin D2 [Daucus carota]
  misc_feature (58)..(405): NCBI GI NO: 1076312 NR Description: cyclin delta-2 - Arabidopsis thaliana
  misc_feature (105)..(416): NCBI GI NO: 15227224 NR Description: Cyclin D2;1; protein id: At2g22490.1
SLAPPLLLARSKPGTYEQHEQGGGEEEEETYHTIDSEPDTQSVSCCTITTRHAPAGYQNLVWREMAPSSYEVAASILLCAEDSSSILDLEAEAEEEALLARSGEPRGGAEFPVPSEECVAGFLETEAAHMPREDYAERLRGAGMDLRVRTDAIDWIWKVHTCYGFGPLTACLAVNYLDRFLSLYQLPEGKAWMTQLLSVACLSLAAKMEETYVPSSLDLQAGDARYVFEAKTIQRMELLVLSTLKWRMQAVTPLSYVDYFLHRLRGGAAPSRRAVLRSAELILCIARGTHCLDFRPSEIALAVAATVAGEERAVDIDRAFTHRVHKERVSRCLEAIQQATATMALPQPLKSEGPSSSGRRASSSSATVPRSPTGVLDAGCLSYRRAAAAAASHASSSWRDEDDDDCPPAVCSKRRKISR

SEQ ID NO: 26999 - protein, 355 aa, Zea mays subsp. mays
  peptide (1)..(355): Ceres Seq. ID no. 12365442
  misc_feature (53)..(185): Pfam Name: Pfam Description:  Cyclin, N-terminal domain
  misc_feature (9)..(351): NCBI GI NO: 18916916 NR Description: cyclin [Oryza sativa (japonica cultivar-group)]
  misc_feature (1)..(354): NCBI GI NO: 19070615 NR Description: D-type cyclin [Zea mays]
  misc_feature (1)..(167): NCBI GI NO: 19070617 NR Description: D-type cyclin [Zea mays]
  misc_feature (2)..(320): NCBI GI NO: 4160298 NR Description: cyclin D2.1 protein [Nicotiana tabacum]
  misc_feature (17)..(330): NCBI GI NO: 19070611 NR Description: D-type cyclin [Zea mays]
  misc_feature (9)..(354): NCBI GI NO: 34906810 NR Description: D-type cyclin-like protein
  misc_feature (47)..(355): NCBI GI NO: 7484663 NR Description: cyclin D-like protein - red goosefoot
  misc_feature (13)..(355): NCBI GI NO: 22091622 NR Description: cyclin D2 [Daucus carota]
  misc_feature (1)..(341): NCBI GI NO: 1076312 NR Description: cyclin delta-2 - Arabidopsis thaliana
  misc_feature (41)..(352): NCBI GI NO: 15227224 NR Description: Cyclin D2;1; protein id: At2g22490.1
MAPSSYEVAASILLCAEDSSSILDLEAEAEEEALLARSGEPRGGAEFPVPSEECVAGFLETEAAHMPREDYAERLRGAGMDLRVRTDAIDWIWKVHTCYGFGPLTACLAVNYLDRFLSLYQLPEGKAWMTQLLSVACLSLAAKMEETYVPSSLDLQAGDARYVFEAKTIQRMELLVLSTLKWRMQAVTPLSYVDYFLHRLRGGAAPSRRAVLRSAELILCIARGTHCLDFRPSEIALAVAATVAGEERAVDIDRAFTHRVHKERVSRCLEAIQQATATMALPQPLKSEGPSSSGRRASSSSATVPRSPTGVLDAGCLSYRRAAAAAASHASSSWRDEDDDDCPPAVCSKRRKISR

SEQ ID NO: 27000 - protein, 290 aa, Zea mays subsp. mays
  peptide (1)..(290): Ceres Seq. ID no. 12365443
  misc_feature (1)..(120): Pfam Name: Pfam Description:  Cyclin, N-terminal domain
  misc_feature (1)..(286): NCBI GI NO: 18916916 NR Description: cyclin [Oryza sativa (japonica cultivar-group)]
  misc_feature (1)..(289): NCBI GI NO: 19070615 NR Description: D-type cyclin [Zea mays]
  misc_feature (1)..(102): NCBI GI NO: 19070617 NR Description: D-type cyclin [Zea mays]
  misc_feature (1)..(255): NCBI GI NO: 4160298 NR Description: cyclin D2.1 protein [Nicotiana tabacum]
  misc_feature (1)..(265): NCBI GI NO: 19070611 NR Description: D-type cyclin [Zea mays]
  misc_feature (1)..(289): NCBI GI NO: 34906810 NR Description: D-type cyclin-like protein
  misc_feature (1)..(290): NCBI GI NO: 7484663 NR Description: cyclin D-like protein - red goosefoot
  misc_feature (1)..(290): NCBI GI NO: 22091622 NR Description: cyclin D2 [Daucus carota]
  misc_feature (1)..(276): NCBI GI NO: 1076312 NR Description: cyclin delta-2 - Arabidopsis thaliana
  misc_feature (1)..(287): NCBI GI NO: 15227224 NR Description: Cyclin D2;1; protein id: At2g22490.1
MPREDYAERLRGAGMDLRVRTDAIDWIWKVHTCYGFGPLTACLAVNYLDRFLSLYQLPEGKAWMTQLLSVACLSLAAKMEETYVPSSLDLQAGDARYVFEAKTIQRMELLVLSTLKWRMQAVTPLSYVDYFLHRLRGGAAPSRRAVLRSAELILCIARGTHCLDFRPSEIALAVAATVAGEERAVDIDRAFTHRVHKERVSRCLEAIQQATATMALPQPLKSEGPSSSGRRASSSSATVPRSPTGVLDAGCLSYRRAAAAAASHASSSWRDEDDDDCPPAVCSKRRKISR

SEQ ID NO: 27001 - DNA, 1855 bp, Zea mays subsp. mays
  misc_feature (1)..(1855): Ceres Seq. ID no. 12409594
  misc_feature (1273)..(1273): n is a, c, t, g, unknown, or other
  misc_feature (1268)..(1268): n is a, c, t, g, unknown, or other
  misc_feature (1275)..(1275): n is a, c, t, g, unknown, or other
agccccgccctgtgcctctcgcggtcgcggcacggacggcaccctcgggcctcaggtcccaccctcgcctccgcccgcgccccgggcggtaccctcaccgccgggtccacctcgcctccgcccgcacaaacagccgaccgcccccctggccgcgacccgcgcccagaccacacgagcgcagtgcacgcaggcagaggagggccgcgcgagctctgcgcggtggcctgtggtggggcgagggaagcgaggcgaggcggcccggcagccgcctcctgactcagtcggtgggagctggaggtgcgagctgacggtccgggtcaccgaccggcagcacggcggccacagcggaggcaaccggcgggggcggcgaccccggggccgcggcgaggcagcgctgggacctgccggccggaaacattgcaatggggaaagaagttgttgatatgtctactgatgaagaatcagattgcgtagttatgtgtccacctaacagaaatgctgatcatgaggaagctgtgagtggcagccatgatgaagattcttcaggaaggcaagagaacccttatgctgtgaactcacatatgaacacccgtggccaggaagatgtgtctgtaaacccagacctgctcaagctgattcatcagcaggagtcttctgtcagcaattcaccatcaaaacctgcaggagctagacagcaagggtctagccatactgtccctgagtcatgcactattgcacctgaaagaaggtcatctggagcaggaacttgtgctccaatttcttatcccaccagcagcggggaaaaactttcagatataagtagctcctcaccaagaagcatgacaaagagtccatcagtcacatgcaggaagcctctccaatctgacaatacttctcacagtcaagaagaggactcatattctgtcacttcttcaactgtaacttcagcgagagctggaaaaactaagaagacaacggttgctgttgcacctacatttgtctgtgataatcgtgctgagaagagaggagagttttacacaaaattagaagaaaagcgcaaggctttggaagaggagaaactccaagcagaggccagaaagcaggaagaggaagaagaagctctaagacaactgaggaagaacttggtcgtccgagcgaaacccgtgccgagcttctaccaagaacccccaccaaaggttgaacttaagaaggtgcctccaactcgtgccaagtcaccaaagctgacgcggaggaagagctgcagcganacccntnacacaccagagggaggaaacggcggcggcggcgcagtgtgctgccggctgcaccgccacagcatcgggaactccaaagacgtcggcagcaaggcacaatgctctccaaagactggaccagctgctaagtccagggcgcccccaaatccagggaagacccgagggcttccatgaagaaagcgggacagcagccaagcgccgccgctgtacaaacctgacccgtgaagcatccattgcaatgccgtttttcatcttaatccatataccctcacatcacccggaaagatggcctcatgccccggcagcagacagtgtgcctggtgctggattgttttcttttttggggcgttgcccttgtaagaacctggctgcctgccagagaccgtgcgctgtgtccgtatctgtaaatttgctgcaagttttgtatggggtgaccgagtcggtcctgtgtgagaaccaaacggccgggcatattgtcattgcgtgggggcagcattcgctgatactatgtaatgtgacctgagtgagctgttgtaacctgttgtgggcacatattggcaaagcgattctgattgctgttg

SEQ ID NO: 27002 - protein, 341 aa, Zea mays subsp. mays
  peptide (1)..(341): Ceres Seq. ID no. 12409595
  misc_feature (1)..(330): NCBI GI NO: 34897180 NR Description: unknown protein
  misc_feature (141)..(341): NCBI GI NO: 34393229 NR Description: putative seed specific protein
  misc_feature (55)..(341): NCBI GI NO: 21553401 NR Description: unknown [Arabidopsis thaliana]
  misc_feature (55)..(341): NCBI GI NO: 18404945 NR Description: expressed protein; protein id: At1g54460
  misc_feature (6)..(296): NCBI GI NO: 9294199 NR Description: gb|AAF04893
  misc_feature (6)..(296): NCBI GI NO: 15228950 NR Description: unknown protein; protein id: At3g23090.1
  misc_feature (1)..(271): NCBI GI NO: 34393229 NR Description: putative seed specific protein
  misc_feature (84)..(279): NCBI GI NO: 32395575 NR Description: seed specific protein Bn15D14A [Brassica napus]
  misc_feature (139)..(281): NCBI GI NO: 30679219 NR Description: expressed protein [Arabidopsis thaliana]
  misc_feature (143)..(281): NCBI GI NO: 6175167 NR Description: unknown protein [Arabidopsis thaliana]
  misc_feature (282)..(282): Xaa is any aa, unknown or other
  misc_feature (284)..(284): Xaa is any aa, unknown or other
  misc_feature (285)..(285): Xaa is any aa, unknown or other
MGKEVVDMSTDEESDCVVMCPPNRNADHEEAVSGSHDEDSSGRQENPYAVNSHMNTRGQEDVSVNPDLLKLIHQQESSVSNSPSKPAGARQQGSSHTVPESCTIAPERRSSGAGTCAPISYPTSSGEKLSDISSSSPRSMTKSPSVTCRKPLQSDNTSHSQEEDSYSVTSSTVTSARAGKTKKTTVAVAPTFVCDNRAEKRGEFYTKLEEKRKALEEEKLQAEARKQEEEEEALRQLRKNLVVRAKPVPSFYQEPPPKVELKKVPPTRAKSPKLTRRKSCSXTXXTPEGGNGGGGAVCCRLHRHSIGNSKDVGSKAQCSPKTGPAAKSRAPPNPGKTRGLP

SEQ ID NO: 27003 - protein, 334 aa, Zea mays subsp. mays
  peptide (1)..(334): Ceres Seq. ID no. 12409596
  misc_feature (1)..(323): NCBI GI NO: 34897180 NR Description: unknown protein
  misc_feature (134)..(334): NCBI GI NO: 34393229 NR Description: putative seed specific protein
  misc_feature (48)..(334): NCBI GI NO: 21553401 NR Description: unknown [Arabidopsis thaliana]
  misc_feature (48)..(334): NCBI GI NO: 18404945 NR Description: expressed protein; protein id: At1g54460
  misc_feature (1)..(289): NCBI GI NO: 9294199 NR Description: gb|AAF04893
  misc_feature (1)..(289): NCBI GI NO: 15228950 NR Description: unknown protein; protein id: At3g23090.1
  misc_feature (1)..(264): NCBI GI NO: 34393229 NR Description: putative seed specific protein
  misc_feature (77)..(272): NCBI GI NO: 32395575 NR Description: seed specific protein Bn15D14A [Brassica napus]
  misc_feature (132)..(274): NCBI GI NO: 30679219 NR Description: expressed protein [Arabidopsis thaliana]
  misc_feature (136)..(274): NCBI GI NO: 6175167 NR Description: unknown protein [Arabidopsis thaliana]
  misc_feature (275)..(275): Xaa is any aa, unknown or other
  misc_feature (277)..(277): Xaa is any aa, unknown or other
  misc_feature (278)..(278): Xaa is any aa, unknown or other
MSTDEESDCVVMCPPNRNADHEEAVSGSHDEDSSGRQENPYAVNSHMNTRGQEDVSVNPDLLKLIHQQESSVSNSPSKPAGARQQGSSHTVPESCTIAPERRSSGAGTCAPISYPTSSGEKLSDISSSSPRSMTKSPSVTCRKPLQSDNTSHSQEEDSYSVTSSTVTSARAGKTKKTTVAVAPTFVCDNRAEKRGEFYTKLEEKRKALEEEKLQAEARKQEEEEEALRQLRKNLVVRAKPVPSFYQEPPPKVELKKVPPTRAKSPKLTRRKSCSXTXXTPEGGNGGGGAVCCRLHRHSIGNSKDVGSKAQCSPKTGPAAKSRAPPNPGKTRGLP

SEQ ID NO: 27004 - protein, 323 aa, Zea mays subsp. mays
  peptide (1)..(323): Ceres Seq. ID no. 12409597
  misc_feature (1)..(312): NCBI GI NO: 34897180 NR Description: unknown protein
  misc_feature (123)..(323): NCBI GI NO: 34393229 NR Description: putative seed specific protein
  misc_feature (37)..(323): NCBI GI NO: 21553401 NR Description: unknown [Arabidopsis thaliana]
  misc_feature (37)..(323): NCBI GI NO: 18404945 NR Description: expressed protein; protein id: At1g54460
  misc_feature (1)..(278): NCBI GI NO: 9294199 NR Description: gb|AAF04893
  misc_feature (1)..(278): NCBI GI NO: 15228950 NR Description: unknown protein; protein id: At3g23090.1
  misc_feature (1)..(253): NCBI GI NO: 34393229 NR Description: putative seed specific protein
  misc_feature (66)..(261): NCBI GI NO: 32395575 NR Description: seed specific protein Bn15D14A [Brassica napus]
  misc_feature (121)..(263): NCBI GI NO: 30679219 NR Description: expressed protein [Arabidopsis thaliana]
  misc_feature (125)..(263): NCBI GI NO: 6175167 NR Description: unknown protein [Arabidopsis thaliana]
  misc_feature (264)..(264): Xaa is any aa, unknown or other
  misc_feature (266)..(266): Xaa is any aa, unknown or other
  misc_feature (267)..(267): Xaa is any aa, unknown or other
MCPPNRNADHEEAVSGSHDEDSSGRQENPYAVNSHMNTRGQEDVSVNPDLLKLIHQQESSVSNSPSKPAGARQQGSSHTVPESCTIAPERRSSGAGTCAPISYPTSSGEKLSDISSSSPRSMTKSPSVTCRKPLQSDNTSHSQEEDSYSVTSSTVTSARAGKTKKTTVAVAPTFVCDNRAEKRGEFYTKLEEKRKALEEEKLQAEARKQEEEEEALRQLRKNLVVRAKPVPSFYQEPPPKVELKKVPPTRAKSPKLTRRKSCSXTXXTPEGGNGGGGAVCCRLHRHSIGNSKDVGSKAQCSPKTGPAAKSRAPPNPGKTRGLP

SEQ ID NO: 27005 - DNA, 1227 bp, Zea mays subsp. mays
  misc_feature (1)..(1227): Ceres Seq. ID no. 12414078
ctttccgcccaaaacacttcccagccctccacgcaccccgctgccgcggctcgaacataaaccctagagccgccggcccggtcgcgctagcgacacaaatctcaaatcacccggagagaactcgctcgcgaaggctgaactcatggctcgcgtcttcgttgggaacctggatccgcgtgtcacggcgcgggagattgaggacgagttccgcacgtttggggttctgaagagtgtatgggttgctaggaaaccaccagggtttgccttcattgacttcgatgaccgcagggatgcacaagatgccattcgcgatttggatggtaagaatggttggagggttgagctgtcaaccaaagatggtggtggccgtggccgagaccgtaatggttctgatatgaagtgctatgagtgtggtgaagttggccactttgcacgtgaatgtcgcttacggattggttcgggagggctgggtagtggaaggcgtcgcagccgaagtcctagatatcgcagccggagccgaagtcgcagccggagcccaagacatcgaaggagcccaagctatggcagaaggagctacagcccacgagatcgttctcctaggaggcgaagttacagcaggtcgccgccactgccaccaccgcctcctagaaataacagcatgtcaccacggggagcccgagaaatgagcagatcgtcaccaccacctcccaaaaataacagcagttcaccacgggaagcccgagaaatgagcagatcgccaccaccacctgccaaaaataaccgcagttcaccacgggaagcccgagaaatgagcagatcgccgccgccaccacctcccagaaataacagcaggtcaccaccgggagctcgagatgtgagcaggtcgccgccaccacctcctgatgccagaagaagctatagcagatccccagaacagcagccccagcacgagtccccatatgccaatgacgcctgagaatatttagctgctcaaagatgctggaaaatgctaaggggcccagcatgttttgcccatgcgcgtcggtacaacttataggatccagtctgagattttgctcgtgttttgggtttcccttggacacaccgctgctgataccattgtagagggaggagcataacgtttccgtttcgagttgactttgggcacttatagctgtcaagacatgacctggttcttgttagatttatatcactagattgcttttg

SEQ ID NO: 27006 - protein, 277 aa, Zea mays subsp. mays
  peptide (1)..(277): Ceres Seq. ID no. 12414079
  misc_feature (4)..(61): Pfam Name: a.k.a. RRM, RBD, or RNP domain Pfam Description: RNA recognition motif.
  misc_feature (1)..(196): NCBI GI NO: 15224171 NR Description: putative RSZp22 splicing factor
  misc_feature (1)..(189): NCBI GI NO: 15236000 NR Description: splicing factor SRZ_22; protein id: At4g31580
  misc_feature (1)..(189): NCBI GI NO: 25294318 NR Description: splicing factor RSZp22
  misc_feature (1)..(179): NCBI GI NO: 25294317 NR Description: protein T23E23.2 [imported] - Arabidopsis thaliana
  misc_feature (1)..(179): NCBI GI NO: 18395314 NR Description: splicing factor SRZ_21; protein id: At1g23860
  misc_feature (1)..(179): NCBI GI NO: 25294319 NR Description: splicing factor RSZp21
  misc_feature (3)..(225): NCBI GI NO: 3929380 NR Description: Splicing factor, arginine/serine-rich 7
  misc_feature (3)..(225): NCBI GI NO: 30584739 NR Description: Homo sapiens splicing factor
  misc_feature (3)..(227): NCBI GI NO: 34862002 NR Description: similar to 9430065L19Rik protein
  misc_feature (3)..(227): NCBI GI NO: 22122585 NR Description: RIKEN cDNA 9430065L19
MARVFVGNLDPRVTAREIEDEFRTFGVLKSVWVARKPPGFAFIDFDDRRDAQDAIRDLDGKNGWRVELSTKDGGGRGRDRNGSDMKCYECGEVGHFARECRLRIGSGGLGSGRRRSRSPRYRSRSRSRSRSPRHRRSPSYGRRSYSPRDRSPRRRSYSRSPPLPPPPPRNNSMSPRGAREMSRSSPPPPKNNSSSPREAREMSRSPPPPAKNNRSSPREAREMSRSPPPPPPRNNSRSPPGARDVSRSPPPPPDARRSYSRSPEQQPQHESPYANDA

SEQ ID NO: 27007 - protein, 193 aa, Zea mays subsp. mays
  peptide (1)..(193): Ceres Seq. ID no. 12414080
  misc_feature (35)..(188): Pfam Name: Pfam Description:  Formin Homology 2 Domain
  misc_feature (1)..(112): NCBI GI NO: 15224171 NR Description: putative RSZp22 splicing factor
  misc_feature (1)..(105): NCBI GI NO: 15236000 NR Description: splicing factor SRZ_22; protein id: At4g31580
  misc_feature (1)..(105): NCBI GI NO: 25294318 NR Description: splicing factor RSZp22
  misc_feature (1)..(95): NCBI GI NO: 25294317 NR Description: protein T23E23.2 [imported] - Arabidopsis thaliana
  misc_feature (1)..(95): NCBI GI NO: 18395314 NR Description: splicing factor SRZ_21; protein id: At1g23860
  misc_feature (1)..(95): NCBI GI NO: 25294319 NR Description: splicing factor RSZp21
  misc_feature (1)..(141): NCBI GI NO: 3929380 NR Description: Splicing factor, arginine/serine-rich 7
  misc_feature (1)..(141): NCBI GI NO: 30584739 NR Description: Homo sapiens splicing factor
  misc_feature (1)..(143): NCBI GI NO: 34862002 NR Description: similar to 9430065L19Rik protein
  misc_feature (1)..(143): NCBI GI NO: 22122585 NR Description: RIKEN cDNA 9430065L19
MKCYECGEVGHFARECRLRIGSGGLGSGRRRSRSPRYRSRSRSRSRSPRHRRSPSYGRRSYSPRDRSPRRRSYSRSPPLPPPPPRNNSMSPRGAREMSRSSPPPPKNNSSSPREAREMSRSPPPPAKNNRSSPREAREMSRSPPPPPPRNNSRSPPGARDVSRSPPPPPDARRSYSRSPEQQPQHESPYANDA

SEQ ID NO: 27008 - DNA, 647 bp, Zea mays subsp. mays
  misc_feature (1)..(647): Ceres Seq. ID no. 12357877
ctagccgcctgcctctcctcctccagagctcgtcgccaccggccaccgccaccctcgatcacgccgtccgtcgaggtaaggtcagcatggtgagggtcagtgtgctcaacgatgcgctcaagtccatgtacaacgctgagaagattggcaagaggcaggtcatgatcaggccgtcatccaaggtcatcatcaagttcctgacggtcatgcagcgccatggctacattggagagttcgagtacgttgatgaccaccgatcgggcaagattgtggtcgaactcaacgggaggctgaacaagtgcggcgtcatcagccctcgctttgatattggcgtgaaagacatcgagggatggactgcaaggctgctcccgtccaggcagttcggatacatcgtcctcacgacttcggcaggcatcatggaccacgaggaggcccgccggaagagcgtcggaggcaaggttctaggtttcttctattgaagaagctgagaatctttgttatggcctgcctgcctgtcttactctctcagactagagtacctgttattttactttaatatgtctctctcagactagagagccttcttttacttgaatattggttactgcattggtctttcactttaaaatcggtgactgcattgatcg

SEQ ID NO: 27009 - protein, 158 aa, Zea mays subsp. mays
  peptide (1)..(158): Ceres Seq. ID no. 12357878
  misc_feature (33)..(158): Pfam Name: Pfam Description:  Ribosomal protein S8
  misc_feature (29)..(158): NCBI GI NO: 15223001 NR Description: ribosomal protein S15; protein id: At1g07770
  misc_feature (29)..(158): NCBI GI NO: 133793 NR Description: 40S RIBOSOMAL PROTEIN S15A (PPCB8)
  misc_feature (29)..(158): NCBI GI NO: 6683481 NR Description: wrp15a [Citrullus lanatus]
  misc_feature (29)..(158): NCBI GI NO: 15231316 NR Description: cytoplasmic ribosomal protein S15a -like
  misc_feature (29)..(158): NCBI GI NO: 13560779 NR Description: cytoplasmic ribosomal protein S15a [Daucus carota]
  misc_feature (29)..(158): NCBI GI NO: 28411802 NR Description: ribosomal protein S15
  misc_feature (29)..(158): NCBI GI NO: 2130985 NR Description: r-protein BnS15a [Brassica napus]
  misc_feature (29)..(158): NCBI GI NO: 15225502 NR Description: 40S ribosomal protein S15A; protein id: At2g39590
  misc_feature (29)..(158): NCBI GI NO: 6322271 NR Description: Homology to rat S15a; Rps22ap
  misc_feature (29)..(158): NCBI GI NO: 14326103 NR Description: ribosomal protein S22 [Candida albicans]
SRLPLLLQSSSPPATATLDHAVRRGKVSMVRVSVLNDALKSMYNAEKIGKRQVMIRPSSKVIIKFLTVMQRHGYIGEFEYVDDHRSGKIVVELNGRLNKCGVISPRFDIGVKDIEGWTARLLPSRQFGYIVLTTSAGIMDHEEARRKSVGGKVLGFFY

SEQ ID NO: 27010 - protein, 130 aa, Zea mays subsp. mays; identical to SEQ ID NO: 24824
  peptide (1)..(130): Ceres Seq. ID no. 12357879
  misc_feature (5)..(130): Pfam Name: Pfam Description:  Ribosomal protein S8
  misc_feature (1)..(130): NCBI GI NO: 15223001 NR Description: ribosomal protein S15; protein id: At1g07770
  misc_feature (1)..(130): NCBI GI NO: 133793 NR Description: 40S RIBOSOMAL PROTEIN S15A (PPCB8)
  misc_feature (1)..(130): NCBI GI NO: 6683481 NR Description: wrp15a [Citrullus lanatus]
  misc_feature (1)..(130): NCBI GI NO: 15231316 NR Description: cytoplasmic ribosomal protein S15a -like
  misc_feature (1)..(130): NCBI GI NO: 13560779 NR Description: cytoplasmic ribosomal protein S15a [Daucus carota]
  misc_feature (1)..(130): NCBI GI NO: 28411802 NR Description: ribosomal protein S15
  misc_feature (1)..(130): NCBI GI NO: 2130985 NR Description: r-protein BnS15a [Brassica napus]
  misc_feature (1)..(130): NCBI GI NO: 15225502 NR Description: 40S ribosomal protein S15A; protein id: At2g39590
  misc_feature (1)..(130): NCBI GI NO: 6322271 NR Description: Homology to rat S15a; Rps22ap
  misc_feature (1)..(130): NCBI GI NO: 14326103 NR Description: ribosomal protein S22 [Candida albicans]

SEQ ID NO: 27011 - protein, 117 aa, Zea mays subsp. mays; identical to SEQ ID NO: 24826
  peptide (1)..(117): Ceres Seq. ID no. 12357880
  misc_feature (1)..(117): Pfam Name: Pfam Description:  Ribosomal protein S8
  misc_feature (1)..(117): NCBI GI NO: 15223001 NR Description: ribosomal protein S15; protein id: At1g07770
  misc_feature (1)..(117): NCBI GI NO: 133793 NR Description: 40S RIBOSOMAL PROTEIN S15A (PPCB8)
  misc_feature (1)..(117): NCBI GI NO: 6683481 NR Description: wrp15a [Citrullus lanatus]
  misc_feature (1)..(117): NCBI GI NO: 15231316 NR Description: cytoplasmic ribosomal protein S15a -like
  misc_feature (1)..(117): NCBI GI NO: 13560779 NR Description: cytoplasmic ribosomal protein S15a [Daucus carota]
  misc_feature (1)..(117): NCBI GI NO: 28411802 NR Description: ribosomal protein S15
  misc_feature (1)..(117): NCBI GI NO: 2130985 NR Description: r-protein BnS15a [Brassica napus]
  misc_feature (1)..(117): NCBI GI NO: 15225502 NR Description: 40S ribosomal protein S15A; protein id: At2g39590
  misc_feature (1)..(117): NCBI GI NO: 6322271 NR Description: Homology to rat S15a; Rps22ap
  misc_feature (1)..(117): NCBI GI NO: 14326103 NR Description: ribosomal protein S22 [Candida albicans]

SEQ ID NO: 27012 - DNA, 1531 bp, Zea mays subsp. mays
  misc_feature (1)..(1531): Ceres Seq. ID no. 12435048
  misc_feature (338)..(338): n is a, c, t, g, unknown, or other
gcacgagaccattacctagaacatcctaatcgaaaaaagtcgcatcgcacgccatcagcagctagcgcgctcctcgagcccagcagagaaaggccggcagcgctaatcgtaatagccatgggctccaccgccgccgacgtggccgcggtggtggacgaggaggcgtgcatgtacgcgatgcagctggcgtcgtcgtccatcctgccctgaagaacgccatcgagctgggcctgctggaggtgctgcagaaggaggccggcggcggcaaggcggcgctggcgccgaggaggtggtggcgcggatgcccgcggcgcccagcgaccccgccgccgccgcgncattggtggaccgcatgctccgcctgctcgcctcctacgacgtcgtccggtgccagatggaggaccgggacggccggtacgagcgccgctactccgccgcgcccgtctgcaagtggctcacccccaacgaggacggcgtgtccatggccgccctcgcgctcatgaaccaggacaaggtcctcatggagagctggtactatctcaaggacgcggtgctggacggcggcatcccgttcaacaaggcgtacgggatgacggcgttcgagtaccacggcacggacgcgcgcttcaaccgcgtgttcaacgagggcatgaagaaccactcggtgatcatcaccaagaagctgctggacttctacacgggcttcgagggcgtgtcgacgctggtggacgtgggcggcggcgtgggcgccacgctgcacgccatcacgtcccgccacccgcacatctccggggtcaacttcgacctgccgcacgtcatctccgaggcgccgccgttccccggcgtgcgccacgtgggcggggacatgttcgcgtccgtgcccgccggcgacgccatcctcatgaagtggatcctccacgactggagcgacgcgcactgcgccacgctgctcaagaactgctacgacgcgctgccggaaaatggcaaggtcatcgtcgtcgagtgcgtgctgccggtcaacacggaggccacccccaaggcgcagggcgtgttccacgtcgacatgatcatgctcgcgcacaaccccggcggcaaggagcggtacgagcgcgagttccgcgagctcgccaagggcgccggcttctccgggttcaaggccacctacatctacgccaacgcctgggccatcgagttcatcaagtgaatacggctaccaccgtcgccgcgatgagatgcatggctgccacatgcatgcttgcttgcttggtcctcgtatcgtacgtcgccgtcgtcgtcttcttctggttgcgctgctaccttgctgctctcgccctcgcgtatgcatgtacttttgcttaattttctttcttcatatcatgcactctggctggcctagactgcccccgatccatggtggccatgtcttcggtacgtcttgtcgagctcttgcatgtcgtggattctaaattcttcttctgcgtcgaattgtctctgccatgtgcgagtaataacaatcaaggttatacttacc

SEQ ID NO: 27013 - protein, 300 aa, Zea mays subsp. mays
  peptide (1)..(300): Ceres Seq. ID no. 12435049
  misc_feature (36)..(277): Pfam Name: Pfam Description:  O-methyltransferase
  misc_feature (1)..(300): NCBI GI NO: 729135 NR Description: Caffeic acid 3-O-methyltransferase
  misc_feature (1)..(300): NCBI GI NO: 29839259 NR Description: Caffeic acid 3-O-methyltransferase
  misc_feature (1)..(300): NCBI GI NO: 28569609 NR Description: caffeic acid O-methyltransferase [Sorghum bicolor]
  misc_feature (1)..(300): NCBI GI NO: 18033964 NR Description: O-methyltransferase [Sorghum bicolor]
  misc_feature (1)..(300): NCBI GI NO: 30385246 NR Description: caffeic acid O-methyltransferase
  misc_feature (1)..(300): NCBI GI NO: 14578615 NR Description: caffeic acid O-methyltransferase
  misc_feature (1)..(300): NCBI GI NO: 14578617 NR Description: caffeic acid O-methyltransferase
  misc_feature (1)..(300): NCBI GI NO: 14578613 NR Description: caffeic acid O-methyltransferase
  misc_feature (1)..(300): NCBI GI NO: 4104224 NR Description: caffeic acid O-methyltransferase; LPOMT3
  misc_feature (1)..(300): NCBI GI NO: 14578611 NR Description: caffeic acid O-methyltransferase
  misc_feature (13)..(13): Xaa is any aa, unknown or other
MPAAPSDPAAAAXLVDRMLRLLASYDVVRCQMEDRDGRYERRYSAAPVCKWLTPNEDGVSMAALALMNQDKVLMESWYYLKDAVLDGGIPFNKAYGMTAFEYHGTDARFNRVFNEGMKNHSVIITKKLLDFYTGFEGVSTLVDVGGGVGATLHAITSRHPHISGVNFDLPHVISEAPPFPGVRHVGGDMFASVPAGDAILMKWILHDWSDAHCATLLKNCYDALPENGKVIVVECVLPVNTEATPKAQGVFHVDMIMLAHNPGGKERYEREFRELAKGAGFSGFKATYIYANAWAIEFIK

SEQ ID NO: 27014 - protein, 283 aa, Zea mays subsp. mays
  peptide (1)..(283): Ceres Seq. ID no. 12435050
  misc_feature (19)..(260): Pfam Name: Pfam Description:  O-methyltransferase
  misc_feature (1)..(283): NCBI GI NO: 729135 NR Description: Caffeic acid 3-O-methyltransferase
  misc_feature (1)..(283): NCBI GI NO: 29839259 NR Description: Caffeic acid 3-O-methyltransferase
  misc_feature (1)..(283): NCBI GI NO: 28569609 NR Description: caffeic acid O-methyltransferase [Sorghum bicolor]
  misc_feature (1)..(283): NCBI GI NO: 18033964 NR Description: O-methyltransferase [Sorghum bicolor]
  misc_feature (1)..(283): NCBI GI NO: 30385246 NR Description: caffeic acid O-methyltransferase
  misc_feature (1)..(283): NCBI GI NO: 14578615 NR Description: caffeic acid O-methyltransferase
  misc_feature (1)..(283): NCBI GI NO: 14578617 NR Description: caffeic acid O-methyltransferase
  misc_feature (1)..(283): NCBI GI NO: 14578613 NR Description: caffeic acid O-methyltransferase
  misc_feature (1)..(283): NCBI GI NO: 4104224 NR Description: caffeic acid O-methyltransferase; LPOMT3
  misc_feature (1)..(283): NCBI GI NO: 14578611 NR Description: caffeic acid O-methyltransferase
MLRLLASYDVVRCQMEDRDGRYERRYSAAPVCKWLTPNEDGVSMAALALMNQDKVLMESWYYLKDAVLDGGIPFNKAYGMTAFEYHGTDARFNRVFNEGMKNHSVIITKKLLDFYTGFEGVSTLVDVGGGVGATLHAITSRHPHISGVNFDLPHVISEAPPFPGVRHVGGDMFASVPAGDAILMKWILHDWSDAHCATLLKNCYDALPENGKVIVVECVLPVNTEATPKAQGVFHVDMIMLAHNPGGKERYEREFRELAKGAGFSGFKATYIYANAWAIEFIK

SEQ ID NO: 27015 - protein, 269 aa, Zea mays subsp. mays
  peptide (1)..(269): Ceres Seq. ID no. 12435051
  misc_feature (5)..(246): Pfam Name: Pfam Description:  O-methyltransferase
  misc_feature (1)..(269): NCBI GI NO: 729135 NR Description: Caffeic acid 3-O-methyltransferase
  misc_feature (1)..(269): NCBI GI NO: 29839259 NR Description: Caffeic acid 3-O-methyltransferase
  misc_feature (1)..(269): NCBI GI NO: 28569609 NR Description: caffeic acid O-methyltransferase [Sorghum bicolor]
  misc_feature (1)..(269): NCBI GI NO: 18033964 NR Description: O-methyltransferase [Sorghum bicolor]
  misc_feature (1)..(269): NCBI GI NO: 30385246 NR Description: caffeic acid O-methyltransferase
  misc_feature (1)..(269): NCBI GI NO: 14578615 NR Description: caffeic acid O-methyltransferase
  misc_feature (1)..(269): NCBI GI NO: 14578617 NR Description: caffeic acid O-methyltransferase
  misc_feature (1)..(269): NCBI GI NO: 14578613 NR Description: caffeic acid O-methyltransferase
  misc_feature (1)..(269): NCBI GI NO: 4104224 NR Description: caffeic acid O-methyltransferase; LPOMT3
  misc_feature (1)..(269): NCBI GI NO: 14578611 NR Description: caffeic acid O-methyltransferase
MEDRDGRYERRYSAAPVCKWLTPNEDGVSMAALALMNQDKVLMESWYYLKDAVLDGGIPFNKAYGMTAFEYHGTDARFNRVFNEGMKNHSVIITKKLLDFYTGFEGVSTLVDVGGGVGATLHAITSRHPHISGVNFDLPHVISEAPPFPGVRHVGGDMFASVPAGDAILMKWILHDWSDAHCATLLKNCYDALPENGKVIVVECVLPVNTEATPKAQGVFHVDMIMLAHNPGGKERYEREFRELAKGAGFSGFKATYIYANAWAIEFIK

SEQ ID NO: 27016 - DNA, 1131 bp, Zea mays subsp. mays
  misc_feature (1)..(1131): Ceres Seq. ID no. 12409590
  misc_feature (700)..(700): n is a, c, t, g, unknown, or other
ctaatcaaaaatcgctcactacgcgaccgctagctactcgatcggatcctgaccacgcccgcctaccagaccaccaccaccaccaccaccaccacccacaaatccccaatggcgaggcgcatcgccgtggcggcagcgttcctggcgctggccgtggtggctcccgccgcgctggcgcaggctcccgggcccgcggcgacgccgagcgggccgcccgaacgtgacggcgatcctggagaagggcgggcagttcaccatgttcatgcggctgatgaaggagacgcagcaggacacgcagctgaacagccagctgaacagctcgtactgccagcagcggcggcgggtacacggtgttcgcgcccaccgacaacgccttcaacaacctcaagcccggcacgctcaactcgctgacgcagcagcagcaggtggcgctggtgcagggccacgtcctgccccagttctacagcatggactccttccagaccgccagcaaccccgtccgcacccaggcctccggccgcgacgggccctacacgctcaacatcaccgccaccgccaacaaccaggtcaacgtctcctcgggcgtcgccgaggtcaccatcaacaacgcgctcagcgccgtcaagcccctcgccgtctactccgtcgacaaggtgctcctgcccctggagctgttcggggccaaggcgcccgccgccgngcccgccgcgtcccaggggaagcccaagaagggcgggtcctcggacgctccctccgggtcggccggctccgacgacgccgcgccaacgggcgccgccggcgccagggccgtcggctggagcttcgccggcctcgccgccgtccttggctgcctgttgtgagagtgagaccgtgcgtcgtttctagggacggacggacggacgacaagctagttgaagatgagaatgccatgaccgaggccgggcatgggcgccttcttccatttccatctttgtctgagattgtcagtggccgtgttcccttgcccttctttctctctgtttatttatttaaacttctttcatctcgctagtttctttaatttgtactattggtggtttgtaagattggcttatgtgattcaatttatgcgcctgccgctgttgatactgc

SEQ ID NO: 27017 - protein, 264 aa, Zea mays subsp. mays
  peptide (1)..(264): Ceres Seq. ID no. 12409591
  misc_feature (1)..(23): NCBI GI NO: 34910950 NR Description: putative arabinogalactan-like protein
  misc_feature (1)..(22): NCBI GI NO: 15242651 NR Description: fasciclin-like arabinogalactan-protein
  misc_feature (1)..(22): NCBI GI NO: 21553523 NR Description: arabinogalactan protein-like
  misc_feature (1)..(22): NCBI GI NO: 18379157 NR Description: fasciclin-like arabinogalactan-protein
  misc_feature (1)..(22): NCBI GI NO: 24417458 NR Description: unknown [Arabidopsis thaliana]
  misc_feature (1)..(22): NCBI GI NO: 2129473 NR Description: arabinogalactan-like protein - loblolly pine
  misc_feature (1)..(22): NCBI GI NO: 18399381 NR Description: fasciclin-like arabinogalactan-protein
  misc_feature (1)..(22): NCBI GI NO: 25350183 NR Description: probable surface protein
  misc_feature (1)..(22): NCBI GI NO: 15241423 NR Description: fasciclin-like arabinogalactan-protein, putative
  misc_feature (1)..(22): NCBI GI NO: 30841338 NR Description: arabinogalactan protein [Gossypium hirsutum]
  misc_feature (148)..(148): Xaa is any aa, unknown or other
MFMRLMKETQQDTQLNSQLNSSYCQQRRRVHGVRAHRQRLQQPQARHAQLADAAAAGGAGAGPRPAPVLQHGLLPDRQQPRPHPGLRPRRALHAQHHRHRQQPGQRLLGRRRGHHQQRAQRRQAPRRLLRRQGAPAPGAVRGQGARRXARRVPGEAQEGRVLGRSLRVGRLRRRRANGRRRRQGRRLELRRPRRRPWLPVVRVRPCVVSRDGRTDDKLVEDENAMTEAGHGRLLPFPSLSEIVSGRVPLPFFLSVYLFKLLSSR

SEQ ID NO: 27018 - protein, 262 aa, Zea mays subsp. mays
  peptide (1)..(262): Ceres Seq. ID no. 12409592
  misc_feature (1)..(21): NCBI GI NO: 34910950 NR Description: putative arabinogalactan-like protein
  misc_feature (1)..(20): NCBI GI NO: 15242651 NR Description: fasciclin-like arabinogalactan-protein
  misc_feature (1)..(20): NCBI GI NO: 21553523 NR Description: arabinogalactan protein-like
  misc_feature (1)..(20): NCBI GI NO: 18379157 NR Description: fasciclin-like arabinogalactan-protein
  misc_feature (1)..(20): NCBI GI NO: 24417458 NR Description: unknown [Arabidopsis thaliana]
  misc_feature (1)..(20): NCBI GI NO: 2129473 NR Description: arabinogalactan-like protein - loblolly pine
  misc_feature (1)..(20): NCBI GI NO: 18399381 NR Description: fasciclin-like arabinogalactan-protein
  misc_feature (1)..(20): NCBI GI NO: 25350183 NR Description: probable surface protein
  misc_feature (1)..(20): NCBI GI NO: 15241423 NR Description: fasciclin-like arabinogalactan-protein, putative
  misc_feature (1)..(20): NCBI GI NO: 30841338 NR Description: arabinogalactan protein [Gossypium hirsutum]
  misc_feature (146)..(146): Xaa is any aa, unknown or other
MRLMKETQQDTQLNSQLNSSYCQQRRRVHGVRAHRQRLQQPQARHAQLADAAAAGGAGAGPRPAPVLQHGLLPDRQQPRPHPGLRPRRALHAQHHRHRQQPGQRLLGRRRGHHQQRAQRRQAPRRLLRRQGAPAPGAVRGQGARRXARRVPGEAQEGRVLGRSLRVGRLRRRRANGRRRRQGRRLELRRPRRRPWLPVVRVRPCVVSRDGRTDDKLVEDENAMTEAGHGRLLPFPSLSEIVSGRVPLPFFLSVYLFKLLSSR

SEQ ID NO: 27019 - protein, 259 aa, Zea mays subsp. mays
  peptide (1)..(259): Ceres Seq. ID no. 12409593
  misc_feature (1)..(18): NCBI GI NO: 34910950 NR Description: putative arabinogalactan-like protein
  misc_feature (1)..(17): NCBI GI NO: 15242651 NR Description: fasciclin-like arabinogalactan-protein
  misc_feature (1)..(17): NCBI GI NO: 21553523 NR Description: arabinogalactan protein-like
  misc_feature (1)..(17): NCBI GI NO: 18379157 NR Description: fasciclin-like arabinogalactan-protein
  misc_feature (1)..(17): NCBI GI NO: 24417458 NR Description: unknown [Arabidopsis thaliana]
  misc_feature (1)..(17): NCBI GI NO: 2129473 NR Description: arabinogalactan-like protein - loblolly pine
  misc_feature (1)..(17): NCBI GI NO: 18399381 NR Description: fasciclin-like arabinogalactan-protein
  misc_feature (1)..(17): NCBI GI NO: 25350183 NR Description: probable surface protein
  misc_feature (1)..(17): NCBI GI NO: 15241423 NR Description: fasciclin-like arabinogalactan-protein, putative
  misc_feature (1)..(17): NCBI GI NO: 30841338 NR Description: arabinogalactan protein [Gossypium hirsutum]
  misc_feature (143)..(143): Xaa is any aa, unknown or other
MKETQQDTQLNSQLNSSYCQQRRRVHGVRAHRQRLQQPQARHAQLADAAAAGGAGAGPRPAPVLQHGLLPDRQQPRPHPGLRPRRALHAQHHRHRQQPGQRLLGRRRGHHQQRAQRRQAPRRLLRRQGAPAPGAVRGQGARRXARRVPGEAQEGRVLGRSLRVGRLRRRRANGRRRRQGRRLELRRPRRRPWLPVVRVRPCVVSRDGRTDDKLVEDENAMTEAGHGRLLPFPSLSEIVSGRVPLPFFLSVYLFKLLSSR

SEQ ID NO: 27020 - DNA, 1562 bp, Zea mays subsp. mays
  misc_feature (1)..(1562): Ceres Seq. ID no. 12341687
aagagattgataataataataatagttcggtgcctttttctagcggggaggaggcaggcggcgcaatctggcaccggccatcacgttccctccggccgcttccccctccctgccctccctttccccagatccgaagccattaaaaccagcggatctcacctcggggcgcgtccgcggcatctgggcaagcgagtggtagagcccgcagccatgagatggtatgcatcggtagcctcctgagggcgctggtcctgagtgcggcggcgtctgcgggcaggcgccgggggcccaggatcctgtgtggccacgaggcggatgtacgcgtgactcctcggcacggacacggctggcgcagattccgggcagtcacgggaaggatgatgctggactcctctgactgtgcctctgctgccgccgccgcggagacggggcaggtgcagccgcagcgccgcgcggtgggggccgtgcccctggcgcacgacggcggctacgccagcggcggatgggagagagaagatggcaaactgagttgtggatactcaagttttagaggcaagagagctacgatggaagatttctatgatgtaaaactaactgaaattgatggacaagctgttagcctgtttggtgttttcgacggtcatggaggatcacgtgctgctgagtatttgagggagcacttgtttgataaccttctcaagcaccctgatttcttgacagatacaaagcttgcgataagtgaaacatatcagaaaacagatacagatttcttggaatcagaagcaagcgctttcagggatgatggttcaacagcttcaactgcacttttggtgggtgaccatttatatgttgcaaatgttggtgattctcgtgccgttatttcaaaagctggcaaagctatggcgctttcagaagatcacaaacctaacagaattgatgagcgaaagagaattgaaaatgctggtggtattgtcatttgggctggcacttggagggtgggtggtgtattggcaatgtcccgtgcatttggcaatcgtttactgaagccatatgtggtggcagaacctgaaattcaggaagaacaggtcagtggtgggctggaatgcctggttcttgctagtgatgggctttgggatgttgtggaaaatgaggaagctgttttccttgggagatcggaggacacgccagagtctgcagctaggaaattgacagagattgcttactctcgcggcagcgctgacaatatcacatgcatcgtggtccaatttcaccatgacaaaaccggatgagccgtatggctgccaatttcagttgtaccctgcttcagtctattattatcctgcaagctgggtggtggccggtgggcttctcccagatttaccctgcttcatgctattattatcctgcaagccgggcggtggggtttctcagatctatcgctcatgtagcaactttcaagcactcgtccattgattcttttgttgtcttgtaggaaacatttgttccgacaggtgtagtagacacttttaaactgataattcaataaacgtatgtttacggct

SEQ ID NO: 27021 - protein, 357 aa, Zea mays subsp. mays
  peptide (1)..(357): Ceres Seq. ID no. 12341688
  misc_feature (104)..(344): Pfam Name: Pfam Description:  Protein phosphatase 2C
  misc_feature (1)..(356): NCBI GI NO: 18423476 NR Description: protein phosphatase 2C
  misc_feature (1)..(356): NCBI GI NO: 18086420 NR Description: AT5g53140/MFH8_8 [Arabidopsis thaliana]
  misc_feature (118)..(356): NCBI GI NO: 9757995 NR Description: protein phosphatase 2C-like [Arabidopsis thaliana]
  misc_feature (118)..(357): NCBI GI NO: 34912708 NR Description: putative protein phosphatase 2C-like protein
  misc_feature (89)..(357): NCBI GI NO: 30689144 NR Description: protein phosphatase 2C (PP2C), putative
  misc_feature (93)..(356): NCBI GI NO: 15238651 NR Description: Protein phosphatase 2C-like protein
  misc_feature (94)..(351): NCBI GI NO: 20146110 NR Description: protein phosphatase 2C
  misc_feature (93)..(356): NCBI GI NO: 18416366 NR Description: protein phosphatase 2C -like protein
  misc_feature (89)..(353): NCBI GI NO: 38345197 NR Description: OSJNBa0015K02.7
  misc_feature (100)..(287): NCBI GI NO: 7486331 NR Description: hypothetical protein F28M20
MVCIGSLLRALVLSAAASAGRRRGPRILCGHEADVRVTPRHGHGWRRFRAVTGRMMLDSSDCASAAAAAETGQVQPQRRAVGAVPLAHDGGYASGGWEREDGKLSCGYSSFRGKRATMEDFYDVKLTEIDGQAVSLFGVFDGHGGSRAAEYLREHLFDNLLKHPDFLTDTKLAISETYQKTDTDFLESEASAFRDDGSTASTALLVGDHLYVANVGDSRAVISKAGKAMALSEDHKPNRIDERKRIENAGGIVIWAGTWRVGGVLAMSRAFGNRLLKPYVVAEPEIQEEQVSGGLECLVLASDGLWDVVENEEAVFLGRSEDTPESAARKLTEIAYSRGSADNITCIVVQFHHDKTG

SEQ ID NO: 27022 - protein, 303 aa, Zea mays subsp. mays
  peptide (1)..(303): Ceres Seq. ID no. 12341689
  misc_feature (50)..(290): Pfam Name: Pfam Description:  Protein phosphatase 2C
  misc_feature (1)..(302): NCBI GI NO: 18423476 NR Description: protein phosphatase 2C
  misc_feature (1)..(302): NCBI GI NO: 18086420 NR Description: AT5g53140/MFH8_8 [Arabidopsis thaliana]
  misc_feature (64)..(302): NCBI GI NO: 9757995 NR Description: protein phosphatase 2C-like [Arabidopsis thaliana]
  misc_feature (64)..(303): NCBI GI NO: 34912708 NR Description: putative protein phosphatase 2C-like protein
  misc_feature (35)..(303): NCBI GI NO: 30689144 NR Description: protein phosphatase 2C (PP2C), putative
  misc_feature (39)..(302): NCBI GI NO: 15238651 NR Description: Protein phosphatase 2C-like protein
  misc_feature (40)..(297): NCBI GI NO: 20146110 NR Description: protein phosphatase 2C
  misc_feature (39)..(302): NCBI GI NO: 18416366 NR Description: protein phosphatase 2C -like protein
  misc_feature (35)..(299): NCBI GI NO: 38345197 NR Description: OSJNBa0015K02.7
  misc_feature (46)..(233): NCBI GI NO: 7486331 NR Description: hypothetical protein F28M20
MMLDSSDCASAAAAAETGQVQPQRRAVGAVPLAHDGGYASGGWEREDGKLSCGYSSFRGKRATMEDFYDVKLTEIDGQAVSLFGVFDGHGGSRAAEYLREHLFDNLLKHPDFLTDTKLAISETYQKTDTDFLESEASAFRDDGSTASTALLVGDHLYVANVGDSRAVISKAGKAMALSEDHKPNRIDERKRIENAGGIVIWAGTWRVGGVLAMSRAFGNRLLKPYVVAEPEIQEEQVSGGLECLVLASDGLWDVVENEEAVFLGRSEDTPESAARKLTEIAYSRGSADNITCIVVQFHHDKTG

SEQ ID NO: 27023 - protein, 302 aa, Zea mays subsp. mays
  peptide (1)..(302): Ceres Seq. ID no. 12341690
  misc_feature (49)..(289): Pfam Name: Pfam Description:  Protein phosphatase 2C
  misc_feature (1)..(301): NCBI GI NO: 18423476 NR Description: protein phosphatase 2C
  misc_feature (1)..(301): NCBI GI NO: 18086420 NR Description: AT5g53140/MFH8_8 [Arabidopsis thaliana]
  misc_feature (63)..(301): NCBI GI NO: 9757995 NR Description: protein phosphatase 2C-like [Arabidopsis thaliana]
  misc_feature (63)..(302): NCBI GI NO: 34912708 NR Description: putative protein phosphatase 2C-like protein
  misc_feature (34)..(302): NCBI GI NO: 30689144 NR Description: protein phosphatase 2C (PP2C), putative
  misc_feature (38)..(301): NCBI GI NO: 15238651 NR Description: Protein phosphatase 2C-like protein
  misc_feature (39)..(296): NCBI GI NO: 20146110 NR Description: protein phosphatase 2C
  misc_feature (38)..(301): NCBI GI NO: 18416366 NR Description: protein phosphatase 2C -like protein
  misc_feature (34)..(298): NCBI GI NO: 38345197 NR Description: OSJNBa0015K02.7
  misc_feature (45)..(232): NCBI GI NO: 7486331 NR Description: hypothetical protein F28M20
MLDSSDCASAAAAAETGQVQPQRRAVGAVPLAHDGGYASGGWEREDGKLSCGYSSFRGKRATMEDFYDVKLTEIDGQAVSLFGVFDGHGGSRAAEYLREHLFDNLLKHPDFLTDTKLAISETYQKTDTDFLESEASAFRDDGSTASTALLVGDHLYVANVGDSRAVISKAGKAMALSEDHKPNRIDERKRIENAGGIVIWAGTWRVGGVLAMSRAFGNRLLKPYVVAEPEIQEEQVSGGLECLVLASDGLWDVVENEEAVFLGRSEDTPESAARKLTEIAYSRGSADNITCIVVQFHHDKTG

SEQ ID NO: 27024 - DNA, 1223 bp, Zea mays subsp. mays
  misc_feature (1)..(1223): Ceres Seq. ID no. 12341691
gtcggccttggcccaagccaaggaccctttcgcttctctcagtctacgactaggcggcggcggcggccttcacgcacgagccttcgccgcctatacttgcgcttcgtcgagccggtgaattgtggtctaagaacaagagggaaggatctttctccagacttcgcaattttggacgacgaggttttgtgttatctggtttgtcgggatggatgccaaaaagttcctgcagctggtcgaagagaagaaaaggaggatcctcgagaagaaagaagccccactaaagtggcagcagaagcttgaagcagcagttaacgtcaaagctgatgcagaagcgaaggcgaaaaaactaaaatcaagaaagcataggaggagaggagattcttcctcggactctgacagtgactatgacagcgatgttgatcggaaacaccggaggaggaaggatcgtagaaggaacaagaagcatgagcattctgactctgatgatgccaggagacgcaagcataggtccagaaagggctcagactcaagtgatgagagcaaccgtgaatatgaaagcgggtctgaagaagaacgtacaaagaagaagcgttcgcacagaagaaagcatcacagacactcttcaatgtcagactctgaagacaacagtgatgaggatgagcggagatctgccaaggaccattctcagccccgcagacgccaccatcagtcttctgatgatggctcggacaagatcaggtcgagacatgggaagcgtctgagatcaagttacgagaatgctcggccagattccaacaaccataagcatctcaggagccaatccttggaggagtcatcagatgatagagatgatgatggatcagagaagataagaaatggcaaaaggtatcacaagaatcatcaccgtcaccaccatcatcatcgtcaccatcagcaccaccatgaaagacataatagctcagcagaacctaatgacaggaggcaagtactgaaagatgaccagagggcccttgaaggtagcagtgcagactgaaggtatccaccagaggacggaaagattgattctccattcgtgatgttcccagttatttgttgtgctgataacatttctttgatttgggctatgaaacgtggtcattctaccaattatgttggttttgagaatttggtaatactgagttaacaatgaagcatgattatctgaaatgtttaagtattagatc

SEQ ID NO: 27025 - protein, 275 aa, Zea mays subsp. mays
  peptide (1)..(275): Ceres Seq. ID no. 12341692
  misc_feature (29)..(226): Pfam Name: Pfam Description:  Caldesmon
  misc_feature (1)..(275): NCBI GI NO: 34895374 NR Description: P0698A04.25
  misc_feature (1)..(259): NCBI GI NO: 18379151 NR Description: expressed protein; protein id: At2g01100
  misc_feature (20)..(270): NCBI GI NO: 15218071 NR Description: DEAD/DEAH box RNA helicase, putative
  misc_feature (36)..(250): NCBI GI NO: 39580460 NR Description: Hypothetical protein CBG20540
  misc_feature (40)..(265): NCBI GI NO: 38181860 NR Description: Unknown (protein for MGC:63496) [Danio rerio]
  misc_feature (50)..(260): NCBI GI NO: 31201363 NR Description: ENSANGP00000011118 [Anopheles gambiae]
  misc_feature (15)..(259): NCBI GI NO: 12834839 NR Description: unnamed protein product [Mus musculus]
  misc_feature (37)..(275): NCBI GI NO: 39591417 NR Description: Hypothetical protein CBG20922
  misc_feature (11)..(270): NCBI GI NO: 24580684 NR Description: CG2839-PA [Drosophila melanogaster]
  misc_feature (30)..(265): NCBI GI NO: 32407697 NR Description: hypothetical protein [Neurospora crassa]
MDAKKFLQLVEEKKRRILEKKEAPLKWQQKLEAAVNVKADAEAKAKKLKSRKHRRRGDSSSDSDSDYDSDVDRKHRRRKDRRRNKKHEHSDSDDARRRKHRSRKGSDSSDESNREYESGSEEERTKKKRSHRRKHHRHSSMSDSEDNSDEDERRSAKDHSQPRRRHHQSSDDGSDKIRSRHGKRLRSSYENARPDSNNHKHLRSQSLEESSDDRDDDGSEKIRNGKRYHKNHHRHHHHHRHHQHHHERHNSSAEPNDRRQVLKDDQRALEGSSAD

SEQ ID NO: 27026 - DNA, 1217 bp, Zea mays subsp. mays
  misc_feature (1)..(1217): Ceres Seq. ID no. 12405631
acgccgctgctccaagaaaccaccgccgagcccaaccgcacaagcgcgcgaggcaggagagagagagagagagagagagagagagagaggcggggagcaaaacaatggaggggaaagaggaggacgtgcgcctgggcgccaacaagttctcggagcgccagcccatcgggacggcggcgcagggcgccgctgacgacaaggactacaaggagcccccgccggcgccgctgttcgagcccggggagctcaagtcctggtccttctaccgcgcgggcatcgccgagttcgtcgccaccttcctcttcctctacatcaccatcctcaccgtcatgggcgtctccaagtccacctccaagtgcgccaccgtcggcatccagggcatcgcctggtccttcggaggaatgatcttcgcgctcgtctactgcaccgccggcatctccggaggacacatcaacccagctgtgactttcgggctgttcttagccaggaagctgtccctgactaggggccctcttctacatcatcatgcaatgcctgggtgccatctgtggagctggagtggtgaagggcttccagcagggactttacatgggcaacggtggtggcgccaatgttgtcgcacctggctacaccaagggtgatggccttggcgctgagattgttggcaccttcatcctagtctacaccgtcttctcagccaccgatgccaagaggaatgccagggactcccatgttcctatccttgccccactgccaattgggttcgcggtgttcctggtccaccttgccaccatccccattactggcactggcatcaacccagctaggagccttggcgctgccatcatctacaacagggatcacgcctggaacgaccattggatcttctgggtcggccccttcattggcgctgccctggctgccatctaccaccaggtgatcatcagagccatcccgttcaagagcaggtcttaagctgccgtggccgtgccgagacatgccagtccgaagaacgggcgtcttcctgtgatgtcttcttgtctgcccacgcctagtttctctgtcgattcctattcgtcgtctcttcagggctggtgctcactgctgcgccgttctgttaaccgaaacaagaactctgtgtattcctgtaccgagctgtgcatgtttttttttttttctttccatcgtggagaatttaagttattatccgtttgctg

SEQ ID NO: 27027 - protein, 212 aa, Zea mays subsp. mays
  peptide (1)..(212): Ceres Seq. ID no. 12405632
  misc_feature (81)..(168): Pfam Name: Pfam Description:  Major intrinsic protein
  misc_feature (35)..(197): NCBI GI NO: 4768911 NR Description: plasma membrane MIP protein [Zea mays]
  misc_feature (35)..(168): NCBI GI NO: 13447793 NR Description: plasma membrane integral protein ZmPIP1-3
  misc_feature (35)..(168): NCBI GI NO: 2894534 NR Description: aquaporin [Oryza sativa]
  misc_feature (35)..(168): NCBI GI NO: 2696804 NR Description: water channel protein
  misc_feature (35)..(168): NCBI GI NO: 6692753 NR Description: bpw3 [Hordeum vulgare subsp. vulgare]
  misc_feature (35)..(168): NCBI GI NO: 4388774 NR Description: transmembrane protein
  misc_feature (35)..(168): NCBI GI NO: 7441250 NR Description: transmembrane protein - rice
  misc_feature (35)..(197): NCBI GI NO: 13235338 NR Description: plasma membrane intrinsic protein [Zea mays]
  misc_feature (35)..(168): NCBI GI NO: 542126 NR Description: transmembrane protein - barley
  misc_feature (35)..(168): NCBI GI NO: 7649312 NR Description: aquaporin 2 [Allium cepa]
AAAPRNHRRAQPHKRARQEREREREREREAGSKTMEGKEEDVRLGANKFSERQPIGTAAQGAADDKDYKEPPPAPLFEPGELKSWSFYRAGIAEFVATFLFLYITILTVMGVSKSTSKCATVGIQGIAWSFGGMIFALVYCTAGISGGHINPAVTFGLFLARKLSLTRGPLLHHHAMPGCHLWSWSGEGLPAGTLHGQRWWRQCCRTWLHQG

SEQ ID NO: 27028 - protein, 178 aa, Zea mays subsp. mays
  peptide (1)..(178): Ceres Seq. ID no. 12405633
  misc_feature (47)..(134): Pfam Name: Pfam Description:  Major intrinsic protein
  misc_feature (1)..(163): NCBI GI NO: 4768911 NR Description: plasma membrane MIP protein [Zea mays]
  misc_feature (1)..(134): NCBI GI NO: 13447793 NR Description: plasma membrane integral protein ZmPIP1-3
  misc_feature (1)..(134): NCBI GI NO: 2894534 NR Description: aquaporin [Oryza sativa]
  misc_feature (1)..(134): NCBI GI NO: 2696804 NR Description: water channel protein
  misc_feature (1)..(134): NCBI GI NO: 6692753 NR Description: bpw3 [Hordeum vulgare subsp. vulgare]
  misc_feature (1)..(134): NCBI GI NO: 4388774 NR Description: transmembrane protein
  misc_feature (1)..(134): NCBI GI NO: 7441250 NR Description: transmembrane protein - rice
  misc_feature (1)..(163): NCBI GI NO: 13235338 NR Description: plasma membrane intrinsic protein [Zea mays]
  misc_feature (1)..(134): NCBI GI NO: 542126 NR Description: transmembrane protein - barley
  misc_feature (1)..(134): NCBI GI NO: 7649312 NR Description: aquaporin 2 [Allium cepa]
MEGKEEDVRLGANKFSERQPIGTAAQGAADDKDYKEPPPAPLFEPGELKSWSFYRAGIAEFVATFLFLYITILTVMGVSKSTSKCATVGIQGIAWSFGGMIFALVYCTAGISGGHINPAVTFGLFLARKLSLTRGPLLHHHAMPGCHLWSWSGEGLPAGTLHGQRWWRQCCRTWLHQG

SEQ ID NO: 27029 - protein, 149 aa, Zea mays subsp. mays
  peptide (1)..(149): Ceres Seq. ID no. 12405634
  misc_feature (1)..(136): Pfam Name: Pfam Description:  Major intrinsic protein
  misc_feature (1)..(149): NCBI GI NO: 4768911 NR Description: plasma membrane MIP protein [Zea mays]
  misc_feature (1)..(149): NCBI GI NO: 13447793 NR Description: plasma membrane integral protein ZmPIP1-3
  misc_feature (1)..(149): NCBI GI NO: 2894534 NR Description: aquaporin [Oryza sativa]
  misc_feature (1)..(149): NCBI GI NO: 2696804 NR Description: water channel protein
  misc_feature (1)..(149): NCBI GI NO: 6692753 NR Description: bpw3 [Hordeum vulgare subsp. vulgare]
  misc_feature (1)..(149): NCBI GI NO: 4388774 NR Description: transmembrane protein
  misc_feature (1)..(149): NCBI GI NO: 7441250 NR Description: transmembrane protein - rice
  misc_feature (1)..(149): NCBI GI NO: 542126 NR Description: transmembrane protein - barley
  misc_feature (1)..(148): NCBI GI NO: 13235338 NR Description: plasma membrane intrinsic protein [Zea mays]
  misc_feature (1)..(149): NCBI GI NO: 7649312 NR Description: aquaporin 2 [Allium cepa]
MQCLGAICGAGVVKGFQQGLYMGNGGGANVVAPGYTKGDGLGAEIVGTFILVYTVFSATDAKRNARDSHVPILAPLPIGFAVFLVHLATIPITGTGINPARSLGAAIIYNRDHAWNDHWIFWVGPFIGAALAAIYHQVIIRAIPFKSRS

SEQ ID NO: 27030 - DNA, 1024 bp, Zea mays subsp. mays
  misc_feature (1)..(1024): Ceres Seq. ID no. 12593662
gccacaaccgtagcctgtagcttcatccgttgcgctgctcccggttccatcgcgcggtgcggaatttaacatggccgtgccggaggtggtggtcgacggcgtcgtcttcccgccggtggcccgcccgccgggctccgccggctcgcacttcctcggcggcgcaggcgtgcgaggcctcgagatcggaggcaacttcatcaagttcacggccatcggcgtgtacctggaggacgcggccgtgcccgcgctggccaagaagtggggcggcaagacggccgacgagctcgcctccgacgccgccttcttccgcgacgtcgtcacgggcgacttcgagaagttcacgagggtgacgatgatcctcccgctgacgggcgagcagtacgcggagaaagtgacggagaactgcgtggcgttctggaaggccgccggcctgtacacggacgccgagggcgtcgccgtggagaagttcagggaggtgttcaagccagagactttcgcgccgggcgcctccatcctcttcacgcactcgcccgccggagtcctcaccgtcgccttctccaaggactcgtcggtgccagcggccggcggcgtggcgatcgagaacaagcgcctctgcgaggccgtgctggagtccatcatcggggagcgcggcgtgtcgccggccgcgaagctgagcctcgccgcgagggtgtcggagctcctcgccaaggagaccgccgcgcccgccgacgcgccgcaggcggagcccgtctccatcaccgcctgaggcgaggagcgggcgggcgagcgaacgaaccgcgaggagaaagaaagcaaccagacggttgggcggcacggcgtctcacacctgccgcctgcgcttgcgtgctccggaccggagagatgccgcgcgggtgcagtgcagccgtcgcgtcatgtctgtccgcgctctggcgtcgtgttcctgcctttctggtcgcgtagttgtcttgtgttcgctgttggtcgttctgggtaacatttgaataaaacaagcggatttgtt

SEQ ID NO: 27031 - protein, 231 aa, Zea mays subsp. mays
  peptide (1)..(231): Ceres Seq. ID no. 12593663
  misc_feature (11)..(212): Pfam Name: Pfam Description:  Chalcone-flavanone isomerase
  misc_feature (11)..(231): NCBI GI NO: 729103 NR Description: CHALCONE--FLAVONONE ISOMERASE (CHALCONE ISOMERASE)
  misc_feature (1)..(230): NCBI GI NO: 20152986 NR Description: chalcone isomerase
  misc_feature (2)..(231): NCBI GI NO: 29124145 NR Description: chalcone isomerase
  misc_feature (2)..(231): NCBI GI NO: 20152984 NR Description: chalcone isomerase
  misc_feature (2)..(228): NCBI GI NO: 1705761 NR Description: CHALCONE--FLAVONONE ISOMERASE (CHALCONE ISOMERASE)
  misc_feature (1)..(228): NCBI GI NO: 5921722 NR Description: Chalcone--flavonone isomerase (Chalcone isomerase)
  misc_feature (1)..(231): NCBI GI NO: 68481 NR Description: chalcone isomerase (EC 5
  misc_feature (1)..(231): NCBI GI NO: 116136 NR Description: CHALCONE--FLAVONONE ISOMERASE A
  misc_feature (1)..(231): NCBI GI NO: 228617 NR Description: chalcone flavanone isomerase
  misc_feature (2)..(211): NCBI GI NO: 4126399 NR Description: chalcone isomerase [Citrus sinensis]
MAVPEVVVDGVVFPPVARPPGSAGSHFLGGAGVRGLEIGGNFIKFTAIGVYLEDAAVPALAKKWGGKTADELASDAAFFRDVVTGDFEKFTRVTMILPLTGEQYAEKVTENCVAFWKAAGLYTDAEGVAVEKFREVFKPETFAPGASILFTHSPAGVLTVAFSKDSSVPAAGGVAIENKRLCEAVLESIIGERGVSPAAKLSLAARVSELLAKETAAPADAPQAEPVSITA

SEQ ID NO: 27032 - protein, 137 aa, Zea mays subsp. mays
  peptide (1)..(137): Ceres Seq. ID no. 12593664
  misc_feature (1)..(118): Pfam Name: Pfam Description:  Chalcone-flavanone isomerase
  misc_feature (1)..(137): NCBI GI NO: 729103 NR Description: CHALCONE--FLAVONONE ISOMERASE (CHALCONE ISOMERASE)
  misc_feature (1)..(136): NCBI GI NO: 20152986 NR Description: chalcone isomerase
  misc_feature (1)..(137): NCBI GI NO: 29124145 NR Description: chalcone isomerase
  misc_feature (1)..(137): NCBI GI NO: 20152984 NR Description: chalcone isomerase
  misc_feature (1)..(134): NCBI GI NO: 1705761 NR Description: CHALCONE--FLAVONONE ISOMERASE (CHALCONE ISOMERASE)
  misc_feature (1)..(134): NCBI GI NO: 5921722 NR Description: Chalcone--flavonone isomerase (Chalcone isomerase)
  misc_feature (1)..(137): NCBI GI NO: 68481 NR Description: chalcone isomerase (EC 5
  misc_feature (1)..(137): NCBI GI NO: 116136 NR Description: CHALCONE--FLAVONONE ISOMERASE A
  misc_feature (1)..(137): NCBI GI NO: 228617 NR Description: chalcone flavanone isomerase
  misc_feature (1)..(117): NCBI GI NO: 4126399 NR Description: chalcone isomerase [Citrus sinensis]
MILPLTGEQYAEKVTENCVAFWKAAGLYTDAEGVAVEKFREVFKPETFAPGASILFTHSPAGVLTVAFSKDSSVPAAGGVAIENKRLCEAVLESIIGERGVSPAAKLSLAARVSELLAKETAAPADAPQAEPVSITA

SEQ ID NO: 27033 - DNA, 1238 bp, Zea mays subsp. mays
  misc_feature (1)..(1238): Ceres Seq. ID no. 12349046
ctatctaatgcatgccgagtatcattttctccagaaggtcccatatctgaagaggcgcttgagagagtccgtgcactgttagatatgataagacctctagatgtcggcctagataatgaagcccaaattgcacgcaattggagtagttctacgcgtccatcaaatgggagacgaggacgcaatggggctaaccagttcgcggctccaatcaaatatttgcacattcatgaatgtgaaagcttctctatgggtatattttgtatgccaccttcttcagttatcccacttcataatcatcctggaatgactgtacttagcaagcttctttatggacgtctgcatgctgaatcttatgactgggttgacatacctgatcatccaattgatcaattacaaacaaggccagccaagcttgttaaagattgtgaaatgactgctccagagacaactattctttaccctaatgcaggtggtaacatccacactttcagagccattacaccttgtgctctctttgacgttctttctccaccatactccgctgaggatgggcgacactgttcatacttccgaaaatctcagatgaatcagccacctgttgttttgcctgctgagatagatagctctcaggtagtttggttggaggagttggaggaccatcagcccccagaaggctttgttgttgcaagaggtctgtataaaggccctgtaattaggagataatttgctttggagcgcagaatcaaccaagctgcaaatcagctgaaagacgatgcaggcttgtagtgcctagtgcaagcatcgtcaggtcatgtgcagcctacggtttatttgtacatctcaaagtgatctttgataatttaacagcagttttacagaacaggaacggatgttttttgtttggctgccattttaactgtgtcccactgctggagtatctctgacctagttatggagctcttatcagatcaagaccatggagaacatacttttgatgtaccagcatagctattgtcatgatgtaccagggaagatcaagacaagtgtttccatttggtgatttcagaaagaatttggtgtggggctaccattttgtctgtgtaatagcagcattactattttggagcaagactgtaaattacgggagaggaactataataatatcattaggtttatcatgaaatatattttcatggtgtatctatttaggccttgtttggaaggagatctttttctgc

SEQ ID NO: 27034 - protein, 240 aa, Zea mays subsp. mays
  peptide (1)..(240): Ceres Seq. ID no. 12349047
  misc_feature (1)..(240): NCBI GI NO: 38345647 NR Description: OSJNBb0040D15.1
  misc_feature (1)..(240): NCBI GI NO: 15231104 NR Description: putative protein; protein id: At3g58670
  misc_feature (1)..(239): NCBI GI NO: 18406030 NR Description: expressed protein; protein id: At2g42670
  misc_feature (1)..(239): NCBI GI NO: 25370572 NR Description: hypothetical protein At2g42670
  misc_feature (1)..(239): NCBI GI NO: 21536850 NR Description: unknown [Arabidopsis thaliana]
  misc_feature (1)..(238): NCBI GI NO: 15242218 NR Description: putative protein; protein id: At5g15120.1
  misc_feature (1)..(239): NCBI GI NO: 10176982 NR Description: contains similarity to unknownprotein~emb|CAB89322
  misc_feature (1)..(239): NCBI GI NO: 15242505 NR Description: putative protein; protein id: At5g39890
  misc_feature (1)..(238): NCBI GI NO: 34906308 NR Description: unnamed protein product
  misc_feature (1)..(239): NCBI GI NO: 18394617 NR Description: expressed protein; protein id: At1g18490
LSNACRVSFSPEGPISEEALERVRALLDMIRPLDVGLDNEAQIARNWSSSTRPSNGRRGRNGANQFAAPIKYLHIHECESFSMGIFCMPPSSVIPLHNHPGMTVLSKLLYGRLHAESYDWVDIPDHPIDQLQTRPAKLVKDCEMTAPETTILYPNAGGNIHTFRAITPCALFDVLSPPYSAEDGRHCSYFRKSQMNQPPVVLPAEIDSSQVVWLEELEDHQPPEGFVVARGLYKGPVIRR

SEQ ID NO: 27035 - protein, 212 aa, Zea mays subsp. mays
  peptide (1)..(212): Ceres Seq. ID no. 12349048
  misc_feature (1)..(212): NCBI GI NO: 38345647 NR Description: OSJNBb0040D15.1
  misc_feature (1)..(212): NCBI GI NO: 15231104 NR Description: putative protein; protein id: At3g58670
  misc_feature (1)..(211): NCBI GI NO: 18406030 NR Description: expressed protein; protein id: At2g42670
  misc_feature (1)..(211): NCBI GI NO: 25370572 NR Description: hypothetical protein At2g42670
  misc_feature (1)..(211): NCBI GI NO: 21536850 NR Description: unknown [Arabidopsis thaliana]
  misc_feature (1)..(210): NCBI GI NO: 15242218 NR Description: putative protein; protein id: At5g15120.1
  misc_feature (1)..(211): NCBI GI NO: 10176982 NR Description: contains similarity to unknownprotein~emb|CAB89322
  misc_feature (1)..(211): NCBI GI NO: 15242505 NR Description: putative protein; protein id: At5g39890
  misc_feature (1)..(210): NCBI GI NO: 34906308 NR Description: unnamed protein product
  misc_feature (1)..(211): NCBI GI NO: 18394617 NR Description: expressed protein; protein id: At1g18490
MIRPLDVGLDNEAQIARNWSSSTRPSNGRRGRNGANQFAAPIKYLHIHECESFSMGIFCMPPSSVIPLHNHPGMTVLSKLLYGRLHAESYDWVDIPDHPIDQLQTRPAKLVKDCEMTAPETTILYPNAGGNIHTFRAITPCALFDVLSPPYSAEDGRHCSYFRKSQMNQPPVVLPAEIDSSQVVWLEELEDHQPPEGFVVARGLYKGPVIRR

SEQ ID NO: 27036 - protein, 158 aa, Zea mays subsp. mays
  peptide (1)..(158): Ceres Seq. ID no. 12349049
  misc_feature (1)..(158): NCBI GI NO: 38345647 NR Description: OSJNBb0040D15.1
  misc_feature (1)..(158): NCBI GI NO: 15231104 NR Description: putative protein; protein id: At3g58670
  misc_feature (1)..(157): NCBI GI NO: 18406030 NR Description: expressed protein; protein id: At2g42670
  misc_feature (1)..(157): NCBI GI NO: 25370572 NR Description: hypothetical protein At2g42670
  misc_feature (1)..(157): NCBI GI NO: 21536850 NR Description: unknown [Arabidopsis thaliana]
  misc_feature (1)..(156): NCBI GI NO: 15242218 NR Description: putative protein; protein id: At5g15120.1
  misc_feature (1)..(157): NCBI GI NO: 10176982 NR Description: contains similarity to unknownprotein~emb|CAB89322
  misc_feature (1)..(157): NCBI GI NO: 15242505 NR Description: putative protein; protein id: At5g39890
  misc_feature (1)..(156): NCBI GI NO: 34906308 NR Description: unnamed protein product
  misc_feature (1)..(157): NCBI GI NO: 18394617 NR Description: expressed protein; protein id: At1g18490
MGIFCMPPSSVIPLHNHPGMTVLSKLLYGRLHAESYDWVDIPDHPIDQLQTRPAKLVKDCEMTAPETTILYPNAGGNIHTFRAITPCALFDVLSPPYSAEDGRHCSYFRKSQMNQPPVVLPAEIDSSQVVWLEELEDHQPPEGFVVARGLYKGPVIRR

SEQ ID NO: 27037 - DNA, 1634 bp, Zea mays subsp. mays
  misc_feature (1)..(1634): Ceres Seq. ID no. 12356246
aagcatagcagcagcccattgcctgcctttcggcttaccctctctctctctctctcacacacacacacaaccactcacactgccggttggtttcccttccgttgtggttggtgcgtacttagtggcggccggccatggcgcggaggaggggcttctcggcggtggtgccgccggcgtggctgccggcggtgctcctgtgcctggcaggcgcggcgtcgggcgagccgctgccgcagtactacaatgccatcttcagcttcggcgactccttctccgacacgggcaacttcgtcatcatcaactcgggcaagctgcccaacatgcccaagttcccgccgccgtacgcgaggtgctccaacggccgcctcgtgatcgacttcctggccgaggcgttcggtctcccgctgctccctccgtcggcgaacaagggcaccaacttcagccagggcgccaacttcgcggtgatgggcgcgacggcgcttgacctcaagtacttcaaggacaacaacgtgtggagcatcccgcccttcaacacgtccatgggcgtgcagctggagtggttccaggaggtgaagcgcagcatctgccccgacgaccccggcgcgtgccgcgccctgttcgggagggccctgttcgtgttcggcgagttcggcggcaacgactacagcttcgcgtggaaggcggactggtcgctggagaaggtgaagacgatggtgccggcggtggtggcgtcgctggtgggcggcgtggagcggctgctggacgagggcgcccgccacgtcgtggtgccgggcaacctccccgccggatgcatccccatcacgctcaccatgtacccgtccgaggaccgctccgagtacgacccgcgcaccggctgcctcaagaagtacaacagcgtcgcgctctaccacaacgccatgctccgcgtcgcgctcgaccgcctgcagcgcccccgcccggagtccccgcgtcgtctacgccgactactacacgccctacatacagttcgcgcgcacaccgcacctctacggctacaagcgcggcgctctgcgggcttgctgcggcggcggcgggccgtacaactacaacgtgagcgcgtcgtgcgggctccccggcgccaccacctgcgaggaccccgacgcgcacgtcagctgggacggcatccacctcaccgaggcgccctaccgcttcatcgccaacacctgggtcaagggcccctacgcgcacccgccgctcgccaccgtcgtgctcgaggacatggtcgactgatcctcttgtggtttggcacaagggaagagctgatatgtaacgtgaattccattcgttcatgtccatgtatattgggtactaccggagcggagtaacaaaaaaaaaatatatatgttagtcttttctgtttttttttcgtcgtgcacctgtgtgccgtgcagtcgcatagatcaatgaagaaaccactccagctgtttttgatgattggtttaggcggacttgcaagcggtcgagcctgcttatgttgggcagtgtactgtacacgctaaggccttgttcgtttctgtcggatcggtgggtcggaacgattccaaaccggattgcttctctaatttatataaactttgattgagtggaacgattcc

SEQ ID NO: 27038 - protein, 409 aa, Zea mays subsp. mays
  peptide (1)..(409): Ceres Seq. ID no. 12356247
  misc_feature (39)..(277): Pfam Name: Pfam Description:  GDSL-like Lipase/Acylhydrolase
  misc_feature (24)..(277): NCBI GI NO: 34903994 NR Description: unnamed protein product
  misc_feature (12)..(275): NCBI GI NO: 34903996 NR Description: unnamed protein product
  misc_feature (19)..(275): NCBI GI NO: 34903986 NR Description: unnamed protein product
  misc_feature (107)..(276): NCBI GI NO: 15237586 NR Description: lipase -like protein; protein id: At5g03980.1
  misc_feature (36)..(275): NCBI GI NO: 1911765 NR Description: iEP4 [Daucus carota]
  misc_feature (36)..(275): NCBI GI NO: 1362081 NR Description: secreted glycoprotein EP4, 47K, precursor - carrot
  misc_feature (38)..(290): NCBI GI NO: 21358785 NR Description: lipase SIL1 [Brassica rapa subsp. pekinensis]
  misc_feature (1)..(253): NCBI GI NO: 15231809 NR Description: unknown protein; protein id: At3g14225.1
  misc_feature (38)..(277): NCBI GI NO: 18417760 NR Description: putative protein; protein id: At5g15720
  misc_feature (38)..(277): NCBI GI NO: 11280578 NR Description: hypothetical protein F14F8_100 - Arabidopsisthaliana
MARRRGFSAVVPPAWLPAVLLCLAGAASGEPLPQYYNAIFSFGDSFSDTGNFVIINSGKLPNMPKFPPPYARCSNGRLVIDFLAEAFGLPLLPPSANKGTNFSQGANFAVMGATALDLKYFKDNNVWSIPPFNTSMGVQLEWFQEVKRSICPDDPGACRALFGRALFVFGEFGGNDYSFAWKADWSLEKVKTMVPAVVASLVGGVERLLDEGARHVVVPGNLPAGCIPITLTMYPSEDRSEYDPRTGCLKKYNSVALYHNAMLRVALDRLQRPRPESPRRLRRLLHALHTVRAHTAPLRLQARRSAGLLRRRRAVQLQRERVVRAPRRHHLRGPRRARQLGRHPPHRGALPLHRQHLGQGPLRAPAARHRRARGHGRLILLWFGTREELICNVNSIRSCPCILGTTGAE

SEQ ID NO: 27039 - protein, 347 aa, Zea mays subsp. mays
  peptide (1)..(347): Ceres Seq. ID no. 12356248
  misc_feature (1)..(215): Pfam Name: Pfam Description:  GDSL-like Lipase/Acylhydrolase
  misc_feature (1)..(215): NCBI GI NO: 34903994 NR Description: unnamed protein product
  misc_feature (1)..(213): NCBI GI NO: 34903996 NR Description: unnamed protein product
  misc_feature (1)..(213): NCBI GI NO: 34903986 NR Description: unnamed protein product
  misc_feature (45)..(214): NCBI GI NO: 15237586 NR Description: lipase -like protein; protein id: At5g03980.1
  misc_feature (1)..(213): NCBI GI NO: 1911765 NR Description: iEP4 [Daucus carota]
  misc_feature (1)..(213): NCBI GI NO: 1362081 NR Description: secreted glycoprotein EP4, 47K, precursor - carrot
  misc_feature (1)..(228): NCBI GI NO: 21358785 NR Description: lipase SIL1 [Brassica rapa subsp. pekinensis]
  misc_feature (1)..(191): NCBI GI NO: 15231809 NR Description: unknown protein; protein id: At3g14225.1
  misc_feature (1)..(215): NCBI GI NO: 18417760 NR Description: putative protein; protein id: At5g15720
  misc_feature (1)..(215): NCBI GI NO: 11280578 NR Description: hypothetical protein F14F8_100 - Arabidopsisthaliana
MPKFPPPYARCSNGRLVIDFLAEAFGLPLLPPSANKGTNFSQGANFAVMGATALDLKYFKDNNVWSIPPFNTSMGVQLEWFQEVKRSICPDDPGACRALFGRALFVFGEFGGNDYSFAWKADWSLEKVKTMVPAVVASLVGGVERLLDEGARHVVVPGNLPAGCIPITLTMYPSEDRSEYDPRTGCLKKYNSVALYHNAMLRVALDRLQRPRPESPRRLRRLLHALHTVRAHTAPLRLQARRSAGLLRRRRAVQLQRERVVRAPRRHHLRGPRRARQLGRHPPHRGALPLHRQHLGQGPLRAPAARHRRARGHGRLILLWFGTREELICNVNSIRSCPCILGTTGAE

SEQ ID NO: 27040 - protein, 299 aa, Zea mays subsp. mays
  peptide (1)..(299): Ceres Seq. ID no. 12356249
  misc_feature (1)..(167): Pfam Name: Pfam Description:  GDSL-like Lipase/Acylhydrolase
  misc_feature (1)..(167): NCBI GI NO: 34903994 NR Description: unnamed protein product
  misc_feature (1)..(165): NCBI GI NO: 34903996 NR Description: unnamed protein product
  misc_feature (1)..(165): NCBI GI NO: 34903986 NR Description: unnamed protein product
  misc_feature (1)..(166): NCBI GI NO: 15237586 NR Description: lipase -like protein; protein id: At5g03980.1
  misc_feature (1)..(165): NCBI GI NO: 1911765 NR Description: iEP4 [Daucus carota]
  misc_feature (1)..(165): NCBI GI NO: 1362081 NR Description: secreted glycoprotein EP4, 47K, precursor - carrot
  misc_feature (1)..(180): NCBI GI NO: 21358785 NR Description: lipase SIL1 [Brassica rapa subsp. pekinensis]
  misc_feature (1)..(143): NCBI GI NO: 15231809 NR Description: unknown protein; protein id: At3g14225.1
  misc_feature (1)..(167): NCBI GI NO: 18417760 NR Description: putative protein; protein id: At5g15720
  misc_feature (1)..(167): NCBI GI NO: 11280578 NR Description: hypothetical protein F14F8_100 - Arabidopsisthaliana
MGATALDLKYFKDNNVWSIPPFNTSMGVQLEWFQEVKRSICPDDPGACRALFGRALFVFGEFGGNDYSFAWKADWSLEKVKTMVPAVVASLVGGVERLLDEGARHVVVPGNLPAGCIPITLTMYPSEDRSEYDPRTGCLKKYNSVALYHNAMLRVALDRLQRPRPESPRRLRRLLHALHTVRAHTAPLRLQARRSAGLLRRRRAVQLQRERVVRAPRRHHLRGPRRARQLGRHPPHRGALPLHRQHLGQGPLRAPAARHRRARGHGRLILLWFGTREELICNVNSIRSCPCILGTTGAE

SEQ ID NO: 27041 - DNA, 1128 bp, Zea mays subsp. mays
  misc_feature (1)..(1128): Ceres Seq. ID no. 12387077
atcctcctcctcctgctgctctggcctctggagtcgccgcccctcccaagaacaccaggctctaatttaatttaagcggagggaagcttgatcgatcagtctgacactgccctcgttaagttatagcaaatgcctcccgcttcgacggatgcaaacaacgcgatccagaagctgtacgaggtctgcagagcctcactgtccgagaaggggcctctatctcctcctgactactctctcgacaacgtccgtgctgcgttagacatggttaccccgtccgacgtcggccttgaacgcgaggctggagctgtgcgtgcttggaggagcccacgggcggccctgggtcggaagaggattttccattccagcccagccatcagatatcgccatatatacgagtgcgcaagcttctcgattgggatgttttgcatgccggcatcatccatcatcccgctccacaaccatcctggaatgaccgtgctcggcaaggttttgtacggcgcggcgcacgtcagatcgtaccgctggattgaatcagccggatcgtccattaacctgtcgaaagcgaggccagccaaggttgtaagggacggcgagatgtccgcgccgtgcggagcgatggttcttcgtccggaggaaggcggcgacgtccacgccttgagagccatcactccctgcgccgtcctccacatcctgacgcccccgtactcctcgcaggacgggaggcactgctcctacttccggagacgcccaagatcacacccatcgggcgttttattgaaccgaacaggggggtctgagttcgtgtggctggaagaataccagccacgtcacaacttcatcattagaagggacctgtacacaggacccgctttaaagttatgatgacatcatgacaaacaggggggataattatatatatacgcttcccctttggcttcttattaagttatatcgatggacaagcacttagctatatgtgcttggcacttttttatttatatggtagtattaaaaagacagttgattatcctacgtacagggccgcctgctgtatgtattattctaagataatgttattgtacatctgatgatgtcacccactgacagaatgttatttatataataatt

SEQ ID NO: 27042 - protein, 250 aa, Zea mays subsp. mays
  peptide (1)..(250): Ceres Seq. ID no. 12387078
  misc_feature (12)..(249): NCBI GI NO: 15231104 NR Description: putative protein; protein id: At3g58670
  misc_feature (13)..(249): NCBI GI NO: 18406030 NR Description: expressed protein; protein id: At2g42670
  misc_feature (12)..(249): NCBI GI NO: 38345647 NR Description: OSJNBb0040D15.1
  misc_feature (13)..(249): NCBI GI NO: 25370572 NR Description: hypothetical protein At2g42670
  misc_feature (13)..(249): NCBI GI NO: 21536850 NR Description: unknown [Arabidopsis thaliana]
  misc_feature (7)..(249): NCBI GI NO: 15242218 NR Description: putative protein; protein id: At5g15120.1
  misc_feature (1)..(248): NCBI GI NO: 34906308 NR Description: unnamed protein product
  misc_feature (12)..(249): NCBI GI NO: 10176982 NR Description: contains similarity to unknownprotein~emb|CAB89322
  misc_feature (12)..(249): NCBI GI NO: 15242505 NR Description: putative protein; protein id: At5g39890
  misc_feature (1)..(250): NCBI GI NO: 18394617 NR Description: expressed protein; protein id: At1g18490
MPPASTDANNAIQKLYEVCRASLSEKGPLSPPDYSLDNVRAALDMVTPSDVGLEREAGAVRAWRSPRAALGRKRIFHSSPAIRYRHIYECASFSIGMFCMPASSIIPLHNHPGMTVLGKVLYGAAHVRSYRWIESAGSSINLSKARPAKVVRDGEMSAPCGAMVLRPEEGGDVHALRAITPCAVLHILTPPYSSQDGRHCSYFRRRPRSHPSGVLLNRTGGSEFVWLEEYQPRHNFIIRRDLYTGPALKL

SEQ ID NO: 27043 - protein, 206 aa, Zea mays subsp. mays
  peptide (1)..(206): Ceres Seq. ID no. 12387079
  misc_feature (1)..(205): NCBI GI NO: 15231104 NR Description: putative protein; protein id: At3g58670
  misc_feature (1)..(205): NCBI GI NO: 18406030 NR Description: expressed protein; protein id: At2g42670
  misc_feature (1)..(205): NCBI GI NO: 38345647 NR Description: OSJNBb0040D15.1
  misc_feature (1)..(205): NCBI GI NO: 25370572 NR Description: hypothetical protein At2g42670
  misc_feature (1)..(205): NCBI GI NO: 21536850 NR Description: unknown [Arabidopsis thaliana]
  misc_feature (1)..(205): NCBI GI NO: 15242218 NR Description: putative protein; protein id: At5g15120.1
  misc_feature (1)..(204): NCBI GI NO: 34906308 NR Description: unnamed protein product
  misc_feature (1)..(205): NCBI GI NO: 10176982 NR Description: contains similarity to unknownprotein~emb|CAB89322
  misc_feature (1)..(205): NCBI GI NO: 15242505 NR Description: putative protein; protein id: At5g39890
  misc_feature (1)..(206): NCBI GI NO: 18394617 NR Description: expressed protein; protein id: At1g18490
MVTPSDVGLEREAGAVRAWRSPRAALGRKRIFHSSPAIRYRHIYECASFSIGMFCMPASSIIPLHNHPGMTVLGKVLYGAAHVRSYRWIESAGSSINLSKARPAKVVRDGEMSAPCGAMVLRPEEGGDVHALRAITPCAVLHILTPPYSSQDGRHCSYFRRRPRSHPSGVLLNRTGGSEFVWLEEYQPRHNFIIRRDLYTGPALKL

SEQ ID NO: 27044 - protein, 154 aa, Zea mays subsp. mays
  peptide (1)..(154): Ceres Seq. ID no. 12387080
  misc_feature (1)..(153): NCBI GI NO: 15231104 NR Description: putative protein; protein id: At3g58670
  misc_feature (1)..(153): NCBI GI NO: 18406030 NR Description: expressed protein; protein id: At2g42670
  misc_feature (1)..(153): NCBI GI NO: 38345647 NR Description: OSJNBb0040D15.1
  misc_feature (1)..(153): NCBI GI NO: 25370572 NR Description: hypothetical protein At2g42670
  misc_feature (1)..(153): NCBI GI NO: 21536850 NR Description: unknown [Arabidopsis thaliana]
  misc_feature (1)..(153): NCBI GI NO: 15242218 NR Description: putative protein; protein id: At5g15120.1
  misc_feature (1)..(152): NCBI GI NO: 34906308 NR Description: unnamed protein product
  misc_feature (1)..(153): NCBI GI NO: 10176982 NR Description: contains similarity to unknownprotein~emb|CAB89322
  misc_feature (1)..(153): NCBI GI NO: 15242505 NR Description: putative protein; protein id: At5g39890
  misc_feature (1)..(154): NCBI GI NO: 18394617 NR Description: expressed protein; protein id: At1g18490
MFCMPASSIIPLHNHPGMTVLGKVLYGAAHVRSYRWIESAGSSINLSKARPAKVVRDGEMSAPCGAMVLRPEEGGDVHALRAITPCAVLHILTPPYSSQDGRHCSYFRRRPRSHPSGVLLNRTGGSEFVWLEEYQPRHNFIIRRDLYTGPALKL

SEQ ID NO: 27045 - DNA, 871 bp, Zea mays subsp. mays
  misc_feature (1)..(871): Ceres Seq. ID no. 12413307
ataattattatcgtttttgggacaggccggcaaggaagcgtaaagggtagggcggtggttggtgacagcagcaggcctccttcctcctcgctcgcggcgcctccgcctatacctgttgcggcaggcaacaaggcaggcaggcagcagcggagtgccttggtgatctacgaagaggatggattccaggatctcgctcctctgcgccctcgtcctcgcctcctccctcctgcactgcgccagatccgacggcaatgacgcgcagctcctcaagggcatcaacagctacaggtcctcgctcaaggtccccggcgctggccgagaacaagaacgcggcgtgcctggccgagcagctcgcgagacagttcaaggggcaggagtgcaccaacacgacgggcgccaacaccgtcatcggcaccgagcagcagttcccggactaccccaggtacctggaccgctgccacctcaacgcgtcggtgaccgaggacggccaggtgatgccggcgtgcgtgccgggcctcgtccccgccgtcgtcctcgccaactacaccaagtcgcagtacaaccggttcctcaacgacagccagttctccggcgccgggatcgcgagcgagggcgactgggtcgtggtcgtgctcagcaccagcacgggatccggcgactactcgccggctccgccgggctccaactgggcggtctcggcagctcggccgttcggcttcggccagctggtccttttgttggtggggtttgtagttttgctggtgaaatgatgagtgtttagtacgcatgcaccaacatcttcgtggcttatgttgtcacgttcaggtctcgttggctttattaagctttttttcacttgaaaagattgatt

SEQ ID NO: 27046 - protein, 201 aa, Zea mays subsp. mays
  peptide (1)..(201): Ceres Seq. ID no. 12413308
  misc_feature (1)..(44): NCBI GI NO: 34904816 NR Description: contains ESTsAU163784
MDSRISLLCALVLASSLLHCARSDGNDAQLLKGINSYRSSLKVPGAGREQERGVPGRAARETVQGAGVHQHDGRQHRHRHRAAVPGLPQVPGPLPPQRVGDRGRPGDAGVRAGPRPRRRPRQLHQVAVQPVPQRQPVLRRRDRERGRLGRGRAQHQHGIRRLLAGSAGLQLGGLGSSAVRLRPAGPFVGGVCSFAGEMMSV

SEQ ID NO: 27047 - protein, 172 aa, Zea mays subsp. mays
  peptide (1)..(172): Ceres Seq. ID no. 12413309
  misc_feature (19)..(171): NCBI GI NO: 34904816 NR Description: contains ESTsAU163784
  misc_feature (21)..(167): NCBI GI NO: 18397452 NR Description: Expressed protein; protein id: At3g06035
  misc_feature (21)..(167): NCBI GI NO: 21594024 NR Description: unknown [Arabidopsis thaliana]
  misc_feature (21)..(160): NCBI GI NO: 15239687 NR Description: putative protein; protein id: At5g19250.1
  misc_feature (17)..(169): NCBI GI NO: 18405086 NR Description: expressed protein; protein id: At1g54860
  misc_feature (21)..(154): NCBI GI NO: 15239686 NR Description: putative protein; protein id: At5g19240.1
  misc_feature (21)..(154): NCBI GI NO: 24417436 NR Description: unknown [Arabidopsis thaliana]
  misc_feature (21)..(154): NCBI GI NO: 34395876 NR Description: Putative GPI-anchored protein At5g19240 precursor
  misc_feature (21)..(160): NCBI GI NO: 15239685 NR Description: putative protein; protein id: At5g19230.1
  misc_feature (21)..(79): NCBI GI NO: 24417290 NR Description: unknown [Arabidopsis thaliana]
MTRSSSRASTATGPRSRSPALAENKNAACLAEQLARQFKGQECTNTTGANTVIGTEQQFPDYPRYLDRCHLNASVTEDGQVMPACVPGLVPAVVLANYTKSQYNRFLNDSQFSGAGIASEGDWVVVVLSTSTGSGDYSPAPPGSNWAVSAARPFGFGQLVLLLVGFVVLLVK

SEQ ID NO: 27048 - DNA, 1664 bp, Zea mays subsp. mays
  misc_feature (1)..(1664): Ceres Seq. ID no. 12406665
atttccccaatcgagagtccgagacccgagaggaggcacaggcacctgcgctagctgcagctgcaaatcgtcttccccagatccggcgccgcctagttcgctcctgctcgcgacagcgcccagagccgtccgcgtgcgcccgcagagatcgtttcggggacagccgagcagagcagagcagagcagagctgactctgccgcttgttgcccgttcttggctgctgttgctggcgagagcgcgcaggaggagcggctgatttttgattctctctgtccctccctccctcgcttcgctcgcgcggggtgcgtgcacgtaccatgagaagatgatgcgcgccaggcccaaaggtacattcgccgacgcgatgagggagagctcccctcctcctcctccccctccggctccggcttcggcagcggtgaaagaggacgagtgggaggtgcggcccggcgggatgctggtgcagaagcggagccccgacgccgacgcccccgccggggcgcccgtccccaccatccgcgtcaaggtcaagttcaacggcgtgtaccacgagatctacatcaactcccaggcctccttcggtgagctgaagaagatgctgtcggcgcggaccgggctgcaccccgaggaccagaagctggtgtacaaggacaaggagcgggactccaaggcgttcctggacatggccggcgtcaaggaccgctccaagatggtgctgctcgaggaccccgccgcgcaggccaagcgcctcctcgagcagcgccgcaccgacaaggcggagcgcgccgccaagtccatctcccgcatcggcctcgacgtcgacaagctcgccaccaaggtgtcggcgctggaggccatcgtcagcaagggcggcaaggtggtggacgctgacgtggtcgccctcaccgaggcgctcatgaacgagctggtcaagctggactccatcgccgccgacggcgaagtcaaggtgcagcgacgaatgcaggagaagcgggtgcagaagtacgtggagacgctggacgctatccgcgccaagaacgcggcggcgcccaaggccaaggccaaggccaacggcgacatgaatgggcacgccaaggcccgcgcgccgcaactcccgccgcgcccgccgcccgtgtcgcagaggcggaacttccagcagccctccccggcgccagcgccgcccacgcagggctgggagtcgttcgacctgctgtcgtcggtgccgtccacgtcctcggccaccgtgaccaccaccatggcggccgcgaccaccaccacctcgccggccggcgtctccccgatcccgcggttcgactgggagctcttctgaagccctccctcctcgcggcgcgtcggcgtgccggttggtcgatcagacggtacctacctcccttgtccatggatcttccctgctctcatcagtagtgccattgtttcttctgtggattctttccatttcttttcgcctcattctctcttcttttcttccatttcctttcgaatttgtatatctactatatgtctacaaaaagaacagagagaccgacgcggtgcggtgagtgtgttcactgggtcaaaagtccgtcagttgacaactcctcctcgtgaggatccatccatgcatgttgttcagtcacagcaaataagtggtggtcttattatg

SEQ ID NO: 27049 - protein, 334 aa, Zea mays subsp. mays
  peptide (1)..(334): Ceres Seq. ID no. 12406666
  misc_feature (62)..(135): Pfam Name: Pfam Description:  Ubiquitin family
  misc_feature (1)..(334): NCBI GI NO: 25553557 NR Description: OSJNBa0038F22.4
  misc_feature (18)..(334): NCBI GI NO: 34898024 NR Description: ESTs AU082174
  misc_feature (38)..(334): NCBI GI NO: 15242267 NR Description: putative protein; protein id: At5g52060.1
  misc_feature (25)..(334): NCBI GI NO: 21537107 NR Description: unknown [Arabidopsis thaliana]
  misc_feature (25)..(334): NCBI GI NO: 15240726 NR Description: putative protein; protein id: At5g07220
  misc_feature (34)..(304): NCBI GI NO: 30697630 NR Description: BAG domain containing protein
  misc_feature (34)..(334): NCBI GI NO: 21553443 NR Description: unknown [Arabidopsis thaliana]
  misc_feature (34)..(334): NCBI GI NO: 30697627 NR Description: BAG domain containing protein
  misc_feature (34)..(304): NCBI GI NO: 10176928 NR Description: contains similarity to unknownprotein~emb|CAB87278
  misc_feature (97)..(238): NCBI GI NO: 10334497 NR Description: hypothetical protein [Cicer arietinum]
MMRARPKGTFADAMRESSPPPPPPPAPASAAVKEDEWEVRPGGMLVQKRSPDADAPAGAPVPTIRVKVKFNGVYHEIYINSQASFGELKKMLSARTGLHPEDQKLVYKDKERDSKAFLDMAGVKDRSKMVLLEDPAAQAKRLLEQRRTDKAERAAKSISRIGLDVDKLATKVSALEAIVSKGGKVVDADVVALTEALMNELVKLDSIAADGEVKVQRRMQEKRVQKYVETLDAIRAKNAAAPKAKAKANGDMNGHAKARAPQLPPRPPPVSQRRNFQQPSPAPAPPTQGWESFDLLSSVPSTSSATVTTTMAAATTTTSPAGVSPIPRFDWELF

SEQ ID NO: 27050 - protein, 333 aa, Zea mays subsp. mays
  peptide (1)..(333): Ceres Seq. ID no. 12406667
  misc_feature (61)..(134): Pfam Name: Pfam Description:  Ubiquitin family
  misc_feature (1)..(333): NCBI GI NO: 25553557 NR Description: OSJNBa0038F22.4
  misc_feature (17)..(333): NCBI GI NO: 34898024 NR Description: ESTs AU082174
  misc_feature (37)..(333): NCBI GI NO: 15242267 NR Description: putative protein; protein id: At5g52060.1
  misc_feature (24)..(333): NCBI GI NO: 21537107 NR Description: unknown [Arabidopsis thaliana]
  misc_feature (24)..(333): NCBI GI NO: 15240726 NR Description: putative protein; protein id: At5g07220
  misc_feature (33)..(303): NCBI GI NO: 30697630 NR Description: BAG domain containing protein
  misc_feature (33)..(333): NCBI GI NO: 21553443 NR Description: unknown [Arabidopsis thaliana]
  misc_feature (33)..(333): NCBI GI NO: 30697627 NR Description: BAG domain containing protein
  misc_feature (33)..(303): NCBI GI NO: 10176928 NR Description: contains similarity to unknownprotein~emb|CAB87278
  misc_feature (96)..(237): NCBI GI NO: 10334497 NR Description: hypothetical protein [Cicer arietinum]
MRARPKGTFADAMRESSPPPPPPPAPASAAVKEDEWEVRPGGMLVQKRSPDADAPAGAPVPTIRVKVKFNGVYHEIYINSQASFGELKKMLSARTGLHPEDQKLVYKDKERDSKAFLDMAGVKDRSKMVLLEDPAAQAKRLLEQRRTDKAERAAKSISRIGLDVDKLATKVSALEAIVSKGGKVVDADVVALTEALMNELVKLDSIAADGEVKVQRRMQEKRVQKYVETLDAIRAKNAAAPKAKAKANGDMNGHAKARAPQLPPRPPPVSQRRNFQQPSPAPAPPTQGWESFDLLSSVPSTSSATVTTTMAAATTTTSPAGVSPIPRFDWELF

SEQ ID NO: 27051 - protein, 321 aa, Zea mays subsp. mays
  peptide (1)..(321): Ceres Seq. ID no. 12406668
  misc_feature (49)..(122): Pfam Name: Pfam Description:  Ubiquitin family
  misc_feature (1)..(321): NCBI GI NO: 25553557 NR Description: OSJNBa0038F22.4
  misc_feature (5)..(321): NCBI GI NO: 34898024 NR Description: ESTs AU082174
  misc_feature (25)..(321): NCBI GI NO: 15242267 NR Description: putative protein; protein id: At5g52060.1
  misc_feature (12)..(321): NCBI GI NO: 21537107 NR Description: unknown [Arabidopsis thaliana]
  misc_feature (12)..(321): NCBI GI NO: 15240726 NR Description: putative protein; protein id: At5g07220
  misc_feature (21)..(291): NCBI GI NO: 30697630 NR Description: BAG domain containing protein
  misc_feature (21)..(321): NCBI GI NO: 21553443 NR Description: unknown [Arabidopsis thaliana]
  misc_feature (21)..(321): NCBI GI NO: 30697627 NR Description: BAG domain containing protein
  misc_feature (21)..(291): NCBI GI NO: 10176928 NR Description: contains similarity to unknownprotein~emb|CAB87278
  misc_feature (84)..(225): NCBI GI NO: 10334497 NR Description: hypothetical protein [Cicer arietinum]
MRESSPPPPPPPAPASAAVKEDEWEVRPGGMLVQKRSPDADAPAGAPVPTIRVKVKFNGVYHEIYINSQASFGELKKMLSARTGLHPEDQKLVYKDKERDSKAFLDMAGVKDRSKMVLLEDPAAQAKRLLEQRRTDKAERAAKSISRIGLDVDKLATKVSALEAIVSKGGKVVDADVVALTEALMNELVKLDSIAADGEVKVQRRMQEKRVQKYVETLDAIRAKNAAAPKAKAKANGDMNGHAKARAPQLPPRPPPVSQRRNFQQPSPAPAPPTQGWESFDLLSSVPSTSSATVTTTMAAATTTTSPAGVSPIPRFDWELF

SEQ ID NO: 27052 - DNA, 1337 bp, Zea mays subsp. mays
  misc_feature (1)..(1337): Ceres Seq. ID no. 12352345
atggagaagcttccttcagtgagtcctccctttccgtttaaggcagcaagcaggagcagacaggaggcgccgagagcccagcgtcggagatctccgccgccatggagacgctggccagcgccatgcggcgcgagaaccgccggtccaaggccccgccctcctcctctgcttcctccgccctcgcctcgggcagggtccctctcgtcatggccttcctctcctgcctcgcctggctctacgtcgccggccgtttgtggcaggacgcgcagacccgggcgatcctgtccggcctcctcgagaagagctctaccagcgtcccgaaggtgctctcggtggaggacaagcttaggaaccttgggtgcaaggcgattggaaggaaaattgttgaggcggagatggacctgaccaaggccaagagcgaggggtacctgtgggggaacaggactgcagctgtggactccgacaagaagcagcaccttcttgccgtcattggagtttacactgggtttggctcccgtctcaagaggaacgtcttccgtggctcctggatgccaagaggtgatgctctgaagaagcttgaggaaaagggtgtagctattcgttttgttattggtcggagtgcaaatcgaggtgatagcttggaccgtaatattgatgatgaaaatcggcagacaaaggacttcttgattcttgaaagtcatgaagaggctgcagaagaattaccgagcaaagcaaaaattttcttcagtgctgcagttgaagcctgggatgcagaattttatgtcaaagttgaagataacattaatcttgacttagctgggttaattgagatgctcgaaggccgtcgaggtagccaaggattgtacatgggttgtatgaaatcagggatggtcataagtgaagagggccaacaatggtatgaacctgagtggtggaaatttggagattcaaaaacgtattttcgacacgcttctggttctttgtttatcctctcaaaaaatttggctcgctacatcaacataaatagtgcgtcactgcagagttatgcacacgatgatatatcagtaggttcatggatgatgggactgaatgcaacttacgtggatgatgaccggttgtgctgcagcagttccagacaagagaaaatctgttccaatgcttgagcggaaggcgtggctgctggcctgttgctgtacatcctgatgaagattttgcacacctgtcattttgtatacactgctttcgtgaaccggaaaaggctactatccagatagaaacggcttgcaccaaaatttaggaacttccatcaaaaagaaaaaaaaagaacaattttttcc

SEQ ID NO: 27053 - protein, 353 aa, Zea mays subsp. mays
  peptide (1)..(353): Ceres Seq. ID no. 12352346
  misc_feature (140)..(337): Pfam Name: Pfam Description:  Galactosyltransferase
  misc_feature (1)..(353): NCBI GI NO: 34898462 NR Description: ESTs D47620
  misc_feature (1)..(353): NCBI GI NO: 15236681 NR Description: putative protein; protein id: At4g32120
  misc_feature (1)..(346): NCBI GI NO: 15224704 NR Description: unknown protein; protein id: At2g25300.1
  misc_feature (73)..(353): NCBI GI NO: 26451702 NR Description: unknown protein [Arabidopsis thaliana]
  misc_feature (19)..(351): NCBI GI NO: 40253477 NR Description: putative Avr9 elicitor response protein
  misc_feature (12)..(353): NCBI GI NO: 20372915 NR Description: beta 1,3-glycosyltransferase-like protein I
  misc_feature (34)..(343): NCBI GI NO: 22553068 NR Description: beta 1,3-glycosyltransferase-like protein I
  misc_feature (23)..(351): NCBI GI NO: 18423501 NR Description: Avr9 elicitor response protein-like
  misc_feature (23)..(348): NCBI GI NO: 9759181 NR Description: Avr9 elicitor response protein-like
  misc_feature (64)..(343): NCBI GI NO: 15225684 NR Description: unknown protein; protein id: At2g32430.1
METLASAMRRENRRSKAPPSSSASSALASGRVPLVMAFLSCLAWLYVAGRLWQDAQTRAILSGLLEKSSTSVPKVLSVEDKLRNLGCKAIGRKIVEAEMDLTKAKSEGYLWGNRTAAVDSDKKQHLLAVIGVYTGFGSRLKRNVFRGSWMPRGDALKKLEEKGVAIRFVIGRSANRGDSLDRNIDDENRQTKDFLILESHEEAAEELPSKAKIFFSAAVEAWDAEFYVKVEDNINLDLAGLIEMLEGRRGSQGLYMGCMKSGMVISEEGQQWYEPEWWKFGDSKTYFRHASGSLFILSKNLARYININSASLQSYAHDDISVGSWMMGLNATYVDDDRLCCSSSRQEKICSNA

SEQ ID NO: 27054 - protein, 346 aa, Zea mays subsp. mays
  peptide (1)..(346): Ceres Seq. ID no. 12352347
  misc_feature (133)..(330): Pfam Name: Pfam Description:  Galactosyltransferase
  misc_feature (1)..(346): NCBI GI NO: 34898462 NR Description: ESTs D47620
  misc_feature (1)..(346): NCBI GI NO: 15236681 NR Description: putative protein; protein id: At4g32120
  misc_feature (1)..(339): NCBI GI NO: 15224704 NR Description: unknown protein; protein id: At2g25300.1
  misc_feature (66)..(346): NCBI GI NO: 26451702 NR Description: unknown protein [Arabidopsis thaliana]
  misc_feature (12)..(344): NCBI GI NO: 40253477 NR Description: putative Avr9 elicitor response protein
  misc_feature (5)..(346): NCBI GI NO: 20372915 NR Description: beta 1,3-glycosyltransferase-like protein I
  misc_feature (27)..(336): NCBI GI NO: 22553068 NR Description: beta 1,3-glycosyltransferase-like protein I
  misc_feature (16)..(344): NCBI GI NO: 18423501 NR Description: Avr9 elicitor response protein-like
  misc_feature (16)..(341): NCBI GI NO: 9759181 NR Description: Avr9 elicitor response protein-like
  misc_feature (57)..(336): NCBI GI NO: 15225684 NR Description: unknown protein; protein id: At2g32430.1
MRRENRRSKAPPSSSASSALASGRVPLVMAFLSCLAWLYVAGRLWQDAQTRAILSGLLEKSSTSVPKVLSVEDKLRNLGCKAIGRKIVEAEMDLTKAKSEGYLWGNRTAAVDSDKKQHLLAVIGVYTGFGSRLKRNVFRGSWMPRGDALKKLEEKGVAIRFVIGRSANRGDSLDRNIDDENRQTKDFLILESHEEAAEELPSKAKIFFSAAVEAWDAEFYVKVEDNINLDLAGLIEMLEGRRGSQGLYMGCMKSGMVISEEGQQWYEPEWWKFGDSKTYFRHASGSLFILSKNLARYININSASLQSYAHDDISVGSWMMGLNATYVDDDRLCCSSSRQEKICSNA

SEQ ID NO: 27055 - protein, 318 aa, Zea mays subsp. mays
  peptide (1)..(318): Ceres Seq. ID no. 12352348
  misc_feature (105)..(302): Pfam Name: Pfam Description:  Galactosyltransferase
  misc_feature (1)..(318): NCBI GI NO: 34898462 NR Description: ESTs D47620
  misc_feature (1)..(318): NCBI GI NO: 15236681 NR Description: putative protein; protein id: At4g32120
  misc_feature (1)..(311): NCBI GI NO: 15224704 NR Description: unknown protein; protein id: At2g25300.1
  misc_feature (38)..(318): NCBI GI NO: 26451702 NR Description: unknown protein [Arabidopsis thaliana]
  misc_feature (1)..(316): NCBI GI NO: 40253477 NR Description: putative Avr9 elicitor response protein
  misc_feature (1)..(318): NCBI GI NO: 20372915 NR Description: beta 1,3-glycosyltransferase-like protein I
  misc_feature (1)..(308): NCBI GI NO: 22553068 NR Description: beta 1,3-glycosyltransferase-like protein I
  misc_feature (1)..(316): NCBI GI NO: 18423501 NR Description: Avr9 elicitor response protein-like
  misc_feature (1)..(313): NCBI GI NO: 9759181 NR Description: Avr9 elicitor response protein-like
  misc_feature (29)..(308): NCBI GI NO: 15225684 NR Description: unknown protein; protein id: At2g32430.1
MAFLSCLAWLYVAGRLWQDAQTRAILSGLLEKSSTSVPKVLSVEDKLRNLGCKAIGRKIVEAEMDLTKAKSEGYLWGNRTAAVDSDKKQHLLAVIGVYTGFGSRLKRNVFRGSWMPRGDALKKLEEKGVAIRFVIGRSANRGDSLDRNIDDENRQTKDFLILESHEEAAEELPSKAKIFFSAAVEAWDAEFYVKVEDNINLDLAGLIEMLEGRRGSQGLYMGCMKSGMVISEEGQQWYEPEWWKFGDSKTYFRHASGSLFILSKNLARYININSASLQSYAHDDISVGSWMMGLNATYVDDDRLCCSSSRQEKICSNA

SEQ ID NO: 27056 - DNA, 1301 bp, Zea mays subsp. mays
  misc_feature (1)..(1301): Ceres Seq. ID no. 12365448
agatagacctcgcccttggctcccatggcttccgggctccggcttcttctcctcgccgtcgcgtgagactgcgctaaaacctaggctttgagacaccaatggcctccgcgacggcgacggcgcccacattcgctctcgcatcgtccttctcgcgcggcggcttccttccgctccctcgtcacgccggccggcccatgcttcagtctctgcgactcgtcgcgtcagccgtgaagcggcggcgcggcgcggtcgtggtggcagcggacgcggcggcggcggccgggagcgcggagttcggcgacgaggagaacccgtatgagcttctgggcatcaggccgcttgatagcttcgatcacatgaaaatggcctacaagaagaagcgcaaggacgccgaggagactggagacgacgagttccttgccaagttggacagggcctatgacactgtcatgatgcagcagctgcagtatcggaagaagggagtcacatacgggtctgttcaggtgtccaaggatatcaagtatgctgacaatcaaccagtggtgccttggggaccaagattctcccgatcaacaatgaaggacatgcgcataaatatggcagtatcagcagcatttgttgtttggatagctattatgggcaatgcagactggaagcctttgcagttcctttgttttgctttcttctacagaatactacagaagctaagagctactgaaccaccaattactccaatatacaatgaatatggcgaggtcgaaggacgagggataagaatggcaaaaagagtagtccgtgctttgggtttgatatttggatgtgtgttcgctgcatccctgggttatacagcagctattaacttgatcgagctttcaatgcagtacactccccgccttgtttattactaccaggagctgattgttacggcggctacctccgttcttctgtgcatcacagcctcatactaccgatgaacacgacgacgagcagtgatggcctggctgaggcgattgtgagatagccgagaatccacaaattttgtagcatacttccaccagcacctgtcagctttgaggcagagagttcttagtgcaggatcatacatgaccacttgtggcacaatgcagatgaccaatggatgaaaaacatttggcgtgaatgcttcaacagcagtgttgtgtgtgtgcaatttttaattaggtcttggacatgttagacaacagggttagctgcaatgtgcatgtgctttgttttgcctcgatcaacgaatgaatgaaagtactagctgctgcttctttgct

SEQ ID NO: 27057 - protein, 291 aa, Zea mays subsp. mays
  peptide (1)..(291): Ceres Seq. ID no. 12365449
  misc_feature (71)..(132): Pfam Name: Pfam Description:  DnaJ domain
  misc_feature (1)..(291): NCBI GI NO: 18390922 NR Description: expressed protein; protein id: At1g08640
  misc_feature (1)..(291): NCBI GI NO: 23397051 NR Description: unknown protein [Arabidopsis thaliana]
  misc_feature (2)..(153): NCBI GI NO: 37535386 NR Description: unknown protein
  misc_feature (216)..(291): NCBI GI NO: 37535386 NR Description: unknown protein
  misc_feature (1)..(291): NCBI GI NO: 21593057 NR Description: unknown [Arabidopsis thaliana]
  misc_feature (1)..(269): NCBI GI NO: 25341936 NR Description: protein F22O13.12
  misc_feature (33)..(269): NCBI GI NO: 7485979 NR Description: hypothetical protein F22O13
MASATATAPTFALASSFSRGGFLPLPRHAGRPMLQSLRLVASAVKRRRGAVVVAADAAAAAGSAEFGDEENPYELLGIRPLDSFDHMKMAYKKKRKDAEETGDDEFLAKLDRAYDTVMMQQLQYRKKGVTYGSVQVSKDIKYADNQPVVPWGPRFSRSTMKDMRINMAVSAAFVVWIAIMGNADWKPLQFLCFAFFYRILQKLRATEPPITPIYNEYGEVEGRGIRMAKRVVRALGLIFGCVFAASLGYTAAINLIELSMQYTPRLVYYYQELIVTAATSVLLCITASYYR

SEQ ID NO: 27058 - protein, 259 aa, Zea mays subsp. mays
  peptide (1)..(259): Ceres Seq. ID no. 12365450
  misc_feature (39)..(100): Pfam Name: Pfam Description:  DnaJ domain
  misc_feature (1)..(259): NCBI GI NO: 18390922 NR Description: expressed protein; protein id: At1g08640
  misc_feature (1)..(259): NCBI GI NO: 23397051 NR Description: unknown protein [Arabidopsis thaliana]
  misc_feature (1)..(121): NCBI GI NO: 37535386 NR Description: unknown protein
  misc_feature (184)..(259): NCBI GI NO: 37535386 NR Description: unknown protein
  misc_feature (1)..(259): NCBI GI NO: 21593057 NR Description: unknown [Arabidopsis thaliana]
  misc_feature (1)..(237): NCBI GI NO: 25341936 NR Description: protein F22O13.12
  misc_feature (1)..(237): NCBI GI NO: 7485979 NR Description: hypothetical protein F22O13
MLQSLRLVASAVKRRRGAVVVAADAAAAAGSAEFGDEENPYELLGIRPLDSFDHMKMAYKKKRKDAEETGDDEFLAKLDRAYDTVMMQQLQYRKKGVTYGSVQVSKDIKYADNQPVVPWGPRFSRSTMKDMRINMAVSAAFVVWIAIMGNADWKPLQFLCFAFFYRILQKLRATEPPITPIYNEYGEVEGRGIRMAKRVVRALGLIFGCVFAASLGYTAAINLIELSMQYTPRLVYYYQELIVTAATSVLLCITASYYR

SEQ ID NO: 27059 - protein, 205 aa, Zea mays subsp. mays
  peptide (1)..(205): Ceres Seq. ID no. 12365451
  misc_feature (1)..(46): Pfam Name: Pfam Description:  DnaJ domain
  misc_feature (1)..(205): NCBI GI NO: 18390922 NR Description: expressed protein; protein id: At1g08640
  misc_feature (1)..(205): NCBI GI NO: 23397051 NR Description: unknown protein [Arabidopsis thaliana]
  misc_feature (1)..(67): NCBI GI NO: 37535386 NR Description: unknown protein
  misc_feature (130)..(205): NCBI GI NO: 37535386 NR Description: unknown protein
  misc_feature (1)..(205): NCBI GI NO: 21593057 NR Description: unknown [Arabidopsis thaliana]
  misc_feature (1)..(183): NCBI GI NO: 25341936 NR Description: protein F22O13.12
  misc_feature (1)..(183): NCBI GI NO: 7485979 NR Description: hypothetical protein F22O13
MKMAYKKKRKDAEETGDDEFLAKLDRAYDTVMMQQLQYRKKGVTYGSVQVSKDIKYADNQPVVPWGPRFSRSTMKDMRINMAVSAAFVVWIAIMGNADWKPLQFLCFAFFYRILQKLRATEPPITPIYNEYGEVEGRGIRMAKRVVRALGLIFGCVFAASLGYTAAINLIELSMQYTPRLVYYYQELIVTAATSVLLCITASYYR

SEQ ID NO: 27060 - DNA, 1068 bp, Zea mays subsp. mays
  misc_feature (1)..(1068): Ceres Seq. ID no. 12365452
ctacccgatcggcccggtcctgcctctcaagccgccgtccgcgcccggcgacggcgagcaggtagtagcacagcggcacgagtgcgtgaggtggctcgacgcgcagcccccagcgtccgtcgtgctgctctgctttgggagcatgggcggcagcttcccgtcgccccaggtccgcgagatcgccgacggcctcgagcgcagcgggcaccgcttcctgtgggtgctccgtggcccgccaccgccggacggttccaagtacccgacggacgccaacgtccacgagctgctcccggaagggttcctggagaggacgaagggccgaggcctcgtgtggcccacgtgggcgccgcagaaggacatcctcgccaaccccgccgtcggcggcttcgtcacccactgcggctggaactccatcctcgagagcctgtggcacggcgtgccgatggtgccctggccgcagttcgcggagcagcacctgaacgcgttcgagctcgtgtccgtcatgggcgtcgccgttgccatgcaggtggacaggaagcgcggcaacttcgtcgaggcggcggagctggagcgcgcggtccggtgcctgatgggcgggtcggaggaggaggggaggaaggcgcgggagaaggcgacggaggcgaaggccctgagccagaacggcgtggccagcggcgggtcgtcggacgcgtcggtgcagaaactggcgcgagagattttgcacaagcacgacgacaaggggtgtgccaccgcaagcggggagagcatgggcagcgtcgtcgttcccgcatctccggccggaataatatgatcccccgaacacggagaaatcgccgtcgtccacgaataaatcggaggccgccatgcgatccgtctggcactgctcacgttgtttgacattgttcagaatcgccgtgtgcactgtagtttcttatccgcagtagcttttactattcgaaataatgtagcatagcaagcgctgcttcttcctaagtccgtgcagcgtagcccgcgtgttcgagctagtttgtgttaagttgaatgagttaatggatgctagttgtagcc

SEQ ID NO: 27061 - protein, 298 aa, Zea mays subsp. mays
  peptide (1)..(298): Ceres Seq. ID no. 12365453
  misc_feature (2)..(295): NCBI GI NO: 29247944 NR Description: GLP_26_54603_52153 [Giardia lamblia ATCC 50803]
LPDRPGPASQAAVRARRRRAGSSTAARVREVARRAAPSVRRAALLWEHGRQLPVAPGPRDRRRPRAQRAPLPVGAPWPATAGRFQVPDGRQRPRAAPGRVPGEDEGPRPRVAHVGAAEGHPRQPRRRRLRHPLRLELHPREPVARRADGALAAVRGAAPERVRARVRHGRRRCHAGGQEARQLRRGGGAGARGPVPDGRVGGGGEEGAGEGDGGEGPEPERRGQRRVVGRVGAETGARDFAQARRQGVCHRKRGEHGQRRRSRISGRNNMIPRTRRNRRRPRINRRPPCDPSGTAHVV

SEQ ID NO: 27062 - protein, 269 aa, Zea mays subsp. mays
  peptide (1)..(269): Ceres Seq. ID no. 12365454
  misc_feature (24)..(240): Pfam Name: Pfam Description:  UDP-glucoronosyl and UDP-glucosyl transferase
  misc_feature (1)..(241): NCBI GI NO: 34394688 NR Description: putative glucosyltransferase
  misc_feature (1)..(239): NCBI GI NO: 34394683 NR Description: putative flavonol 3-O-glucosyltransferase
  misc_feature (1)..(242): NCBI GI NO: 34394680 NR Description: putative glucosyltransferase
  misc_feature (1)..(239): NCBI GI NO: 34394653 NR Description: putative glucosyltransferase-3
  misc_feature (1)..(242): NCBI GI NO: 34394651 NR Description: putative glucosyltransferase
  misc_feature (1)..(235): NCBI GI NO: 34394676 NR Description: putative glucosyltransferase
  misc_feature (24)..(240): NCBI GI NO: 34898742 NR Description: putative betanidin 6-O-glucosyltransferase
  misc_feature (1)..(240): NCBI GI NO: 2501492 NR Description: Flavonol 3-O-glucosyltransferase 2
  misc_feature (1)..(239): NCBI GI NO: 15233151 NR Description: putative UDP-glucose glucosyltransferase
  misc_feature (1)..(240): NCBI GI NO: 7488111 NR Description: probable glucosyltransferase - Arabidopsis thaliana
YPIGPVLPLKPPSAPGDGEQVVAQRHECVRWLDAQPPASVVLLCFGSMGGSFPSPQVREIADGLERSGHRFLWVLRGPPPPDGSKYPTDANVHELLPEGFLERTKGRGLVWPTWAPQKDILANPAVGGFVTHCGWNSILESLWHGVPMVPWPQFAEQHLNAFELVSVMGVAVAMQVDRKRGNFVEAAELERAVRCLMGGSEEEGRKAREKATEAKALSQNGVASGGSSDASVQKLAREILHKHDDKGCATASGESMGSVVVPASPAGII

SEQ ID NO: 27063 - protein, 222 aa, Zea mays subsp. mays
  peptide (1)..(222): Ceres Seq. ID no. 12365455
  misc_feature (1)..(193): Pfam Name: Pfam Description:  UDP-glucoronosyl and UDP-glucosyl transferase
  misc_feature (1)..(194): NCBI GI NO: 34394688 NR Description: putative glucosyltransferase
  misc_feature (1)..(192): NCBI GI NO: 34394683 NR Description: putative flavonol 3-O-glucosyltransferase
  misc_feature (1)..(195): NCBI GI NO: 34394680 NR Description: putative glucosyltransferase
  misc_feature (1)..(192): NCBI GI NO: 34394653 NR Description: putative glucosyltransferase-3
  misc_feature (1)..(195): NCBI GI NO: 34394651 NR Description: putative glucosyltransferase
  misc_feature (1)..(188): NCBI GI NO: 34394676 NR Description: putative glucosyltransferase
  misc_feature (1)..(193): NCBI GI NO: 34898742 NR Description: putative betanidin 6-O-glucosyltransferase
  misc_feature (1)..(193): NCBI GI NO: 2501492 NR Description: Flavonol 3-O-glucosyltransferase 2
  misc_feature (1)..(192): NCBI GI NO: 15233151 NR Description: putative UDP-glucose glucosyltransferase
  misc_feature (1)..(193): NCBI GI NO: 7488111 NR Description: probable glucosyltransferase - Arabidopsis thaliana
MGGSFPSPQVREIADGLERSGHRFLWVLRGPPPPDGSKYPTDANVHELLPEGFLERTKGRGLVWPTWAPQKDILANPAVGGFVTHCGWNSILESLWHGVPMVPWPQFAEQHLNAFELVSVMGVAVAMQVDRKRGNFVEAAELERAVRCLMGGSEEEGRKAREKATEAKALSQNGVASGGSSDASVQKLAREILHKHDDKGCATASGESMGSVVVPASPAGII

SEQ ID NO: 27064 - DNA, 1486 bp, Zea mays subsp. mays
  misc_feature (1)..(1486): Ceres Seq. ID no. 12567030
gtccctgtctcgggtatcgtcgctggtcgctgccgcagccttcgtcctccctctcccactcccgatcgcatccaccctggaaccctagcggcccagcccgcgaccatggcgcggcggtcgacccctctcctacgccgccttctcgccccgtcaccttccctctccactcctctagccgacgccgtatcccgccgcaccgtcacgtacatgccccgcccgggggacggcgctccgcgggcgtcaccctcatcccgggcgacggcatcgggcccctcgtcacgggcgccgtgcggcaggtgatggaggcgatgcacgcgccggtctatttcgagacgtacgaggtccacggcgacatgcccacggtccccgccgaggtcatcgagtccatccgccgcaacaaggtctgcctcaagggcggcctcgccacccccgtaggcggtggtgtgtcctccctcaacgtgcagctccggaaggagctcgacctctacgccgcgctcgtcaactgtttcaacctccctggcctgcctaccaggcacgacaacgtggacatcgtcgtcattcgggagaacagtgagggagagtactcggggctcgagcatgaggtcgttcctggcgtcgtggagagtctcaaggtgataacaaaattctgctctgaaagaattgcaaagtatgcttttgagtatgcataccttaacaatcgaaagaaagtgacagcagtgcataaagccaatatcatgaagcttgctgatggtttgttcttggagtcttgccgtgaggttgcaaagaagtaccctggaattaaatataatgaaatcattgtggacaactgttgtatgcagcttgttgcaaagcctgaacaatttgatgttatggtcaccccaaatctttatggcaatctggtggctaatgtagctgcaggtattgctggaggcactggtgtcatgcctggaggcaatgtgggtcaggaccatgctatcttcgagcaaggtgcttctgcaggaaatgttggaaatgagaaaattgtggagaagaagagagctaaccctgttgcgctgctgctatcttctgccatgatgttgaggcacttgcaatttccatcatttgctgaccgtttggagacggcagttaagcgtgtcatagcagaaggcaagtacagaaccaaagatttgggcggcaccagcacaacccaggaagtgatagatgctgtcattgccaaactgggttaaacacaaaccgtgtgtttaatacattttttttcctcatggactaggtaactagtccttactaaatgtttgttcttcgtataggtttagactttagaccaccattttgttcggcaaattcttgtacaatcttcaggtatcttgtttctggcctggtttgggtgtgtggtgtaactgagcaaactcgtattaatttttacgcaaatttttgtgaccttaattcttaactggaaataagagaaaaatatggaacagttctccgt

SEQ ID NO: 27065 - protein, 407 aa, Zea mays subsp. mays
  peptide (1)..(407): Ceres Seq. ID no. 12567031
  misc_feature (80)..(402): Pfam Name: Pfam Description:  Isocitrate/isopropylmalate dehydrogenase
  misc_feature (53)..(406): NCBI GI NO: 3790188 NR Description: NAD-dependent isocitrate dehydrogenase
  misc_feature (72)..(406): NCBI GI NO: 28974498 NR Description: NAD-dependent isocitrate dehydrogenase beta subunit
  misc_feature (72)..(406): NCBI GI NO: 15236932 NR Description: NAD+ dependent isocitrate dehydrogenase subunit 1
  misc_feature (72)..(406): NCBI GI NO: 21537157 NR Description: NAD+ dependent isocitrate dehydrogenase subunit 1
  misc_feature (72)..(406): NCBI GI NO: 28974502 NR Description: NAD-dependent isocitrate dehydrogenase beta subunit
  misc_feature (72)..(406): NCBI GI NO: 1766046 NR Description: NAD+ dependent isocitrate dehydrogenase subunit 1
  misc_feature (72)..(406): NCBI GI NO: 15237075 NR Description: NAD+ dependent isocitrate dehydrogenase -like
  misc_feature (57)..(406): NCBI GI NO: 1766048 NR Description: NAD+ dependent isocitrate dehydrogenase subunit 2
  misc_feature (57)..(406): NCBI GI NO: 15227370 NR Description: putative NAD+ dependent isocitrate dehydrogenase subunit 2
  misc_feature (72)..(406): NCBI GI NO: 28974504 NR Description: NAD-dependent isocitrate dehydrogenase gamma subunit
PCLGYRRWSLPQPSSSLSHSRSHPPWNPSGPARDHGAAVDPSPTPPSRPVTFPLHSSSRRRIPPHRHVHAPPGGRRSAGVTLIPGDGIGPLVTGAVRQVMEAMHAPVYFETYEVHGDMPTVPAEVIESIRRNKVCLKGGLATPVGGGVSSLNVQLRKELDLYAALVNCFNLPGLPTRHDNVDIVVIRENSEGEYSGLEHEVVPGVVESLKVITKFCSERIAKYAFEYAYLNNRKKVTAVHKANIMKLADGLFLESCREVAKKYPGIKYNEIIVDNCCMQLVAKPEQFDVMVTPNLYGNLVANVAAGIAGGTGVMPGGNVGQDHAIFEQGASAGNVGNEKIVEKKRANPVALLLSSAMMLRHLQFPSFADRLETAVKRVIAEGKYRTKDLGGTSTTQEVIDAVIAKLG

SEQ ID NO: 27066 - protein, 308 aa, Zea mays subsp. mays
  peptide (1)..(308): Ceres Seq. ID no. 12567032
  misc_feature (1)..(303): Pfam Name: Pfam Description:  Isocitrate/isopropylmalate dehydrogenase
  misc_feature (1)..(307): NCBI GI NO: 3790188 NR Description: NAD-dependent isocitrate dehydrogenase
  misc_feature (1)..(307): NCBI GI NO: 28974498 NR Description: NAD-dependent isocitrate dehydrogenase beta subunit
  misc_feature (1)..(307): NCBI GI NO: 15236932 NR Description: NAD+ dependent isocitrate dehydrogenase subunit 1
  misc_feature (1)..(307): NCBI GI NO: 21537157 NR Description: NAD+ dependent isocitrate dehydrogenase subunit 1
  misc_feature (1)..(307): NCBI GI NO: 28974502 NR Description: NAD-dependent isocitrate dehydrogenase beta subunit
  misc_feature (1)..(307): NCBI GI NO: 1766046 NR Description: NAD+ dependent isocitrate dehydrogenase subunit 1
  misc_feature (1)..(307): NCBI GI NO: 15237075 NR Description: NAD+ dependent isocitrate dehydrogenase -like
  misc_feature (1)..(307): NCBI GI NO: 1766048 NR Description: NAD+ dependent isocitrate dehydrogenase subunit 2
  misc_feature (1)..(307): NCBI GI NO: 15227370 NR Description: putative NAD+ dependent isocitrate dehydrogenase subunit 2
  misc_feature (1)..(307): NCBI GI NO: 28974504 NR Description: NAD-dependent isocitrate dehydrogenase gamma subunit
MEAMHAPVYFETYEVHGDMPTVPAEVIESIRRNKVCLKGGLATPVGGGVSSLNVQLRKELDLYAALVNCFNLPGLPTRHDNVDIVVIRENSEGEYSGLEHEVVPGVVESLKVITKFCSERIAKYAFEYAYLNNRKKVTAVHKANIMKLADGLFLESCREVAKKYPGIKYNEIIVDNCCMQLVAKPEQFDVMVTPNLYGNLVANVAAGIAGGTGVMPGGNVGQDHAIFEQGASAGNVGNEKIVEKKRANPVALLLSSAMMLRHLQFPSFADRLETAVKRVIAEGKYRTKDLGGTSTTQEVIDAVIAKLG

SEQ ID NO: 27067 - protein, 305 aa, Zea mays subsp. mays
  peptide (1)..(305): Ceres Seq. ID no. 12567033
  misc_feature (1)..(300): Pfam Name: Pfam Description:  Isocitrate/isopropylmalate dehydrogenase
  misc_feature (1)..(304): NCBI GI NO: 3790188 NR Description: NAD-dependent isocitrate dehydrogenase
  misc_feature (1)..(304): NCBI GI NO: 28974498 NR Description: NAD-dependent isocitrate dehydrogenase beta subunit
  misc_feature (1)..(304): NCBI GI NO: 15236932 NR Description: NAD+ dependent isocitrate dehydrogenase subunit 1
  misc_feature (1)..(304): NCBI GI NO: 21537157 NR Description: NAD+ dependent isocitrate dehydrogenase subunit 1
  misc_feature (1)..(304): NCBI GI NO: 28974502 NR Description: NAD-dependent isocitrate dehydrogenase beta subunit
  misc_feature (1)..(304): NCBI GI NO: 1766046 NR Description: NAD+ dependent isocitrate dehydrogenase subunit 1
  misc_feature (1)..(304): NCBI GI NO: 15237075 NR Description: NAD+ dependent isocitrate dehydrogenase -like
  misc_feature (1)..(304): NCBI GI NO: 1766048 NR Description: NAD+ dependent isocitrate dehydrogenase subunit 2
  misc_feature (1)..(304): NCBI GI NO: 15227370 NR Description: putative NAD+ dependent isocitrate dehydrogenase subunit 2
  misc_feature (1)..(304): NCBI GI NO: 28974504 NR Description: NAD-dependent isocitrate dehydrogenase gamma subunit
MHAPVYFETYEVHGDMPTVPAEVIESIRRNKVCLKGGLATPVGGGVSSLNVQLRKELDLYAALVNCFNLPGLPTRHDNVDIVVIRENSEGEYSGLEHEVVPGVVESLKVITKFCSERIAKYAFEYAYLNNRKKVTAVHKANIMKLADGLFLESCREVAKKYPGIKYNEIIVDNCCMQLVAKPEQFDVMVTPNLYGNLVANVAAGIAGGTGVMPGGNVGQDHAIFEQGASAGNVGNEKIVEKKRANPVALLLSSAMMLRHLQFPSFADRLETAVKRVIAEGKYRTKDLGGTSTTQEVIDAVIAKLG

SEQ ID NO: 27068 - DNA, 1487 bp, Zea mays subsp. mays
  misc_feature (1)..(1487): Ceres Seq. ID no. 13498628
  misc_feature (94)..(94): n is a, c, t, g, unknown, or other
atcgtaaaacaactcgagtatccatctccaccttccctttctcctcctctctcccggattcccggcgacctcccttttccttccctcccgagtngcggccgcccgcccgcctccgtgatcgcaattcgcacctgcacgcgcggccccgacccctagtcctccccacccatggcgcggcgatccgcccctctcctgcgccgcctcgtctccgcctcctccccgcccgcgctgcagtccctcccggaccacgtcggcgtcctcgcgcggcgcacggtgacctacatgccccggcccggggacggcgcaccgcgcgccgtcacgctcatcccaggcgacggcatcggccccctcgtcacgggcgccgtgcggcaggtcatggaggcgatgcacgcgcccgtctacttcgagacctacgacgtccacggagacatgcccacgggtcccgccagccgtcatcgaatccatccgccgcaacaaggtctgcatcaagggcgggctcgccacgcccgtcggcggcggggtctcctccctcaacatgcagctgcgcaaggagctcgatctctacgcctcgctcgtccagtgctccaacctccccggtctgcccaccaggcacgagggtgtcgacatcgtcgtaatcagggagaacaccgagggcgagtactcggggctcgagcacgaggtcgtacccggggtcgttgagagcctcaaggtgatcacaaagttttgctctgagaggattgccaaatatgcattcgagtatgcttaccttaacaaccgaaagaaagtcactgcagtgcataaagcaaacattatgaagcttgccgatggtttgttcttggagtcttgccgtgaagttgcttcaaaatatcctggtattcagtacaatgaaatgattgttgacaactgctctatgcaacttgtttcaaagcctgaacaatttgatgtcatggttacgcctaatctttatggcaatttggtggctaacacagctgcaggtattgttggagggacgggcatcatgcctggaggcaatgtgggtcaggactacgccatctttgagcaaggcgcttctgcaggaaatgttgggaatgagaaccttgtggagcagaagaaagcaaaccctgtcgcgctgcttctgtcatctgctatgatgttgaggcacttgcagttcccgtcatttgcggaccggctcgagacggcagtgaagcgcgtcgttgctgaaggcacgtacagaacaaaggatctgggcggtagcagcaccacccaggaagttaccgatgctgtggttgccaatctggattagattccaggtgtacacggctaaaaaaaggctaattctttggggtgactagttgtctagtcttgactcctgagtgttatttatcttcttacatagattttagattgcttcacatcttcaagagggattacaagccacaaggtatcccttgtttcagattttctttagaaataatattgaggaaccc

SEQ ID NO: 27069 - protein, 255 aa, Zea mays subsp. mays
  peptide (1)..(255): Ceres Seq. ID no. 13498629
  misc_feature (1)..(250): Pfam Name: Pfam Description:  Isocitrate/isopropylmalate dehydrogenase
  misc_feature (1)..(255): NCBI GI NO: 3790188 NR Description: NAD-dependent isocitrate dehydrogenase
  misc_feature (1)..(255): NCBI GI NO: 15236932 NR Description: isocitrate dehydrogenase
  misc_feature (1)..(255): NCBI GI NO: 21537157 NR Description: NAD+ dependent isocitrate dehydrogenase subunit 1
  misc_feature (1)..(255): NCBI GI NO: 28974502 NR Description: NAD-dependent isocitrate dehydrogenase beta subunit
  misc_feature (1)..(255): NCBI GI NO: 28974498 NR Description: NAD-dependent isocitrate dehydrogenase beta subunit
  misc_feature (1)..(255): NCBI GI NO: 1766046 NR Description: NAD+ dependent isocitrate dehydrogenase subunit 1
  misc_feature (1)..(255): NCBI GI NO: 15237075 NR Description: isocitrate dehydrogenase
  misc_feature (1)..(255): NCBI GI NO: 15227370 NR Description: isocitrate dehydrogenase
  misc_feature (1)..(255): NCBI GI NO: 1766048 NR Description: NAD+ dependent isocitrate dehydrogenase subunit 2
  misc_feature (1)..(255): NCBI GI NO: 28974504 NR Description: NAD-dependent isocitrate dehydrogenase gamma subunit
MQLRKELDLYASLVQCSNLPGLPTRHEGVDIVVIRENTEGEYSGLEHEVVPGVVESLKVITKFCSERIAKYAFEYAYLNNRKKVTAVHKANIMKLADGLFLESCREVASKYPGIQYNEMIVDNCSMQLVSKPEQFDVMVTPNLYGNLVANTAAGIVGGTGIMPGGNVGQDYAIFEQGASAGNVGNENLVEQKKANPVALLLSSAMMLRHLQFPSFADRLETAVKRVVAEGTYRTKDLGGSSTTQEVTDAVVANLD

SEQ ID NO: 27070 - protein, 210 aa, Zea mays subsp. mays
  peptide (1)..(210): Ceres Seq. ID no. 13498630
  misc_feature (144)..(210): NCBI GI NO: 13592175 NR Description: ppg3 [Leishmania major]
  misc_feature (147)..(210): NCBI GI NO: 13592175 NR Description: ppg3 [Leishmania major]
  misc_feature (147)..(210): NCBI GI NO: 13592175 NR Description: ppg3 [Leishmania major]
  misc_feature (147)..(210): NCBI GI NO: 13592175 NR Description: ppg3 [Leishmania major]
  misc_feature (144)..(210): NCBI GI NO: 13592175 NR Description: ppg3 [Leishmania major]
  misc_feature (144)..(210): NCBI GI NO: 13592175 NR Description: ppg3 [Leishmania major]
  misc_feature (144)..(210): NCBI GI NO: 13592175 NR Description: ppg3 [Leishmania major]
  misc_feature (144)..(210): NCBI GI NO: 13592175 NR Description: ppg3 [Leishmania major]
  misc_feature (144)..(210): NCBI GI NO: 13592175 NR Description: ppg3 [Leishmania major]
  misc_feature (31)..(31): Xaa is any aa, unknown or other
RKTTRVSISTFPFSSSLPDSRRPPFSFPPEXRPPARLRDRNSHLHARPRPLVLPTHGAAIRPSPAPPRLRLLPARAAVPPGPRRRPRAAHGDLHAPARGRRTARRHAHPRRRHRPPRHGRRAAGHGGDARARLLRDLRRPRRHAHGSRQPSSNPSAATRSASRAGSPRPSAAGSPPSTCSCARSSISTPRSSSAPTSPVCPPGTRVSTSS

SEQ ID NO: 27071 - protein, 176 aa, Zea mays subsp. mays
  peptide (1)..(176): Ceres Seq. ID no. 13498631
  misc_feature (1)..(92): NCBI GI NO: 3790188 NR Description: NAD-dependent isocitrate dehydrogenase
  misc_feature (1)..(92): NCBI GI NO: 15236932 NR Description: isocitrate dehydrogenase
  misc_feature (1)..(92): NCBI GI NO: 21537157 NR Description: NAD+ dependent isocitrate dehydrogenase subunit 1
  misc_feature (1)..(93): NCBI GI NO: 28974502 NR Description: NAD-dependent isocitrate dehydrogenase beta subunit
  misc_feature (1)..(93): NCBI GI NO: 28974498 NR Description: NAD-dependent isocitrate dehydrogenase beta subunit
  misc_feature (1)..(92): NCBI GI NO: 1766046 NR Description: NAD+ dependent isocitrate dehydrogenase subunit 1
  misc_feature (1)..(92): NCBI GI NO: 15237075 NR Description: isocitrate dehydrogenase
  misc_feature (1)..(92): NCBI GI NO: 15227370 NR Description: isocitrate dehydrogenase
  misc_feature (1)..(92): NCBI GI NO: 1766048 NR Description: NAD+ dependent isocitrate dehydrogenase subunit 2
  misc_feature (34)..(92): NCBI GI NO: 28974504 NR Description: NAD-dependent isocitrate dehydrogenase gamma subunit
MARRSAPLLRRLVSASSPPALQSLPDHVGVLARRTVTYMPRPGDGAPRAVTLIPGDGIGPLVTGAVRQVMEAMHAPVYFETYDVHGDMPTGPASRHRIHPPQQGLHQGRARHARRRRGLLPQHAAAQGARSLRLARPVLQPPRSAHQARGCRHRRNQGEHRGRVLGARARGRTRGR

SEQ ID NO: 27072 - DNA, 1916 bp, Zea mays subsp. mays
  misc_feature (1)..(1916): Ceres Seq. ID no. 12406774
aaaaatcttgcacacgcaaaccgcagccaagcaagcgttcccctccctgtgatcgcgatggggtccaccgagaagcaggagccggaggcgtcgccggagatcatcttccggtcgaagctcccggacatcgccatcaccaacacccacccgctgcaccgctactgcttcgagcggctccccgaggtgggcgagaggccctgcctcatcgacggcggcacgggcgccgtgctcacgtacgccgaggtggaccgcctgacccggcgcctggccgcggcgctccggcgcgcaccgctggggctcgggcgcggctcggtggccatgaaccttatgctcaactcggcggagttcgtgctctccttcttcgccgcgtcgcgcgtgggcgccgcggtcaccaccgccaacccgatgtcgacgccgcacgagatcgccgggcagatcgcggcctccggcgccaccgttgtgttcaccgagtccatggccgcggacaagctccccgccatgggcgacaagctcacggtcgtcctcatcgacgcgcgccgcgacgggtgcctccacttctgggacgacgtcatggccagcgtccccgacgaggaggctggcggcggcggcggcggcgagcaagacttggacttcgaccccgacgacgtggtggcgctgccctactcgtccggcacgacggggctgcccaagggcgtgatgctgacgcaccgcagcctgagcacgagcgtggcgcagcaggtggacggcgacaaccccaacatcggcctgaccgccgccgacgtggtcctgtgctcgctccccatgttccacatctactcgctcaacaccatcctgatgtgcgggctgcgcgtgggcgccgccatcgtggtggtgcgccgcttcgacctgcgcaggatgatggagctggtggagcgccaccggatcaccgtcgccccgctggtgccgcccatcgtggtcggccgtggccaagagcgacgagggccgcggcgcacgacctgtcgtcggtcaggatggtgctctccggcgccgcgcccatggggaaggacatcgaggacgcgttcgtggccaagctccccggcgccgtgctcggacaggggtacggcatgacggaggccgggccggtgctgtccatgtgcctggcgttcgccaaggagccgttcagggtgaagtcgggcgcgtgcgggacggtggtgcgcaacgccgagctgaagatcgtggacccggacaccggcaggtccctcgcccgcaacctgcccggggagatctgcatcaggggccagcagatcatgaaaggttacctgaacaacccggaggcgacgaggaacagcatcgacgccggcgggtggctgcacacgggcgacgtcggctttgtggacgacgacgacgagatcttcatcgtcgacaggctcaaggagatcatcaagtacaagggcctccaggtggcccccgccgagctggaggcgctgctcatcacccacccaggcatcgccgacgccgccgtcgtcgggaaacaagtggagccggagatcggggagatcccggtggccttcgtagccagggccaaagggtgcgacgacgggctcaccgaggacgacgtgaagcagtttgtggccaaggaggtggtctactacaagaaggtccgcgaggtggtcttcgtcgacaggatccccaaggccccgtcgggcaagatactgcgcaaggagctcaggaagcggcttcagcttcagcagcaccagcaccagcaagcggtgtgatgtacatcatatttggggtgacgtactgtgctccgtgtttttggtctagtttggcggtgggtgatggtgattaattgtctacctcataatgttcattttgttttcagacgtaatttccatcagtgtgcgcattaaaaatctaatgcagtttcattctgttct

SEQ ID NO: 27073 - protein, 583 aa, Zea mays subsp. mays
  peptide (1)..(583): Ceres Seq. ID no. 12406775
  misc_feature (323)..(500): Pfam Name: Pfam Description:  AMP-binding enzyme
  misc_feature (323)..(576): NCBI GI NO: 112802 NR Description: 4-coumarate--CoA ligase 1
  misc_feature (323)..(572): NCBI GI NO: 7188339 NR Description: 4-coumarate--CoA ligase 4CL3 [Lolium perenne]
  misc_feature (323)..(572): NCBI GI NO: 7188337 NR Description: 4-coumarate--CoA ligase 4CL2 [Lolium perenne]
  misc_feature (330)..(572): NCBI GI NO: 9651915 NR Description: 4-coumarate:coA ligase 2 [Rubus idaeus]
  misc_feature (330)..(572): NCBI GI NO: 398965 NR Description: 4-coumarate--CoA ligase 2
  misc_feature (330)..(572): NCBI GI NO: 398963 NR Description: 4-coumarate--CoA ligase 1
  misc_feature (330)..(572): NCBI GI NO: 5163399 NR Description: 4-coumarate:coenzyme A ligase [Solanum tuberosum]
  misc_feature (330)..(572): NCBI GI NO: 7437854 NR Description: 4-coumarate-CoA ligase (EC 6.2.1.12) 1
  misc_feature (329)..(572): NCBI GI NO: 12229631 NR Description: 4-coumarate--CoA ligase 1
  misc_feature (323)..(572): NCBI GI NO: 15218002 NR Description: 4-coumarate:CoA ligase 1; protein id: At1g51680
KSCTRKPQPSKRSPPCDRDGVHREAGAGGVAGDHLPVEAPGHRHHQHPPAAPLLLRAAPRGGREALPHRRRHGRRAHVRRGGPPDPAPGRGAPARTAGARARLGGHEPYAQLGGVRALLLRRVARGRRGHHRQPDVDAARDRRADRGLRRHRCVHRVHGRGQAPRHGRQAHGRPHRRAPRRVPPLLGRRHGQRPRRGGWRRRRRRARLGLRPRRRGGAALLVRHDGAAQGRDADAPQPEHERGAAGGRRQPQHRPDRRRRGPVLAPHVPHLLAQHHPDVRAARGRRHRGGAPLRPAQDDGAGGAPPDHRRPAGAAHRGRPWPRATRAAAHDLSSVRMVLSGAAPMGKDIEDAFVAKLPGAVLGQGYGMTEAGPVLSMCLAFAKEPFRVKSGACGTVVRNAELKIVDPDTGRSLARNLPGEICIRGQQIMKGYLNNPEATRNSIDAGGWLHTGDVGFVDDDDEIFIVDRLKEIIKYKGLQVAPAELEALLITHPGIADAAVVGKQVEPEIGEIPVAFVARAKGCDDGLTEDDVKQFVAKEVVYYKKVREVVFVDRIPKAPSGKILRKELRKRLQLQQHQHQQAV

SEQ ID NO: 27074 - protein, 368 aa, Zea mays subsp. mays
  peptide (1)..(368): Ceres Seq. ID no. 12406776
  misc_feature (78)..(319): Pfam Name: Pfam Description:  AMP-binding enzyme
  misc_feature (20)..(319): NCBI GI NO: 112802 NR Description: 4-coumarate--CoA ligase 1
  misc_feature (20)..(319): NCBI GI NO: 7188339 NR Description: 4-coumarate--CoA ligase 4CL3 [Lolium perenne]
  misc_feature (20)..(319): NCBI GI NO: 7188337 NR Description: 4-coumarate--CoA ligase 4CL2 [Lolium perenne]
  misc_feature (33)..(319): NCBI GI NO: 9651915 NR Description: 4-coumarate:coA ligase 2 [Rubus idaeus]
  misc_feature (27)..(319): NCBI GI NO: 398965 NR Description: 4-coumarate--CoA ligase 2
  misc_feature (27)..(319): NCBI GI NO: 398963 NR Description: 4-coumarate--CoA ligase 1
  misc_feature (27)..(319): NCBI GI NO: 5163399 NR Description: 4-coumarate:coenzyme A ligase [Solanum tuberosum]
  misc_feature (29)..(319): NCBI GI NO: 7437854 NR Description: 4-coumarate-CoA ligase (EC 6.2.1.12) 1
  misc_feature (27)..(319): NCBI GI NO: 12229631 NR Description: 4-coumarate--CoA ligase 1
  misc_feature (24)..(319): NCBI GI NO: 15218002 NR Description: 4-coumarate:CoA ligase 1; protein id: At1g51680
KNLAHANRSQASVPLPVIAMGSTEKQEPEASPEIIFRSKLPDIAITNTHPLHRYCFERLPEVGERPCLIDGGTGAVLTYAEVDRLTRRLAAALRRAPLGLGRGSVAMNLMLNSAEFVLSFFAASRVGAAVTTANPMSTPHEIAGQIAASGATVVFTESMAADKLPAMGDKLTVVLIDARRDGCLHFWDDVMASVPDEEAGGGGGGEQDLDFDPDDVVALPYSSGTTGLPKGVMLTHRSLSTSVAQQVDGDNPNIGLTAADVVLCSLPMFHIYSLNTILMCGLRVGAAIVVVRRFDLRRMMELVERHRITVAPLVPPIVVGRGQERRGPRRTTCRRSGWCSPAPRPWGRTSRTRSWPSSPAPCSDRGTA

SEQ ID NO: 27075 - protein, 349 aa, Zea mays subsp. mays
  peptide (1)..(349): Ceres Seq. ID no. 12406777
  misc_feature (59)..(300): Pfam Name: Pfam Description:  AMP-binding enzyme
  misc_feature (1)..(300): NCBI GI NO: 112802 NR Description: 4-coumarate--CoA ligase 1
  misc_feature (1)..(300): NCBI GI NO: 7188339 NR Description: 4-coumarate--CoA ligase 4CL3 [Lolium perenne]
  misc_feature (1)..(300): NCBI GI NO: 7188337 NR Description: 4-coumarate--CoA ligase 4CL2 [Lolium perenne]
  misc_feature (14)..(300): NCBI GI NO: 9651915 NR Description: 4-coumarate:coA ligase 2 [Rubus idaeus]
  misc_feature (8)..(300): NCBI GI NO: 398965 NR Description: 4-coumarate--CoA ligase 2
  misc_feature (8)..(300): NCBI GI NO: 398963 NR Description: 4-coumarate--CoA ligase 1
  misc_feature (8)..(300): NCBI GI NO: 5163399 NR Description: 4-coumarate:coenzyme A ligase [Solanum tuberosum]
  misc_feature (10)..(300): NCBI GI NO: 7437854 NR Description: 4-coumarate-CoA ligase (EC 6.2.1.12) 1
  misc_feature (8)..(300): NCBI GI NO: 12229631 NR Description: 4-coumarate--CoA ligase 1
  misc_feature (5)..(300): NCBI GI NO: 15218002 NR Description: 4-coumarate:CoA ligase 1; protein id: At1g51680
MGSTEKQEPEASPEIIFRSKLPDIAITNTHPLHRYCFERLPEVGERPCLIDGGTGAVLTYAEVDRLTRRLAAALRRAPLGLGRGSVAMNLMLNSAEFVLSFFAASRVGAAVTTANPMSTPHEIAGQIAASGATVVFTESMAADKLPAMGDKLTVVLIDARRDGCLHFWDDVMASVPDEEAGGGGGGEQDLDFDPDDVVALPYSSGTTGLPKGVMLTHRSLSTSVAQQVDGDNPNIGLTAADVVLCSLPMFHIYSLNTILMCGLRVGAAIVVVRRFDLRRMMELVERHRITVAPLVPPIVVGRGQERRGPRRTTCRRSGWCSPAPRPWGRTSRTRSWPSSPAPCSDRGTA

SEQ ID NO: 27076 - DNA, 1366 bp, Zea mays subsp. mays
  misc_feature (1)..(1366): Ceres Seq. ID no. 12409557
aaatgagcgccagctgtgcgccacagtaccccaaccgaccctgccggcgacggcgttcataaattgggctagggcaaaaactgattcgcgccgccacctctagagagaactgtagatccctgtcatccaatcacccaccatgcaatacctcaccgatgttgctcgctccaaggacctgctcaaggttgtaggccattcggtgatcaaggcgatgtgcgatggggagttcctcatgtcgaggaaatgggccgtcggtggccacgattgggaggtccacttgcgtcccaaggatcactcggagggccacgagcgcccggtgacgctgaggctcgtcttgatctccgaagcgcgcggcggcgacgtcaaggccaagctcagctgccgcctggttgatccgaccgggaggctgaagccgtcgaaggagaatagcaaatcgcataagttctacaagtccggcgattactccggtgcaatccaggtgacgggaagagaggatctggagaagtctggctacctggtggacgattcctacaccgtggagtgcagcatcacggtgctaaaaaaagcgccggcgcggaatactgcggctgcggctgcggcgacggccatggatcgcgatgctgcgatgctgccgtccctcgaactgcaccggcacttgggcgaacttctgcagaaggggacgggcgcggacgtcacgttccatgtgtccggcgagaagttcgccgcgcacaaggccatccttgcctcgaggtcgccggtgttcatggcggagctgtttgggggaatgaaggaggaggcgtcccggcacatcgaggtgaaggacataaagcccgcggcgttcaaggccgtgcttcgcttcatctacactggcacggcgccggaactggacaagaagggcgacggcgggacgtcgttggcgcagcatctgcttgccggcgcggacaggtacggcctggacatgctcaaacttatctgcgtgggctggctcgcggaccgcatcaccgtcgacacggtggcgaccacactggcgctagcggagcagcatggctgctcgcagctcaaggctagctgcatcgagttcatcgcgggatatcttgacgccgtcctggagacagaggggtacaagcacctggaagcaagctgcccctcggtgctcactgatatcctcaaggctacgctgcgaccaaccaattgaagcgtcgagcgggatgactccatcttcatgtgaacgatcagttacactagttgctacattctttatctttcatccacttctgattctggaatcttgatgcagtaattctggccttggcaacatgttcagaatcattgcttctctatttcagattatattttccagttttgc

SEQ ID NO: 27077 - protein, 351 aa, Zea mays subsp. mays
  peptide (1)..(351): Ceres Seq. ID no. 12409558
  misc_feature (173)..(279): Pfam Name: Pfam Description:  BTB/POZ domain
  misc_feature (2)..(347): NCBI GI NO: 38636861 NR Description: putative speckle-type POZ protein
  misc_feature (5)..(346): NCBI GI NO: 38636858 NR Description: zinc finger POZ domain protein-like
  misc_feature (15)..(343): NCBI GI NO: 32488782 NR Description: OSJNBb0060E08.3
  misc_feature (13)..(343): NCBI GI NO: 37534534 NR Description: putative speckle-type protein
  misc_feature (4)..(349): NCBI GI NO: 37534574 NR Description: putative speckle-type protein
  misc_feature (1)..(348): NCBI GI NO: 18397497 NR Description: expressed protein; protein id: At3g06190
  misc_feature (113)..(343): NCBI GI NO: 37534590 NR Description: putative speckle-type protein
  misc_feature (13)..(66): NCBI GI NO: 37534590 NR Description: putative speckle-type protein
  misc_feature (1)..(344): NCBI GI NO: 23617108 NR Description: contains ESTsAU056959
  misc_feature (1)..(343): NCBI GI NO: 37534588 NR Description: putative speckle-type protein
MQYLTDVARSKDLLKVVGHSVIKAMCDGEFLMSRKWAVGGHDWEVHLRPKDHSEGHERPVTLRLVLISEARGGDVKAKLSCRLVDPTGRLKPSKENSKSHKFYKSGDYSGAIQVTGREDLEKSGYLVDDSYTVECSITVLKKAPARNTAAAAAATAMDRDAAMLPSLELHRHLGELLQKGTGADVTFHVSGEKFAAHKAILASRSPVFMAELFGGMKEEASRHIEVKDIKPAAFKAVLRFIYTGTAPELDKKGDGGTSLAQHLLAGADRYGLDMLKLICVGWLADRITVDTVATTLALAEQHGCSQLKASCIEFIAGYLDAVLETEGYKHLEASCPSVLTDILKATLRPTN

SEQ ID NO: 27078 - protein, 327 aa, Zea mays subsp. mays
  peptide (1)..(327): Ceres Seq. ID no. 12409559
  misc_feature (149)..(255): Pfam Name: Pfam Description:  BTB/POZ domain
  misc_feature (1)..(323): NCBI GI NO: 38636861 NR Description: putative speckle-type POZ protein
  misc_feature (1)..(322): NCBI GI NO: 38636858 NR Description: zinc finger POZ domain protein-like
  misc_feature (1)..(319): NCBI GI NO: 32488782 NR Description: OSJNBb0060E08.3
  misc_feature (1)..(319): NCBI GI NO: 37534534 NR Description: putative speckle-type protein
  misc_feature (1)..(325): NCBI GI NO: 37534574 NR Description: putative speckle-type protein
  misc_feature (1)..(324): NCBI GI NO: 18397497 NR Description: expressed protein; protein id: At3g06190
  misc_feature (89)..(319): NCBI GI NO: 37534590 NR Description: putative speckle-type protein
  misc_feature (1)..(42): NCBI GI NO: 37534590 NR Description: putative speckle-type protein
  misc_feature (1)..(320): NCBI GI NO: 23617108 NR Description: contains ESTsAU056959
  misc_feature (1)..(319): NCBI GI NO: 37534588 NR Description: putative speckle-type protein
MCDGEFLMSRKWAVGGHDWEVHLRPKDHSEGHERPVTLRLVLISEARGGDVKAKLSCRLVDPTGRLKPSKENSKSHKFYKSGDYSGAIQVTGREDLEKSGYLVDDSYTVECSITVLKKAPARNTAAAAAATAMDRDAAMLPSLELHRHLGELLQKGTGADVTFHVSGEKFAAHKAILASRSPVFMAELFGGMKEEASRHIEVKDIKPAAFKAVLRFIYTGTAPELDKKGDGGTSLAQHLLAGADRYGLDMLKLICVGWLADRITVDTVATTLALAEQHGCSQLKASCIEFIAGYLDAVLETEGYKHLEASCPSVLTDILKATLRPTN

SEQ ID NO: 27079 - protein, 320 aa, Zea mays subsp. mays
  peptide (1)..(320): Ceres Seq. ID no. 12409560
  misc_feature (142)..(248): Pfam Name: Pfam Description:  BTB/POZ domain
  misc_feature (1)..(316): NCBI GI NO: 38636861 NR Description: putative speckle-type POZ protein
  misc_feature (1)..(315): NCBI GI NO: 38636858 NR Description: zinc finger POZ domain protein-like
  misc_feature (1)..(312): NCBI GI NO: 32488782 NR Description: OSJNBb0060E08.3
  misc_feature (1)..(312): NCBI GI NO: 37534534 NR Description: putative speckle-type protein
  misc_feature (1)..(318): NCBI GI NO: 37534574 NR Description: putative speckle-type protein
  misc_feature (1)..(317): NCBI GI NO: 18397497 NR Description: expressed protein; protein id: At3g06190
  misc_feature (82)..(312): NCBI GI NO: 37534590 NR Description: putative speckle-type protein
  misc_feature (1)..(35): NCBI GI NO: 37534590 NR Description: putative speckle-type protein
  misc_feature (1)..(313): NCBI GI NO: 23617108 NR Description: contains ESTsAU056959
  misc_feature (1)..(312): NCBI GI NO: 37534588 NR Description: putative speckle-type protein
MSRKWAVGGHDWEVHLRPKDHSEGHERPVTLRLVLISEARGGDVKAKLSCRLVDPTGRLKPSKENSKSHKFYKSGDYSGAIQVTGREDLEKSGYLVDDSYTVECSITVLKKAPARNTAAAAAATAMDRDAAMLPSLELHRHLGELLQKGTGADVTFHVSGEKFAAHKAILASRSPVFMAELFGGMKEEASRHIEVKDIKPAAFKAVLRFIYTGTAPELDKKGDGGTSLAQHLLAGADRYGLDMLKLICVGWLADRITVDTVATTLALAEQHGCSQLKASCIEFIAGYLDAVLETEGYKHLEASCPSVLTDILKATLRPTN

SEQ ID NO: 27080 - DNA, 1106 bp, Zea mays subsp. mays
  misc_feature (1)..(1106): Ceres Seq. ID no. 12409553
aaaaatttcgaactcgtattaacggtcggcggtgggtgtggagcgggacggggcggcgagatcacgacgagatggagactgacatctcttcatgcggaggcggcggcgcccaacagggggtataggacctgtggaggtgcaagcggcgacggcagcactgcggcggtcagaggtgttccacgtcttgaaggagctcgtaggcttcgtcctctacatgcaccaccagatcccctcggttttgccgagtcttgaaaatgaatttgcaagtttaaaggaggaaatgacagaaatggcattacaaccagctgaactcaaaccatctgatcggagaaagtacaacacacgaaaaacggaggttagacgtagaataaagaagcacgagaagttgatgaatggcatctctaccttactctgttctcttcagcacgcacttgatgaagtttctagcattgaaggagttgtcctgatacttggaggaagccttgtacggcccctatttgtttatgacattacaatttctcatggtatctttggtccaggaagtgccaaagaacatgctctaaccaagttagcccaatctgtttctcggaaggctatccgtgctcttgtatcacgtggagctgggagtctgtcctacacaggacctagcaagttgtttttgttggtaagatgctccagtacattaaagctaccactggatttcctgccaaagcttgattttcgttacagcaaaaaggttgtacctcttcaaatgcatataaagtgcagtaaatcagggtgttcagggcataaccagcaccatatgcctcttgttgattccccatgttacttcagaatcttctctttcagatgttatttggttccagtgcaagcatacaataagaggtttaccaggcaaggcgtcactagaagggtgatgtgttcatgatatcaaagtttacccaacatgtctttgttgttgtagcgagtaatataacatatatgtacagtagatgatgcttattactttgatgaattgtagcgagtaatatcaaatcagttactacgtaccttgtgtaaagcaacttttgctagttttcaagcaaattaatccgatgttcggttgg

SEQ ID NO: 27081 - protein, 278 aa, Zea mays subsp. mays
  peptide (1)..(278): Ceres Seq. ID no. 12409554
  misc_feature (14)..(255): NCBI GI NO: 15218734 NR Description: hypothetical protein; protein id: At1g03180.1
MRRRRRPTGGIGPVEVQAATAALRRSEVFHVLKELVGFVLYMHHQIPSVLPSLENEFASLKEEMTEMALQPAELKPSDRRKYNTRKTEVRRRIKKHEKLMNGISTLLCSLQHALDEVSSIEGVVLILGGSLVRPLFVYDITISHGIFGPGSAKEHALTKLAQSVSRKAIRALVSRGAGSLSYTGPSKLFLLVRCSSTLKLPLDFLPKLDFRYSKKVVPLQMHIKCSKSGCSGHNQHHMPLVDSPCYFRIFSFRCYLVPVQAYNKRFTRQGVTRRVMCS

SEQ ID NO: 27082 - protein, 237 aa, Zea mays subsp. mays
  peptide (1)..(237): Ceres Seq. ID no. 12409555
  misc_feature (1)..(214): NCBI GI NO: 15218734 NR Description: hypothetical protein; protein id: At1g03180.1
MHHQIPSVLPSLENEFASLKEEMTEMALQPAELKPSDRRKYNTRKTEVRRRIKKHEKLMNGISTLLCSLQHALDEVSSIEGVVLILGGSLVRPLFVYDITISHGIFGPGSAKEHALTKLAQSVSRKAIRALVSRGAGSLSYTGPSKLFLLVRCSSTLKLPLDFLPKLDFRYSKKVVPLQMHIKCSKSGCSGHNQHHMPLVDSPCYFRIFSFRCYLVPVQAYNKRFTRQGVTRRVMCS

SEQ ID NO: 27083 - protein, 215 aa, Zea mays subsp. mays
  peptide (1)..(215): Ceres Seq. ID no. 12409556
  misc_feature (1)..(192): NCBI GI NO: 15218734 NR Description: hypothetical protein; protein id: At1g03180.1
MTEMALQPAELKPSDRRKYNTRKTEVRRRIKKHEKLMNGISTLLCSLQHALDEVSSIEGVVLILGGSLVRPLFVYDITISHGIFGPGSAKEHALTKLAQSVSRKAIRALVSRGAGSLSYTGPSKLFLLVRCSSTLKLPLDFLPKLDFRYSKKVVPLQMHIKCSKSGCSGHNQHHMPLVDSPCYFRIFSFRCYLVPVQAYNKRFTRQGVTRRVMCS

SEQ ID NO: 27084 - DNA, 1616 bp, Zea mays subsp. mays
  misc_feature (1)..(1616): Ceres Seq. ID no. 12369186
acacaatcgaccaccgtctctgttctcccctcacttgaggcctccccacacgccgccgcattcggacgctcgcctcccaaaaccccacgaagagatgcatctgccgccgctgcggcgtgtaccggcggcgctgctagtgccggcgcgcggcctcctcgaggcgcgcgtgccttgggtgcgagaacgggccctcgaccacgtcgtggagcgggagcgccacctggtgccgtttctccttgccaaggacgtgctcctcgccgccacgccgccgccgcacgccgtgccgctgcactcgctgccctccacaatccctttcccgttccgcccgctgcgcttcctgcggctctacccctcggcgttcgcgctctcgccgcaccccatcgaggtctccccgacgccccggctctcggcgctccacgccgccgaggcgcaggccgtcgacgccaccgtccccgacgcggctgaccgtctgcttcggctgctcatgctcgccccctctcgcgcgctcccgctccgcctcgtcgcgcgcctccggctcgacctcggcctcgcgtaccgacttccaacgctcgctgctccccaactacccggattacttcgcgctctccccggacggcagcctcctcgagctcgtctgctacaggaaggatctcgccgtgtcgtcgatgcagtcctacgcgcagcgcaccggcggctacaaggtcggcgacgcggtcgccttcccactctcgttccccagaggattcgagcttgacaagaaggtgcgcaaatggttagacgagtggcagaggctgccgtacatttcgccctatgaggatgggtcgcacctaacgccaaggagtgacataacggagaagaggaccgtggcggtgctgcacgaggtcctgagtctcacggttgggaagaagatggagaaggaggtgttggtcaagcttggggaggcgctgcggttgccaccaggattcaggaaggtggtggctaagcaccctgggattttctacatatcgcacaagctgaggacacagacggtagttctcagggaatcataccggaggcatatgcttgtggacaagcaccccatgatggggataaggtatcagtatatgcatttgatgcatatggggaaggaggaagttggaaagggcaagggcaaagatcgaaggagtagtcgcagtgaacaaatcatcggggaagagtttggtgccacagtggatgatgatgaaaatgaggagtatgatgatgaagacgacgtggctgaagatgacatggaagtgggtgttgcttccgaggatcaggacagtgacgacgatgttgatgaggatataaaggaacaaatttcttattgattttttgagttgggaagtggcaaccgcacttcaagtggtggtgctcgtacatctctttgttggactgcatgaatgtgcagggaacacagaaatacagatgtacaatcaatcctggtgaccggtagaaaccctattagaagatagagcatgtttttgtttatcacacagtgaagtacttagtgacactcaagcgtatcctctattgttgacatgcttagtgacttgttgtatcatggtggcttcacctaagctattcatctaagggttgac

SEQ ID NO: 27085 - protein, 250 aa, Zea mays subsp. mays
  peptide (1)..(250): Ceres Seq. ID no. 12369187
  misc_feature (58)..(205): Pfam Name: DUF860 Pfam Description: Plant specific of unknown function
  misc_feature (52)..(205): NCBI GI NO: 15217597 NR Description: hypothetical protein; protein id: At1g71850.1
  misc_feature (52)..(205): NCBI GI NO: 3413424 NR Description: hypothetical protein [Arabidopsis thaliana]
  misc_feature (50)..(185): NCBI GI NO: 15238875 NR Description: putative protein; protein id: At5g48040.1
  misc_feature (45)..(210): NCBI GI NO: 34894384 NR Description: unnamed protein product
  misc_feature (40)..(213): NCBI GI NO: 37535960 NR Description: hypothetical protein
  misc_feature (60)..(220): NCBI GI NO: 15221480 NR Description: hypothetical protein; protein id: At1g06440.1
HNRPPSLFSPHLRPPHTPPHSDARLPKPHEEMHLPPLRRVPAALLVPARGLLEARVPWVRERALDHVVERERHLVPFLLAKDVLLAATPPPHAVPLHSLPSTIPFPFRPLRFLRLYPSAFALSPHPIEVSPTPRLSALHAAEAQAVDATVPDAADRLLRLLMLAPSRALPLRLVARLRLDLGLAYRLPTLAAPQLPGLLRALPGRQPPRARLLQEGSRRVVDAVLRAAHRRLQGRRRGRLPTLVPQRIRA

SEQ ID NO: 27086 - protein, 226 aa, Zea mays subsp. mays
  peptide (1)..(226): Ceres Seq. ID no. 12369188
  misc_feature (1)..(156): Pfam Name: DUF860 Pfam Description: Plant specific of unknown function
  misc_feature (1)..(219): NCBI GI NO: 15217597 NR Description: hypothetical protein; protein id: At1g71850.1
  misc_feature (1)..(219): NCBI GI NO: 3413424 NR Description: hypothetical protein [Arabidopsis thaliana]
  misc_feature (1)..(192): NCBI GI NO: 15238875 NR Description: putative protein; protein id: At5g48040.1
  misc_feature (1)..(206): NCBI GI NO: 34894384 NR Description: unnamed protein product
  misc_feature (1)..(174): NCBI GI NO: 15233788 NR Description: putative protein; protein id: At4g24320.1
  misc_feature (1)..(198): NCBI GI NO: 11282335 NR Description: hypothetical protein F14P22
  misc_feature (1)..(198): NCBI GI NO: 18410975 NR Description: putative protein; protein id: At3g58520
  misc_feature (1)..(198): NCBI GI NO: 21536812 NR Description: unknown [Arabidopsis thaliana]
  misc_feature (1)..(170): NCBI GI NO: 37535960 NR Description: hypothetical protein
  misc_feature (18)..(172): NCBI GI NO: 15221480 NR Description: hypothetical protein; protein id: At1g06440.1
MQSYAQRTGGYKVGDAVAFPLSFPRGFELDKKVRKWLDEWQRLPYISPYEDGSHLTPRSDITEKRTVAVLHEVLSLTVGKKMEKEVLVKLGEALRLPPGFRKVVAKHPGIFYISHKLRTQTVVLRESYRRHMLVDKHPMMGIRYQYMHLMHMGKEEVGKGKGKDRRSSRSEQIIGEEFGATVDDDENEEYDDEDDVAEDDMEVGVASEDQDSDDDVDEDIKEQISY

SEQ ID NO: 27087 - protein, 219 aa, Zea mays subsp. mays
  peptide (1)..(219): Ceres Seq. ID no. 12369189
  misc_feature (27)..(174): Pfam Name: DUF860 Pfam Description: Plant specific of unknown function
  misc_feature (21)..(174): NCBI GI NO: 15217597 NR Description: hypothetical protein; protein id: At1g71850.1
  misc_feature (21)..(174): NCBI GI NO: 3413424 NR Description: hypothetical protein [Arabidopsis thaliana]
  misc_feature (19)..(154): NCBI GI NO: 15238875 NR Description: putative protein; protein id: At5g48040.1
  misc_feature (14)..(179): NCBI GI NO: 34894384 NR Description: unnamed protein product
  misc_feature (9)..(182): NCBI GI NO: 37535960 NR Description: hypothetical protein
  misc_feature (29)..(189): NCBI GI NO: 15221480 NR Description: hypothetical protein; protein id: At1g06440.1
MHLPPLRRVPAALLVPARGLLEARVPWVRERALDHVVERERHLVPFLLAKDVLLAATPPPHAVPLHSLPSTIPFPFRPLRFLRLYPSAFALSPHPIEVSPTPRLSALHAAEAQAVDATVPDAADRLLRLLMLAPSRALPLRLVARLRLDLGLAYRLPTLAAPQLPGLLRALPGRQPPRARLLQEGSRRVVDAVLRAAHRRLQGRRRGRLPTLVPQRIRA

SEQ ID NO: 27088 - DNA, 1689 bp, Zea mays subsp. mays
  misc_feature (1)..(1689): Ceres Seq. ID no. 13498301
  misc_feature (106)..(106): n is a, c, t, g, unknown, or other
  misc_feature (54)..(54): n is a, c, t, g, unknown, or other
acagttgttgaaccttgagactactagctagagagacaaatatccaggccgaangagaagaggtctgagcgaggagacgacgcccgcgccatggcaggcgccagcnccaccaacggcggaggcaacggcggaggcgggaaggtggtcagcatgccgctgcagtacttctgcgtgctggcggcggtggtggtggccgtgatggtgctgtcgctgtcgttcatgtcgccggcggccatggtggccgtccgccagaacctcagctccgtggcggccgcccccggtggcagcagcaacagcaccggcggcggcgccggagcgggaggcgccgccggcctggccgaggcgtcaccgccggcgggctggaaggagaaggagcaggcgcggcggccgcccgtggtgctgttcaacttcggcgactccaactccgacaccggaggcgtggcggcggccggcgggatacggatcatgccgccggagggccgcacctacttccaccaccccacgggccggctctccgacggccgcgtcatcatcgactttatctgtgagagtctgggcacgcgtgaactgaacccatacctcaggggaattggttcggactacagcaacggcgtcaacttcgccatggcaggctcgacggtgacccacggcgtctctccctactccttgaacgtccaggtcgaccagttcggtctacttcaggcacaggtccccttgagatgttcgaacgaggactggaaggcccggtgagcaaggaggggtttgagagcgctctgtacatgatggacatcggccacaacgacatggttggtgtggcgcacacaccgtccgatcagtgggacaagaagatcacagagatcgtcggcgaggtcagacaagccatctcgatcctgtacgacaacggagcgaggaagttctggatccacggcacgggcgccctggggtgcctgccggcgctggtggtgcaggagacgaagggcgagcaggacaagcacggctgcctcgccggcgtcaacagggccgccaaggcgttcaacaggaagctcagccagctctgcgacgacctccgcttccacctcaagggcgccaccgtcgtctacaccgacatgttcgccatcaagtacgacttcgtcgccaaccacaccaaatacgggatcgagtggccgttcatggtgtgctgtggcaacggcgggccgccgtacaacatgaagcagggaagacccggctgtggcgacctgtgcccaccggaggcgaaggtggtcagctgggatggcgtgcacttcacggatttcggcagcggccttgctgccaagcttgcgatgagcggggagtactccaagcccagggtgaagctggcaagcttgatccatggcggatccaagaaaacgtcagactcttgatgcggaccattgaccgagtcgtgacctttggatccacatctatggaatggaagatgggtagcggtgaagaattggagggatatcttgcaccaggctgtttcttgacgaagattgactccttgtacacactacacagaactactacagaaggcaaagtagcactgggaatgctcagttacaagcttaagttaatttgctgtctttttattttgggattttgtgctgcagagtacagagattttgtaccttgatgtacgtgtaactatttatgatagttcttacaagctcc

SEQ ID NO: 27089 - protein, 226 aa, Zea mays subsp. mays
  peptide (1)..(226): Ceres Seq. ID no. 13498302
  misc_feature (1)..(197): Pfam Name: Pfam Description:  GDSL-like Lipase/Acylhydrolase
  misc_feature (1)..(217): NCBI GI NO: 34894838 NR Description: putative lipase homolog
  misc_feature (1)..(210): NCBI GI NO: 34894866 NR Description: putative lipase homolog
  misc_feature (10)..(208): NCBI GI NO: 15217506 NR Description: GDSL-motif lipase/hydrolase protein
  misc_feature (10)..(208): NCBI GI NO: 15223585 NR Description: GDSL-motif lipase/hydrolase protein
  misc_feature (1)..(211): NCBI GI NO: 34894844 NR Description: putative lipase homolog
  misc_feature (10)..(189): NCBI GI NO: 25336281 NR Description: lipase-like protein Lip-4
  misc_feature (15)..(217): NCBI GI NO: 30909057 NR Description: ENSP-like protein [Hevea brasiliensis]
  misc_feature (1)..(208): NCBI GI NO: 25405771 NR Description: hypothetical protein T22H22.20
  misc_feature (12)..(212): NCBI GI NO: 15241404 NR Description: GDSL-motif lipase/hydrolase protein
  misc_feature (10)..(212): NCBI GI NO: 25457244 NR Description: early nodule-specific protein ENOD8
MFERGLEGPVSKEGFESALYMMDIGHNDMVGVAHTPSDQWDKKITEIVGEVRQAISILYDNGARKFWIHGTGALGCLPALVVQETKGEQDKHGCLAGVNRAAKAFNRKLSQLCDDLRFHLKGATVVYTDMFAIKYDFVANHTKYGIEWPFMVCCGNGGPPYNMKQGRPGCGDLCPPEAKVVSWDGVHFTDFGSGLAAKLAMSGEYSKPRVKLASLIHGGSKKTSDS

SEQ ID NO: 27090 - protein, 219 aa, Zea mays subsp. mays
  peptide (1)..(219): Ceres Seq. ID no. 13498303
  misc_feature (104)..(200): Pfam Name: Pfam Description:  GDSL-like Lipase/Acylhydrolase
  misc_feature (11)..(200): NCBI GI NO: 34894838 NR Description: putative lipase homolog
  misc_feature (48)..(200): NCBI GI NO: 34894866 NR Description: putative lipase homolog
  misc_feature (100)..(200): NCBI GI NO: 15217506 NR Description: GDSL-motif lipase/hydrolase protein
  misc_feature (99)..(217): NCBI GI NO: 15223585 NR Description: GDSL-motif lipase/hydrolase protein
  misc_feature (153)..(200): NCBI GI NO: 34894844 NR Description: putative lipase homolog
  misc_feature (108)..(217): NCBI GI NO: 25336281 NR Description: lipase-like protein Lip-4
  misc_feature (104)..(200): NCBI GI NO: 30909057 NR Description: ENSP-like protein [Hevea brasiliensis]
  misc_feature (101)..(200): NCBI GI NO: 25405771 NR Description: hypothetical protein T22H22.20
  misc_feature (104)..(209): NCBI GI NO: 15241404 NR Description: GDSL-motif lipase/hydrolase protein
  misc_feature (104)..(200): NCBI GI NO: 25457244 NR Description: early nodule-specific protein ENOD8
  misc_feature (6)..(6): Xaa is any aa, unknown or other
MAGASXTNGGGNGGGGKVVSMPLQYFCVLAAVVVAVMVLSLSFMSPAAMVAVRQNLSSVAAAPGGSSNSTGGGAGAGGAAGLAEASPPAGWKEKEQARRPPVVLFNFGDSNSDTGGVAAAGGIRIMPPEGRTYFHHPTGRLSDGRVIIDFICESLGTRELNPYLRGIGSDYSNGVNFAMAGSTVTHGVSPYSLNVQVDQFGLLQAQVPLRCSNEDWKAR

SEQ ID NO: 27091 - protein, 206 aa, Zea mays subsp. mays
  peptide (1)..(206): Ceres Seq. ID no. 13498304
  misc_feature (1)..(177): Pfam Name: Pfam Description:  GDSL-like Lipase/Acylhydrolase
  misc_feature (1)..(197): NCBI GI NO: 34894838 NR Description: putative lipase homolog
  misc_feature (1)..(190): NCBI GI NO: 34894866 NR Description: putative lipase homolog
  misc_feature (1)..(188): NCBI GI NO: 15217506 NR Description: GDSL-motif lipase/hydrolase protein
  misc_feature (1)..(188): NCBI GI NO: 15223585 NR Description: GDSL-motif lipase/hydrolase protein
  misc_feature (1)..(191): NCBI GI NO: 34894844 NR Description: putative lipase homolog
  misc_feature (1)..(169): NCBI GI NO: 25336281 NR Description: lipase-like protein Lip-4
  misc_feature (1)..(197): NCBI GI NO: 30909057 NR Description: ENSP-like protein [Hevea brasiliensis]
  misc_feature (1)..(188): NCBI GI NO: 25405771 NR Description: hypothetical protein T22H22.20
  misc_feature (1)..(192): NCBI GI NO: 15241404 NR Description: GDSL-motif lipase/hydrolase protein
  misc_feature (1)..(192): NCBI GI NO: 25457244 NR Description: early nodule-specific protein ENOD8
MMDIGHNDMVGVAHTPSDQWDKKITEIVGEVRQAISILYDNGARKFWIHGTGALGCLPALVVQETKGEQDKHGCLAGVNRAAKAFNRKLSQLCDDLRFHLKGATVVYTDMFAIKYDFVANHTKYGIEWPFMVCCGNGGPPYNMKQGRPGCGDLCPPEAKVVSWDGVHFTDFGSGLAAKLAMSGEYSKPRVKLASLIHGGSKKTSDS

SEQ ID NO: 27092 - DNA, 1168 bp, Zea mays subsp. mays
  misc_feature (1)..(1168): Ceres Seq. ID no. 12357881
agaataggataggatagcccctgttcttctagcctgctagtctgctacactccacgtctctacctctaccgcacattttgctacgctccagctccatcgactatcgagtgcttgctggacgccggggccgggcaatggatccgggcagcgcggagatcgttttcgactgcgatttcttccggatatacagcgacggtcgcgtcgagcgtttcgccggcatggaaaccgtgcccgcgggcttcgacgccgacaccggcgtcacctcaaaagacgtggtcgtcgacgccgccaccggcatcgcgacgcggctctacctgccagccatccctacggccccgtcatctccccagtcggacggcaacggcaacggcaacggcagcgccacggcgaagcttcccatcctcgtcatcttccacggcggcggcttcgtcatcggctcaccggctgatcctggtttccaccgctacatgaactcgctggtcgctagcgcccgcgtcgtcgctgtctccgtcggctaccgcctcgcgcccgaaaacccgctccctgcagcctacaaggactcctggaccgcgctcaactgggctgtttccggcgcggacccgtggctgtccgcccacggtgacctcggccgcgtcttcgtggccggttacagcgccgggtcgaacatcgcccacaacatggccatcgccgcgggcgtcagaggcttgcgcgccgcggaaccaccacgagtagaaggcgtgatcctgctccacccttcgtttgccggtgaacagaggatggaagaagaggatgacagattctggcaagttaataagaggaggtggaaggccatcttccccggtgcgagagacgggctggacgatccgagaatcaacccggtcgtcgctggcgcgccgagcttggcgaagctggtgggcgagcggctgctcgtgtgcacggcgtcggaggacccgagggcaccgaggggccgggcatactgcgaggcggtgagggccagctgttggccgggaaaggtggagagcttcgaatcacaaaacgagggacacgggttcttcgtttccggccacggcagcacccaggccattgcgctgatggatcgagtggttggtttcattgttggccattaacttcgattgttcaaaataaatgaaattaagggttgtttgct

SEQ ID NO: 27093 - protein, 330 aa, Zea mays subsp. mays
  peptide (1)..(330): Ceres Seq. ID no. 12357882
  misc_feature (17)..(327): NCBI GI NO: 38344841 NR Description: OSJNBa0064H22.22
  misc_feature (14)..(328): NCBI GI NO: 15222791 NR Description: hypothetical protein; protein id: At1g49640.1
  misc_feature (5)..(329): NCBI GI NO: 21537287 NR Description: putative esterase [Arabidopsis thaliana]
  misc_feature (5)..(329): NCBI GI NO: 18402731 NR Description: expressed protein; protein id: At1g49650
  misc_feature (86)..(327): NCBI GI NO: 15227669 NR Description: putative esterase; protein id: At2g03550.1
  misc_feature (86)..(327): NCBI GI NO: 28393060 NR Description: putative esterase [Arabidopsis thaliana]
  misc_feature (8)..(71): NCBI GI NO: 15227669 NR Description: putative esterase; protein id: At2g03550.1
  misc_feature (8)..(71): NCBI GI NO: 28393060 NR Description: putative esterase [Arabidopsis thaliana]
  misc_feature (6)..(329): NCBI GI NO: 18086341 NR Description: AT3g48690/T8P19_200 [Arabidopsis thaliana]
  misc_feature (6)..(329): NCBI GI NO: 15228425 NR Description: putative protein; protein id: At3g48690
MDPGSAEIVFDCDFFRIYSDGRVERFAGMETVPAGFDADTGVTSKDVVVDAATGIATRLYLPAIPTAPSSPQSDGNGNGNGSATAKLPILVIFHGGGFVIGSPADPGFHRYMNSLVASARVVAVSVGYRLAPENPLPAAYKDSWTALNWAVSGADPWLSAHGDLGRVFVAGYSAGSNIAHNMAIAAGVRGLRAAEPPRVEGVILLHPSFAGEQRMEEEDDRFWQVNKRRWKAIFPGARDGLDDPRINPVVAGAPSLAKLVGERLLVCTASEDPRAPRGRAYCEAVRASCWPGKVESFESQNEGHGFFVSGHGSTQAIALMDRVVGFIVGH

SEQ ID NO: 27094 - protein, 302 aa, Zea mays subsp. mays
  peptide (1)..(302): Ceres Seq. ID no. 12357883
  misc_feature (1)..(299): NCBI GI NO: 38344841 NR Description: OSJNBa0064H22.22
  misc_feature (1)..(300): NCBI GI NO: 15222791 NR Description: hypothetical protein; protein id: At1g49640.1
  misc_feature (1)..(301): NCBI GI NO: 21537287 NR Description: putative esterase [Arabidopsis thaliana]
  misc_feature (1)..(301): NCBI GI NO: 18402731 NR Description: expressed protein; protein id: At1g49650
  misc_feature (58)..(299): NCBI GI NO: 15227669 NR Description: putative esterase; protein id: At2g03550.1
  misc_feature (58)..(299): NCBI GI NO: 28393060 NR Description: putative esterase [Arabidopsis thaliana]
  misc_feature (1)..(43): NCBI GI NO: 15227669 NR Description: putative esterase; protein id: At2g03550.1
  misc_feature (1)..(43): NCBI GI NO: 28393060 NR Description: putative esterase [Arabidopsis thaliana]
  misc_feature (1)..(301): NCBI GI NO: 18086341 NR Description: AT3g48690/T8P19_200 [Arabidopsis thaliana]
  misc_feature (1)..(301): NCBI GI NO: 15228425 NR Description: putative protein; protein id: At3g48690
METVPAGFDADTGVTSKDVVVDAATGIATRLYLPAIPTAPSSPQSDGNGNGNGSATAKLPILVIFHGGGFVIGSPADPGFHRYMNSLVASARVVAVSVGYRLAPENPLPAAYKDSWTALNWAVSGADPWLSAHGDLGRVFVAGYSAGSNIAHNMAIAAGVRGLRAAEPPRVEGVILLHPSFAGEQRMEEEDDRFWQVNKRRWKAIFPGARDGLDDPRINPVVAGAPSLAKLVGERLLVCTASEDPRAPRGRAYCEAVRASCWPGKVESFESQNEGHGFFVSGHGSTQAIALMDRVVGFIVGH

SEQ ID NO: 27095 - protein, 219 aa, Zea mays subsp. mays
  peptide (1)..(219): Ceres Seq. ID no. 12357884
  misc_feature (1)..(216): NCBI GI NO: 38344841 NR Description: OSJNBa0064H22.22
  misc_feature (1)..(217): NCBI GI NO: 15222791 NR Description: hypothetical protein; protein id: At1g49640.1
  misc_feature (1)..(218): NCBI GI NO: 21537287 NR Description: putative esterase [Arabidopsis thaliana]
  misc_feature (1)..(218): NCBI GI NO: 18402731 NR Description: expressed protein; protein id: At1g49650
  misc_feature (1)..(216): NCBI GI NO: 15227669 NR Description: putative esterase; protein id: At2g03550.1
  misc_feature (1)..(216): NCBI GI NO: 28393060 NR Description: putative esterase [Arabidopsis thaliana]
  misc_feature (1)..(218): NCBI GI NO: 18086341 NR Description: AT3g48690/T8P19_200 [Arabidopsis thaliana]
  misc_feature (1)..(218): NCBI GI NO: 15228425 NR Description: putative protein; protein id: At3g48690
  misc_feature (1)..(216): NCBI GI NO: 21536771 NR Description: unknown [Arabidopsis thaliana]
  misc_feature (1)..(216): NCBI GI NO: 18401743 NR Description: expressed protein; protein id: At1g47480
MNSLVASARVVAVSVGYRLAPENPLPAAYKDSWTALNWAVSGADPWLSAHGDLGRVFVAGYSAGSNIAHNMAIAAGVRGLRAAEPPRVEGVILLHPSFAGEQRMEEEDDRFWQVNKRRWKAIFPGARDGLDDPRINPVVAGAPSLAKLVGERLLVCTASEDPRAPRGRAYCEAVRASCWPGKVESFESQNEGHGFFVSGHGSTQAIALMDRVVGFIVGH

SEQ ID NO: 27096 - DNA, 1610 bp, Zea mays subsp. mays
  misc_feature (1)..(1610): Ceres Seq. ID no. 12406770
acgatcccactctccccgctcacctcaaggagtcaaggtgcaaagctaagcttagctcattgctcaagcttccgtctctttctctctgcgagactgcacactgccaccacgcgcaatggcggcattccaccatttgttgccggccttgctccttctactcctgctcccttccacccctgaggcgacgtcctcggcgctgcttggcatcagctacggtcgcgttggcaacaacctccctgcagctacatcagtgccgcagattgtggcttccctgggcgtcggccgcgtccgactctacgatgctgacagcaccaccattcgcgccttcgccaacacgggcgtcgagctcgtcgtcggcgtccctgacgagtgcctcgccactgtctccaccccgacgggcgccgcctcctgggtccgctccaacatttcccctgcgctcccggccacaaagatcgccttcctcacagtcggcaacgaggtgctcaccggcgtcaacagctcctcgctgtccaggtacctccttccggcgatgcggtgcctccacgacgcgcttgcgcaggccggcctggacaagcaggtcgccgtgaccacggcgcacaacctcggcgtgctggccacgtcgtacccgccgtcgtcggcgtacttccgcaaggacctcctcccgatgctctgccccattctcgacttccacgcgcgcgcgggctcgccgttccttgttaatgcgtacccctacttcgcctacgccgaggaacccaccggcgtggagctcgagtacgcgctgctggaacccggccatgccggtgtcgccgacccggggaccgggctgcactacaccaacatgctcgcagcgcaggtggatgcggtgtaccacgccatcgccgcagccaacagcgcggcggcgcgggccgcgcaggtgcgcgtgtctgagaccgggtggccgtcggcgggggacgccaacgagaccggcgccacgccgcagaacgcggcgaggtacaacggcaacgtgatgcggctcgtggcccaggggaagggcacgccgctgcggccggcggcgccgctgcgcgtctacatgttcgcgctcttcaacgagaacatgaagcccgggcccaacgtcggagcgcaactacgggctcttcaagcccgacggaacgccggcgtacgagctttcctaccgcctcccgctggacaacaccacctcctcctcttccgccggtggcagcattaccggcggtggtgggtacaatggccacggctacgggtcgtcggacaacggcggatactacagcatctcggccgccgccaaggtgacaccgggttggtggacatggccacaggtagctgtggcaccatgtgtggctgtactggccatggcattgtgaccattagcagagatcaagtggtacctgcctggacttggtggatggaagcctctggcttctgatggagtcagaagcagcgtatggtgtgggtcagtgaactgctgttctagagaaacgcattgctcgtggtgatccacttcctctctctctatgttgtttcccttttctccacgttgttgtaactgaggtgtccttgtaatcagtggtgaacaaatggactagacaattgtc

SEQ ID NO: 27097 - protein, 441 aa, Zea mays subsp. mays
  peptide (1)..(441): Ceres Seq. ID no. 12406771
  misc_feature (29)..(331): Pfam Name: Pfam Description:  Glycosyl hydrolases family 17
  misc_feature (8)..(331): NCBI GI NO: 37531294 NR Description: putative beta-1,3-glucanase
  misc_feature (11)..(331): NCBI GI NO: 6006371 NR Description: Similar to hypothetical protein - potato (S31196)
  misc_feature (1)..(331): NCBI GI NO: 25316443 NR Description: CDS protein F9L11.6
  misc_feature (1)..(331): NCBI GI NO: 30692765 NR Description: glycosyl hydrolase family 17
  misc_feature (12)..(332): NCBI GI NO: 419789 NR Description: hypothetical protein - potato
  misc_feature (12)..(331): NCBI GI NO: 15238298 NR Description: glycosyl hydrolase family 17; protein id:At5g42100
  misc_feature (1)..(354): NCBI GI NO: 38346337 NR Description: OSJNBa0073L04.8
  misc_feature (12)..(331): NCBI GI NO: 34908492 NR Description: putative beta-1,3-glucanase
  misc_feature (12)..(353): NCBI GI NO: 18401444 NR Description: glycosyl hydrolase family 17; protein id:At2g27500
  misc_feature (12)..(353): NCBI GI NO: 25316425 NR Description: probable beta-1,3-glucanase
MAAFHHLLPALLLLLLLPSTPEATSSALLGISYGRVGNNLPAATSVPQIVASLGVGRVRLYDADSTTIRAFANTGVELVVGVPDECLATVSTPTGAASWVRSNISPALPATKIAFLTVGNEVLTGVNSSSLSRYLLPAMRCLHDALAQAGLDKQVAVTTAHNLGVLATSYPPSSAYFRKDLLPMLCPILDFHARAGSPFLVNAYPYFAYAEEPTGVELEYALLEPGHAGVADPGTGLHYTNMLAAQVDAVYHAIAAANSAAARAAQVRVSETGWPSAGDANETGATPQNAARYNGNVMRLVAQGKGTPLRPAAPLRVYMFALFNENMKPGPNVGAQLRALQARRNAGVRAFLPPPAGQHHLLLFRRWQHYRRWWVQWPRLRVVGQRRILQHLGRRQGDTGLVDMATGSCGTMCGCTGHGIVTISRDQVVPAWTWWMEASGF

SEQ ID NO: 27098 - protein, 303 aa, Zea mays subsp. mays
  peptide (1)..(303): Ceres Seq. ID no. 12406772
  misc_feature (1)..(193): Pfam Name: Pfam Description:  Glycosyl hydrolases family 17
  misc_feature (1)..(193): NCBI GI NO: 37531294 NR Description: putative beta-1,3-glucanase
  misc_feature (1)..(193): NCBI GI NO: 6006371 NR Description: Similar to hypothetical protein - potato (S31196)
  misc_feature (1)..(193): NCBI GI NO: 25316443 NR Description: CDS protein F9L11.6
  misc_feature (1)..(193): NCBI GI NO: 30692765 NR Description: glycosyl hydrolase family 17
  misc_feature (1)..(194): NCBI GI NO: 419789 NR Description: hypothetical protein - potato
  misc_feature (1)..(193): NCBI GI NO: 15238298 NR Description: glycosyl hydrolase family 17; protein id:At5g42100
  misc_feature (1)..(216): NCBI GI NO: 38346337 NR Description: OSJNBa0073L04.8
  misc_feature (1)..(193): NCBI GI NO: 34908492 NR Description: putative beta-1,3-glucanase
  misc_feature (1)..(215): NCBI GI NO: 18401444 NR Description: glycosyl hydrolase family 17; protein id:At2g27500
  misc_feature (1)..(215): NCBI GI NO: 25316425 NR Description: probable beta-1,3-glucanase
MRCLHDALAQAGLDKQVAVTTAHNLGVLATSYPPSSAYFRKDLLPMLCPILDFHARAGSPFLVNAYPYFAYAEEPTGVELEYALLEPGHAGVADPGTGLHYTNMLAAQVDAVYHAIAAANSAAARAAQVRVSETGWPSAGDANETGATPQNAARYNGNVMRLVAQGKGTPLRPAAPLRVYMFALFNENMKPGPNVGAQLRALQARRNAGVRAFLPPPAGQHHLLLFRRWQHYRRWWVQWPRLRVVGQRRILQHLGRRQGDTGLVDMATGSCGTMCGCTGHGIVTISRDQVVPAWTWWMEASGF

SEQ ID NO: 27099 - protein, 258 aa, Zea mays subsp. mays
  peptide (1)..(258): Ceres Seq. ID no. 12406773
  misc_feature (1)..(148): Pfam Name: Pfam Description:  Glycosyl hydrolases family 17
  misc_feature (1)..(148): NCBI GI NO: 37531294 NR Description: putative beta-1,3-glucanase
  misc_feature (1)..(148): NCBI GI NO: 6006371 NR Description: Similar to hypothetical protein - potato (S31196)
  misc_feature (1)..(148): NCBI GI NO: 25316443 NR Description: CDS protein F9L11.6
  misc_feature (1)..(148): NCBI GI NO: 30692765 NR Description: glycosyl hydrolase family 17
  misc_feature (1)..(149): NCBI GI NO: 419789 NR Description: hypothetical protein - potato
  misc_feature (1)..(148): NCBI GI NO: 15238298 NR Description: glycosyl hydrolase family 17; protein id:At5g42100
  misc_feature (1)..(171): NCBI GI NO: 38346337 NR Description: OSJNBa0073L04.8
  misc_feature (1)..(148): NCBI GI NO: 34908492 NR Description: putative beta-1,3-glucanase
  misc_feature (1)..(170): NCBI GI NO: 18401444 NR Description: glycosyl hydrolase family 17; protein id:At2g27500
  misc_feature (1)..(170): NCBI GI NO: 25316425 NR Description: probable beta-1,3-glucanase
MLCPILDFHARAGSPFLVNAYPYFAYAEEPTGVELEYALLEPGHAGVADPGTGLHYTNMLAAQVDAVYHAIAAANSAAARAAQVRVSETGWPSAGDANETGATPQNAARYNGNVMRLVAQGKGTPLRPAAPLRVYMFALFNENMKPGPNVGAQLRALQARRNAGVRAFLPPPAGQHHLLLFRRWQHYRRWWVQWPRLRVVGQRRILQHLGRRQGDTGLVDMATGSCGTMCGCTGHGIVTISRDQVVPAWTWWMEASGF

SEQ ID NO: 27100 - DNA, 1247 bp, Zea mays subsp. mays
  misc_feature (1)..(1247): Ceres Seq. ID no. 12406931
tcgtttcgcgtcctagcccaggacaagttccctttttcttctcccaagtctgcgactaggaggcgacgggccgacgggccaagtttcctttctcttctcagtctgcgactggcggcggcgaccatcacgcacaagccttcgttgctacctgcgctccgccaattcggtgaattgcagtctaagcaaagggaaaaggaaggatcttttctccagacttggtaattttggacgacaagatgcacttccttgcatcatttcatgtccctacaggttttgtattatctgatttttcgggatggatgccaaaaggttcctgcatctggtcgaggagaagaaaagaagggtcctcgagaagaaagaagccccactaaagtgggagcagaagctagaaacagcagctaaggccaaggttgatgcagaagcaaaggtgaagaagctaaattcaagaaagcacaggaggagaggagatttgtcctcagactctgatagtgactatggcagcgatgttgatcgaaaacacttgaagaggaagaaccgcagaaggaacaagaagcatgagcattctgactctgatgatgccaggagacgcaatcgtagatctagaaggagcaccgactcaagtgatgagagcaacagtgaatacgagaccaggtctgaagaagaacgtccaaggaagaagcgctcgcacagaagaaggcatcaccggcactcttcaaagtcagactctgaaaactacagcagtgatgaggaacaacggagacctgccaaggaccattctcagagccgcaggcggcaccatcggtcatctgatgatgactcagacaaggacaaggtcaagtcaagacatgggaagggtctgagatctcgtgacgaggatgcaagagcagatttcaacagcaataagcatctcaggagccaatccttggaggagtcatcagatgatagagatgctgatgaatctgagaagatgaggaatggcaaaaggtctcacaagaatggcggccaccgtcaccatcaccatcgacaccaccatgaatgacatagtaactctgcagaacctaatgacaggaggcaagtactgaaagatggccagaggggcccttgaaggtgacagcgcatactgaagatatcccagcaaggtcgagttaattgtccttattaaggacatgaagatcatttttttttcgttcctgatgttctcagataattattgtattgctgacaacatttctttgatttgtgaatat

SEQ ID NO: 27101 - protein, 247 aa, Zea mays subsp. mays
  peptide (1)..(247): Ceres Seq. ID no. 12406932
  misc_feature (11)..(227): Pfam Name: Pfam Description:  Caldesmon
  misc_feature (1)..(247): NCBI GI NO: 34895374 NR Description: P0698A04.25
  misc_feature (1)..(235): NCBI GI NO: 18379151 NR Description: expressed protein; protein id: At2g01100
  misc_feature (10)..(247): NCBI GI NO: 15218071 NR Description: DEAD/DEAH box RNA helicase, putative
  misc_feature (12)..(231): NCBI GI NO: 39594465 NR Description: Hypothetical protein CBG19125
  misc_feature (28)..(247): NCBI GI NO: 12834839 NR Description: unnamed protein product [Mus musculus]
  misc_feature (11)..(247): NCBI GI NO: 39586156 NR Description: Hypothetical protein CBG15274
  misc_feature (11)..(247): NCBI GI NO: 24580684 NR Description: CG2839-PA [Drosophila melanogaster]
  misc_feature (28)..(247): NCBI GI NO: 30794464 NR Description: RIKEN cDNA 1110021E09 [Mus musculus]
  misc_feature (27)..(247): NCBI GI NO: 12834839 NR Description: unnamed protein product [Mus musculus]
  misc_feature (4)..(247): NCBI GI NO: 28485813 NR Description: similar to matrin cyclophilin (matrin-cyp)
MDAKRFLHLVEEKKRRVLEKKEAPLKWEQKLETAAKAKVDAEAKVKKLNSRKHRRRGDLSSDSDSDYGSDVDRKHLKRKNRRRNKKHEHSDSDDARRRNRRSRRSTDSSDESNSEYETRSEEERPRKKRSHRRRHHRHSSKSDSENYSSDEEQRRPAKDHSQSRRRHHRSSDDDSDKDKVKSRHGKGLRSRDEDARADFNSNKHLRSQSLEESSDDRDADESEKMRNGKRSHKNGGHRHHHHRHHHE

SEQ ID NO: 27102 - DNA, 1380 bp, Zea mays subsp. mays
  misc_feature (1)..(1380): Ceres Seq. ID no. 12404892
  misc_feature (443)..(443): n is a, c, t, g, unknown, or other
  misc_feature (936)..(936): n is a, c, t, g, unknown, or other
  misc_feature (937)..(937): n is a, c, t, g, unknown, or other
  misc_feature (444)..(444): n is a, c, t, g, unknown, or other
  misc_feature (946)..(946): n is a, c, t, g, unknown, or other
  misc_feature (986)..(986): n is a, c, t, g, unknown, or other
  misc_feature (45)..(45): n is a, c, t, g, unknown, or other
  misc_feature (945)..(945): n is a, c, t, g, unknown, or other
atcgttcaccgaaccggtgcttctccgtgcatatatatataagcncgcgaccccggccgggcggcatcacagcacagcagtgcgccgtcattcattcatcgctgccatggcttcccctgtcctgctcgtcgccgcgctctgctgtctctgcgcgctgctcggagcggcgggggagccggcgaggggagcggcggcggaagcgtcggcactccgcagcaaggcggccacggaccccaacatggaggtgaagttcgacttcacgccgttcctgatccagtacaagagcggccgcgttgcaccggttcatgggcacgtcgttcgtcccggcgtccgtggacccgcgcaccggggtggcctccagggacgtggtcgtggaccacgggactggcctcgcggtgcggctgtaccggccgagccgccaagccgtcgccgccggcgtcggnngcaggctcaccgtgctggtgtacttccacggcggcgcgttcgtggtggagtcggcgttcgaccccgtgtaccacggctacctgaacgcgctgacggccaaggccggggtcatcgcggtgtcggtgaactaccgcctggcgccggagcacccgctcccggcggcgtacgaggacgcgtgggcggcgctggcgtgggtggtggcgaacgcgaacgcgcgacgcggcggggccggggccggggccggggacccctggctgtccaggcacggcgacgcgtcccgcctgttcctcgccggcgacagcgccggcggcaacatcgcgcagaacctggcgatgcgcgcggcggggcagcagcagaggatcagggggctggcgctgctggacccctacttcctggggcggtacgtgggcggggtcgcggcgcgcgcgtgggacttcatctgcgcgggaaggtacgggatggaccacccgtacgtggacccgatggcgctgnnggcggagnngctgcggcggctgccgtcgccgcgcgtgctgatgacggtntcggagcaggaccggctcggccccttccagcgcgcgtacgtggacgcgctccggggcagcgggtggcgcgggcgggcgcggctgtacgtgacgcccggcgagggccactgctacttcctcaacaacctcgcctcgcccaaggccgccatgcacatggccacgctcgccgcgttcatcaacggcagctgatagcttgtcggcagcgtggtagtgctgctcacccgatcgatcagccagccctctgtacgtagctatagtggtctgtctatctcactggtgagtggagacatctgtaaccaccataccgtatactgtattttgtcagtggccgcccgagagagaggtgtttagcatgcatgttatgtaatgtaatactacgcgcacgtttttgttc

SEQ ID NO: 27103 - protein, 411 aa, Zea mays subsp. mays
  peptide (1)..(411): Ceres Seq. ID no. 12404893
  misc_feature (96)..(409): NCBI GI NO: 22959520 NR Description: hypothetical protein [Rhodobacter sphaeroides]
  misc_feature (108)..(364): NCBI GI NO: 13562004 NR Description: major ampullate spidroin 2-like protein
  misc_feature (258)..(372): NCBI GI NO: 9625624 NR Description: nuclear antigen EBNA1 [Human herpesvirus 4]
  misc_feature (178)..(230): NCBI GI NO: 9625624 NR Description: nuclear antigen EBNA1 [Human herpesvirus 4]
  misc_feature (258)..(358): NCBI GI NO: 9625624 NR Description: nuclear antigen EBNA1 [Human herpesvirus 4]
  misc_feature (14)..(307): NCBI GI NO: 19553189 NR Description: translation initiation factor 2
  misc_feature (258)..(356): NCBI GI NO: 9625624 NR Description: nuclear antigen EBNA1 [Human herpesvirus 4]
  misc_feature (15)..(15): Xaa is any aa, unknown or other
  misc_feature (148)..(148): Xaa is any aa, unknown or other
  misc_feature (312)..(312): Xaa is any aa, unknown or other
  misc_feature (315)..(315): Xaa is any aa, unknown or other
  misc_feature (329)..(329): Xaa is any aa, unknown or other
SFTEPVLLRAYIYKXATPAGRHHSTAVRRHSFIAAMASPVLLVAALCCLCALLGAAGEPARGAAAEASALRSKAATDPNMEVKFDFTPFLIQYKSGRVAPVHGHVVRPGVRGPAHRGGLQGRGRGPRDWPRGAAVPAEPPSRRRRRRXQAHRAGVLPRRRVRGGVGVRPRVPRLPERADGQGRGHRGVGELPPGAGAPAPGGVRGRVGGAGVGGGERERATRRGRGRGRGPLAVQARRRVPPVPRRRQRRRQHRAEPGDARGGAAAEDQGAGAAGPLLPGAVRGRGRGARVGLHLRGKVRDGPPVRGPDGAXGGXAAAAAVAARADDGXGAGPARPLPARVRGRAPGQRVARAGAAVRDARRGPLLLPQQPRLAQGRHAHGHARRVHQRQLIACRQRGSAAHPIDQPALCT

SEQ ID NO: 27104 - protein, 376 aa, Zea mays subsp. mays
  peptide (1)..(376): Ceres Seq. ID no. 12404894
  misc_feature (61)..(374): NCBI GI NO: 22959520 NR Description: hypothetical protein [Rhodobacter sphaeroides]
  misc_feature (73)..(329): NCBI GI NO: 13562004 NR Description: major ampullate spidroin 2-like protein
  misc_feature (223)..(337): NCBI GI NO: 9625624 NR Description: nuclear antigen EBNA1 [Human herpesvirus 4]
  misc_feature (143)..(195): NCBI GI NO: 9625624 NR Description: nuclear antigen EBNA1 [Human herpesvirus 4]
  misc_feature (223)..(323): NCBI GI NO: 9625624 NR Description: nuclear antigen EBNA1 [Human herpesvirus 4]
  misc_feature (1)..(272): NCBI GI NO: 19553189 NR Description: translation initiation factor 2
  misc_feature (223)..(321): NCBI GI NO: 9625624 NR Description: nuclear antigen EBNA1 [Human herpesvirus 4]
  misc_feature (113)..(113): Xaa is any aa, unknown or other
  misc_feature (277)..(277): Xaa is any aa, unknown or other
  misc_feature (280)..(280): Xaa is any aa, unknown or other
  misc_feature (294)..(294): Xaa is any aa, unknown or other
MASPVLLVAALCCLCALLGAAGEPARGAAAEASALRSKAATDPNMEVKFDFTPFLIQYKSGRVAPVHGHVVRPGVRGPAHRGGLQGRGRGPRDWPRGAAVPAEPPSRRRRRRXQAHRAGVLPRRRVRGGVGVRPRVPRLPERADGQGRGHRGVGELPPGAGAPAPGGVRGRVGGAGVGGGERERATRRGRGRGRGPLAVQARRRVPPVPRRRQRRRQHRAEPGDARGGAAAEDQGAGAAGPLLPGAVRGRGRGARVGLHLRGKVRDGPPVRGPDGAXGGXAAAAAVAARADDGXGAGPARPLPARVRGRAPGQRVARAGAAVRDARRGPLLLPQQPRLAQGRHAHGHARRVHQRQLIACRQRGSAAHPIDQPALCT

SEQ ID NO: 27105 - protein, 332 aa, Zea mays subsp. mays
  peptide (1)..(332): Ceres Seq. ID no. 12404895
  misc_feature (17)..(330): NCBI GI NO: 22959520 NR Description: hypothetical protein [Rhodobacter sphaeroides]
  misc_feature (29)..(285): NCBI GI NO: 13562004 NR Description: major ampullate spidroin 2-like protein
  misc_feature (179)..(293): NCBI GI NO: 9625624 NR Description: nuclear antigen EBNA1 [Human herpesvirus 4]
  misc_feature (99)..(151): NCBI GI NO: 9625624 NR Description: nuclear antigen EBNA1 [Human herpesvirus 4]
  misc_feature (179)..(279): NCBI GI NO: 9625624 NR Description: nuclear antigen EBNA1 [Human herpesvirus 4]
  misc_feature (1)..(228): NCBI GI NO: 19553189 NR Description: translation initiation factor 2
  misc_feature (179)..(277): NCBI GI NO: 9625624 NR Description: nuclear antigen EBNA1 [Human herpesvirus 4]
  misc_feature (69)..(69): Xaa is any aa, unknown or other
  misc_feature (233)..(233): Xaa is any aa, unknown or other
  misc_feature (236)..(236): Xaa is any aa, unknown or other
  misc_feature (250)..(250): Xaa is any aa, unknown or other
MEVKFDFTPFLIQYKSGRVAPVHGHVVRPGVRGPAHRGGLQGRGRGPRDWPRGAAVPAEPPSRRRRRRXQAHRAGVLPRRRVRGGVGVRPRVPRLPERADGQGRGHRGVGELPPGAGAPAPGGVRGRVGGAGVGGGERERATRRGRGRGRGPLAVQARRRVPPVPRRRQRRRQHRAEPGDARGGAAAEDQGAGAAGPLLPGAVRGRGRGARVGLHLRGKVRDGPPVRGPDGAXGGXAAAAAVAARADDGXGAGPARPLPARVRGRAPGQRVARAGAAVRDARRGPLLLPQQPRLAQGRHAHGHARRVHQRQLIACRQRGSAAHPIDQPALCT

SEQ ID NO: 27106 - protein, 289 aa, Zea mays subsp. mays
  peptide (1)..(289): Ceres Seq. ID no. 12404896
  misc_feature (33)..(94): Pfam Name: Pfam Description:  Carboxylesterase
  misc_feature (1)..(287): NCBI GI NO: 38344841 NR Description: OSJNBa0064H22.22
  misc_feature (1)..(287): NCBI GI NO: 34393323 NR Description: putative cell death associated protein
  misc_feature (1)..(287): NCBI GI NO: 18401743 NR Description: expressed protein; protein id: At1g47480
  misc_feature (1)..(287): NCBI GI NO: 21536771 NR Description: unknown [Arabidopsis thaliana]
  misc_feature (1)..(287): NCBI GI NO: 34393904 NR Description: putative cell death associated protein
  misc_feature (1)..(288): NCBI GI NO: 21537287 NR Description: putative esterase [Arabidopsis thaliana]
  misc_feature (1)..(288): NCBI GI NO: 18402731 NR Description: expressed protein; protein id: At1g49650
  misc_feature (1)..(288): NCBI GI NO: 15228426 NR Description: putative protein; protein id: At3g48700.1
  misc_feature (1)..(287): NCBI GI NO: 34393975 NR Description: putative PrMC3
  misc_feature (1)..(287): NCBI GI NO: 15227669 NR Description: putative esterase; protein id: At2g03550.1
  misc_feature (46)..(46): Xaa is any aa, unknown or other
  misc_feature (47)..(47): Xaa is any aa, unknown or other
  misc_feature (211)..(211): Xaa is any aa, unknown or other
  misc_feature (214)..(214): Xaa is any aa, unknown or other
  misc_feature (227)..(227): Xaa is any aa, unknown or other
MGTSFVPASVDPRTGVASRDVVVDHGTGLAVRLYRPSRQAVAAGVXXRLTVLVYFHGGAFVVESAFDPVYHGYLNALTAKAGVIAVSVNYRLAPEHPLPAAYEDAWAALAWVVANANARRGGAGAGAGDPWLSRHGDASRLFLAGDSAGGNIAQNLAMRAAGQQQRIRGLALLDPYFLGRYVGGVAARAWDFICAGRYGMDHPYVDPMALXAEXLRRLPSPRVLMTXSEQDRLGPFQRAYVDALRGSGWRGRARLYVTPGEGHCYFLNNLASPKAAMHMATLAAFINGS

SEQ ID NO: 27107 - DNA, 1167 bp, Zea mays subsp. mays
  misc_feature (1)..(1167): Ceres Seq. ID no. 12355460
aaaaggctgtcagctaaattcttcggaacccccgttgccagccggcgatcgcgccgtgggatctcatcgaggcgacgacggcgatgtcaagggaggcggcgaggacgaggagccgggtcctggtggttggcgccaccggccgcctcggtggaagcatcgctcgggccagcctcgccgcgggtcaccccaccttcgcgctcgttcggccccaccacttcgcacgccccgattcccccgtgcttgggccgctcgtagccgccggcgccactctgctccaggggtcactggaagattactcgagcctgctcgaggcggtgtgtcaggtggacgttgtcatctgcgcggtgtccacgaagcaggtgctcgagcagaagcctctgattcgggctataaaggaagctggatgcgtgaagagatttattccggcagaatttggagcagatccaacaaaggttcaaatttgtggcatggattatggcttctatgagaagaaaattgaaatccgtcattcaatagagagtgaaggcattcctcatacttacatatgctgcaacttctttatgcgctatttgcttccttcactggtgcaacctgggctagatgctcctcctagagatgaaatcaaaatatttggtgaaggaaatactaaaggtgtttttgttaaagagaatgatgttgctaaatttacaatatgcaccatagaggatcccagaacattgaacaagacgttgtatctgagacctccaggaaatgtcttctcaatgaatgaattggctgacctctgggagtcaaaactcaagaaatccctgaaaaggttatatgtaacagaagagcaacttcttaaagaaatccatgatgctccatttcccttgaagatggatttaatctttatatattcagcgtttgttaagggtgaccacacgtattttgaaattgacttgtcaatggaaggaactcaactgtatccccatgtaaattatacaacagtgaacgagtacttggatactctagtttaggatatttgttcggtttatatcttccttgtaataagtcaaaaataatgttttttttttgtttcgaatggagcattaaaagaaggggactgatggacacctatccatgtttgttctgacaagcgaatgtggtgatgatctgacaaattttttt

SEQ ID NO: 27108 - protein, 310 aa, Zea mays subsp. mays
  peptide (1)..(310): Ceres Seq. ID no. 12355461
  misc_feature (7)..(310): Pfam Name: Pfam Description:  Isoflavone reductase
  misc_feature (4)..(310): NCBI GI NO: 15236146 NR Description: isoflavone reductase family; protein id:At4g34540
  misc_feature (8)..(310): NCBI GI NO: 38492949 NR Description: Chain A
  misc_feature (8)..(310): NCBI GI NO: 3415126 NR Description: phenylcoumaran benzylic ether reductase
  misc_feature (9)..(310): NCBI GI NO: 10764491 NR Description: allergenic isoflavone reductase-like protein Bet v6
  misc_feature (9)..(310): NCBI GI NO: 6573169 NR Description: isoflavone reductase homolog 1 [Glycine max]
  misc_feature (9)..(310): NCBI GI NO: 7578895 NR Description: phenylcoumaran benzylic ether reductase homolog Fi1
  misc_feature (8)..(310): NCBI GI NO: 7578899 NR Description: phenylcoumaran benzylic ether reductase homolog TH1
  misc_feature (8)..(310): NCBI GI NO: 7578905 NR Description: phenylcoumaran benzylic ether reductase homolog TH4
  misc_feature (8)..(310): NCBI GI NO: 7578901 NR Description: phenylcoumaran benzylic ether reductase homolog TH2
  misc_feature (10)..(310): NCBI GI NO: 7578907 NR Description: phenylcoumaran benzylic ether reductase homolog TP5
MSREAARTRSRVLVVGATGRLGGSIARASLAAGHPTFALVRPHHFARPDSPVLGPLVAAGATLLQGSLEDYSSLLEAVCQVDVVICAVSTKQVLEQKPLIRAIKEAGCVKRFIPAEFGADPTKVQICGMDYGFYEKKIEIRHSIESEGIPHTYICCNFFMRYLLPSLVQPGLDAPPRDEIKIFGEGNTKGVFVKENDVAKFTICTIEDPRTLNKTLYLRPPGNVFSMNELADLWESKLKKSLKRLYVTEEQLLKEIHDAPFPLKMDLIFIYSAFVKGDHTYFEIDLSMEGTQLYPHVNYTTVNEYLDTLV

SEQ ID NO: 27109 - protein, 182 aa, Zea mays subsp. mays
  peptide (1)..(182): Ceres Seq. ID no. 12355462
  misc_feature (1)..(182): Pfam Name: Pfam Description:  Isoflavone reductase
  misc_feature (1)..(182): NCBI GI NO: 15236146 NR Description: isoflavone reductase family; protein id:At4g34540
  misc_feature (1)..(182): NCBI GI NO: 38492949 NR Description: Chain A
  misc_feature (1)..(182): NCBI GI NO: 3415126 NR Description: phenylcoumaran benzylic ether reductase
  misc_feature (1)..(182): NCBI GI NO: 10764491 NR Description: allergenic isoflavone reductase-like protein Bet v6
  misc_feature (1)..(182): NCBI GI NO: 6573169 NR Description: isoflavone reductase homolog 1 [Glycine max]
  misc_feature (1)..(182): NCBI GI NO: 7578895 NR Description: phenylcoumaran benzylic ether reductase homolog Fi1
  misc_feature (1)..(182): NCBI GI NO: 7578899 NR Description: phenylcoumaran benzylic ether reductase homolog TH1
  misc_feature (1)..(182): NCBI GI NO: 7578905 NR Description: phenylcoumaran benzylic ether reductase homolog TH4
  misc_feature (1)..(182): NCBI GI NO: 7578901 NR Description: phenylcoumaran benzylic ether reductase homolog TH2
  misc_feature (1)..(182): NCBI GI NO: 7578907 NR Description: phenylcoumaran benzylic ether reductase homolog TP5
MDYGFYEKKIEIRHSIESEGIPHTYICCNFFMRYLLPSLVQPGLDAPPRDEIKIFGEGNTKGVFVKENDVAKFTICTIEDPRTLNKTLYLRPPGNVFSMNELADLWESKLKKSLKRLYVTEEQLLKEIHDAPFPLKMDLIFIYSAFVKGDHTYFEIDLSMEGTQLYPHVNYTTVNEYLDTLV

SEQ ID NO: 27110 - protein, 161 aa, Zea mays subsp. mays
  peptide (1)..(161): Ceres Seq. ID no. 12355463
KGCQLNSSEPPLPAGDRAVGSHRGDDGDVKGGGEDEEPGPGGWRHRPPRWKHRSGQPRRGSPHLRARSAPPLRTPRFPRAWAARSRRRHSAPGVTGRLLEPARGGVSGGRCHLRGVHEAGARAEASDSGYKGSWMREEIYSGRIWSRSNKGSNLWHGLWLL

SEQ ID NO: 27111 - DNA, 1633 bp, Zea mays subsp. mays
  misc_feature (1)..(1633): Ceres Seq. ID no. 12406661
  misc_feature (123)..(123): n is a, c, t, g, unknown, or other
atcaccaaccctcctcctccttgcctaggtactcgcagcagcgtcggcaagcaaggttctcttctcgcgccgcccagatctgagcgctcccatggccatgccgtcctcccgctccccggcgcngccgccaacggcctcctcctcctactggtgctacatgtgcgaccgcttcgttcgcgccgccgcttcctcctcctcctcacccacttcgccgtcctcctcctcccccgcctgcccgtcctgcggcgggggcttcctcgaggagatgggcgcgccgccgccccgcgcccgccggccccgccgcgccgcccgccgcggcaccgactcccgcgcctcgcccttcaaccccgtcatcgttctccgccgctccccgcccgccgacgccgacgccgatggctcctcctctcccgccgccgccaccggcagcagcttacgagctgttctacgacgacggggcggggtcgggcctccgcccgctcccggagagcatgtcggacttcctcatgggctccggcttcgagcggctgctggagcagctggcccagatggaggccggcggcggtctggcggcgcgcgcccgcgacgcgccgccggcgtccaaggccgccgtggactccatgcccgcgctccgcgtcggcgccgcccacgtcgcggccgacgcgcactgcgccgtctgcaaggaggccttcgagctgggcgccgaggccagggagatgccctgcgcccacatctaccatgccgactgcatcctgccctggctcgcgctccgcaactcctgccccgtctgccgccacgagatgcccgccgacaacgccgccccgcgcgctgccgccgccgccgccgcggacgaggacgccagggtcggcctcaccatctggaggctccccggcggcgggttcgcggtcgggagattcgccggcgggccgaggcccgacgagagggagctccccgtggtgtacacggagatggaaagcgggttcaacttcaacagcggccacgcgcccaggcggatctcgtggggcgccaggcaggccgcggccacggacaggggcaccgtccgccgcttcctccgcagcgtcttcgcctgctttggacgcggccacgccccgtcggcggcggccgcgcgcgccatgcctgagctcaacgacgacgacgtggcgtctgaccacagcgccgccttcagccgtgggtccaggagccggagcaccagctggaggctcgaggacgggcgtgccgacgccatggtgcagagatgaccgccgtatactgtgtggaactgcttgtagtacagttacagtaacgctgccgaaaaagattgctgctttgtttcattcatgttgtatttaccgtactactgctagcctcctgcctactacttaggaagatttgaggttgtagaacagggcaaattggtgttagtacatattgtagtagtgaggaagggaaagagagcagcatctcgacctctctttgttagagagtttgcattgcagctgcaggtggggggtcaactgcgaactcaaacacttgttcttggcttggttggtggtaatattaggagcgaggtgatggatcaactgttcttttattatctttctttctgttcagttcattgtggcaggaaccatccttg

SEQ ID NO: 27112 - protein, 459 aa, Zea mays subsp. mays
  peptide (1)..(459): Ceres Seq. ID no. 12406662
  misc_feature (202)..(392): Pfam Name: Pfam Description:  Glycoprotein GG/GX
  misc_feature (170)..(408): NCBI GI NO: 22962211 NR Description: hypothetical protein [Rhodopseudomonas palustris]
  misc_feature (193)..(414): NCBI GI NO: 27375632 NR Description: blr0521 [Bradyrhizobium japonicum]
  misc_feature (200)..(397): NCBI GI NO: 6523547 NR Description: hydroxyproline-rich glycoprotein DZ-HRGP
  misc_feature (193)..(414): NCBI GI NO: 15805485 NR Description: hypothetical protein [Deinococcus radiodurans]
  misc_feature (193)..(363): NCBI GI NO: 20138131 NR Description: Vegetative cell wall protein gp1 precursor
  misc_feature (193)..(375): NCBI GI NO: 20138131 NR Description: Vegetative cell wall protein gp1 precursor
  misc_feature (200)..(363): NCBI GI NO: 20138131 NR Description: Vegetative cell wall protein gp1 precursor
  misc_feature (145)..(414): NCBI GI NO: 30984464 NR Description: very large tegument protein
  misc_feature (181)..(373): NCBI GI NO: 6523547 NR Description: hydroxyproline-rich glycoprotein DZ-HRGP
  misc_feature (200)..(377): NCBI GI NO: 6523547 NR Description: hydroxyproline-rich glycoprotein DZ-HRGP
  misc_feature (41)..(41): Xaa is any aa, unknown or other
ITNPPPPCLGTRSSVGKQGSLLAPPRSERSHGHAVLPLPGXAANGLLLLLVLHVRPLRSRRRFLLLLTHFAVLLLPRLPVLRRGLPRGDGRAAAPRPPAPPRRPPRHRLPRLALQPRHRSPPLPARRRRRRWLLLSRRRHRQQLTSCSTTTGRGRASARSRRACRTSSWAPASSGCWSSWPRWRPAAVWRRAPATRRRRPRPPWTPCPRSASAPPTSRPTRTAPSARRPSSWAPRPGRCPAPTSTMPTASCPGSRSATPAPSAATRCPPTTPPRALPPPPPRTRTPGSASPSGGSPAAGSRSGDSPAGRGPTRGSSPWCTRRWKAGSTSTAATRPGGSRGAPGRPRPRTGAPSAASSAASSPALDAATPRRRRPRAPCLSSTTTTWRLTTAPPSAVGPGAGAPAGGSRTGVPTPWCRDDRRILCGTACSTVTVTLPKKIAALFHSCCIYRTTASLLPTT

SEQ ID NO: 27113 - protein, 348 aa, Zea mays subsp. mays
  peptide (1)..(348): Ceres Seq. ID no. 12406663
  misc_feature (96)..(323): Pfam Name: Pfam Description:  HlyD family secretion protein
  misc_feature (1)..(114): NCBI GI NO: 14719329 NR Description: putative RING-H2 finger protein [Oryza sativa]
  misc_feature (15)..(91): NCBI GI NO: 34902106 NR Description: unknown protein
  misc_feature (1)..(130): NCBI GI NO: 37530772 NR Description: putative RING-H2 finger protein
  misc_feature (1)..(113): NCBI GI NO: 13592175 NR Description: ppg3 [Leishmania major]
  misc_feature (1)..(113): NCBI GI NO: 13592175 NR Description: ppg3 [Leishmania major]
  misc_feature (1)..(116): NCBI GI NO: 13592175 NR Description: ppg3 [Leishmania major]
  misc_feature (11)..(11): Xaa is any aa, unknown or other
MAMPSSRSPAXPPTASSSYWCYMCDRFVRAAASSSSSPTSPSSSSPACPSCGGGFLEEMGAPPPRARRPRRAARRGTDSRASPFNPVIVLRRSPPADADADGSSSPAAATGSSLRAVLRRRGGVGPPPAPGEHVGLPHGLRLRAAAGAAGPDGGRRRSGGARPRRAAGVQGRRGLHARAPRRRRPRRGRRALRRLQGGLRAGRRGQGDALRPHLPCRLHPALARAPQLLPRLPPRDARRQRRPARCRRRRRGRGRQGRPHHLEAPRRRVRGREIRRRAEARREGAPRGVHGDGKRVQLQQRPRAQADLVGRQAGRGHGQGHRPPLPPQRLRLLWTRPRPVGGGRARHA

SEQ ID NO: 27114 - protein, 346 aa, Zea mays subsp. mays
  peptide (1)..(346): Ceres Seq. ID no. 12406664
  misc_feature (94)..(321): Pfam Name: Pfam Description:  HlyD family secretion protein
  misc_feature (1)..(112): NCBI GI NO: 14719329 NR Description: putative RING-H2 finger protein [Oryza sativa]
  misc_feature (13)..(89): NCBI GI NO: 34902106 NR Description: unknown protein
  misc_feature (1)..(128): NCBI GI NO: 37530772 NR Description: putative RING-H2 finger protein
  misc_feature (1)..(111): NCBI GI NO: 13592175 NR Description: ppg3 [Leishmania major]
  misc_feature (1)..(111): NCBI GI NO: 13592175 NR Description: ppg3 [Leishmania major]
  misc_feature (1)..(114): NCBI GI NO: 13592175 NR Description: ppg3 [Leishmania major]
  misc_feature (9)..(9): Xaa is any aa, unknown or other
MPSSRSPAXPPTASSSYWCYMCDRFVRAAASSSSSPTSPSSSSPACPSCGGGFLEEMGAPPPRARRPRRAARRGTDSRASPFNPVIVLRRSPPADADADGSSSPAAATGSSLRAVLRRRGGVGPPPAPGEHVGLPHGLRLRAAAGAAGPDGGRRRSGGARPRRAAGVQGRRGLHARAPRRRRPRRGRRALRRLQGGLRAGRRGQGDALRPHLPCRLHPALARAPQLLPRLPPRDARRQRRPARCRRRRRGRGRQGRPHHLEAPRRRVRGREIRRRAEARREGAPRGVHGDGKRVQLQQRPRAQADLVGRQAGRGHGQGHRPPLPPQRLRLLWTRPRPVGGGRARHA

SEQ ID NO: 27115 - DNA, 454 bp, Zea mays subsp. mays
  misc_feature (1)..(454): Ceres Seq. ID no. 12346015
caaaagatgatactcagtcagatcgtgaggaggatgccagtaaacaagaggaggatgatgatgatgatattggtactgctctcatgtctcgcaagcagagaggcctttataaggctatgaagatgggcaaagaaaagaaaaaggagaaagttgagctactcaagaagagaaaaaagaacgcggattctggcgcttcttccaagaagcggcactgatgtgtcacaaatcttcatcgcattggtgtgtcatctctagtagaaatgttaccatgatcagctctgcgtgccaatcccccatgatgggtgggttgccttttgatatctgctatgtatgcttaagatgagttcaaggatatgtaacatgaaacttgaatagaaaagttttgatctgtcttacgaagcatttagactcgttattattgtgaaacttgaatagaaaagttttgacctgtctc

SEQ ID NO: 27116 - protein, 70 aa, Zea mays subsp. mays
  peptide (1)..(70): Ceres Seq. ID no. 12346016
  misc_feature (1)..(69): NCBI GI NO: 28273368 NR Description: pescadillo-like protein
KDDTQSDREEDASKQEEDDDDDIGTALMSRKQRGLYKAMKMGKEKKKEKVELLKKRKKNADSGASSKKRH

SEQ ID NO: 27117 - protein, 43 aa, Zea mays subsp. mays
  peptide (1)..(43): Ceres Seq. ID no. 12346017
  misc_feature (1)..(42): NCBI GI NO: 28273368 NR Description: pescadillo-like protein
MSRKQRGLYKAMKMGKEKKKEKVELLKKRKKNADSGASSKKRH

SEQ ID NO: 27118 - protein, 42 aa, Zea mays subsp. mays
  peptide (1)..(42): Ceres Seq. ID no. 12346018
MCHKSSSHWCVISSRNVTMISSACQSPMMGGLPFDICYVCLR

SEQ ID NO: 27119 - DNA, 1789 bp, Zea mays subsp. mays
  misc_feature (1)..(1789): Ceres Seq. ID no. 12405101
attgccagccagctgcgcagtgcgcttgcctctgctgcgtataaagtttcttccttccttggccgcttctgcgctcgcctcccttctcctcccccatcctctcccttgtggttctagatccactcctccccgtgctcactgctcatccgcgaacaggttgagcggggacgccgtggaggggcgagggggagccagattgagccatggcctcctcctgggttcttgccctggttcttgcgctgtcggcaggcgcaagcctggcgcgtggctccgagccgtggtggaacgagacgcaggtgtacgccaccaccgccaactccggtggcggcaacggcgtcttcgtcggcctcacgctcatccagtcggcggcggccaagggagcggtgtgcttggatggaagcttaccaggttaccacctccacagagggtttggatcaggagcaaacagttggctcgtcaatctcgagggcggaggctggtgcaatgatcgcagcagctgtgtgttccgcaagggcagtcgtcgtggatcatcaaatcacatggagaggcaactccagtttacagggatattgagtaacaaacctgaagagaatcccgatttctacaactggaatagagtgaaggtccggtactgtgatggtggatctttcactggtgatggctctgatgcggctgcaggcctttatttccgaggtcagcgcatttggcaggccgctatggatgacctaatggcccaaggaatgcgttatgctaatcaggcccttctttctggatgctctgccggtggtgtttctaccatacttcactgtgatgaattccgtggactgttcccatcaaataccagagtcaaatgcttagctgatgctggaatgtttcttgacactgttgatgtttctggccgccgggaaatgagatcctttttcaatggtattgtgagattgcagggttctggaagaagcttgcctaggtcttgcacctcacacatggacaaaacctcgtgctttttcccccagaatgtgttgccaaccatccgaaccccaacttttgttttgaacactgcctatgacgtgtggcagcttcaacaaagtgtggcccctagaacagctgatccccaaggtctttggtcaaagtgtaggacgaaccatgccttctgtaatagcaaccagctccagtttttgcaagggttcaggaaccagatgcttgatgccgtgaggggtttctctgcatcaaggcaaaatggtctgttcatcaactcatgttttgctcattgccagagcgagagacaggatacttggtacgcgaacaactctccacgtcttggtaacaagaaaatcgctgacgctgtcggggactggttcttcgagagggggaatgccaagtacacagactgcccatacccttgcgatggcacttgccatcaccttgtgttcaggggagaccactaagatcattcttcagcaccaacaaattcatcagatggtacaaggatcaaaccccaatgggtacagaatggaaaacaaggtatagatacagataaggtgcaagtggtcggcttgcccatgtttgttcatcagtgagtcatatgattgatagtgcgaggacctcacccgcgaacgcgcggaggaggcctctgcattagattcacataccgtcatgatatcgaattttcattggaaaagtgtccatgattacgtaccagaacatttgagttacatactcatttcgtgtactgtattaataacactagaacgttacatattcatttgtcctgaagatcgtactacttggc

SEQ ID NO: 27120 - protein, 413 aa, Zea mays subsp. mays
  peptide (1)..(413): Ceres Seq. ID no. 12405102
  misc_feature (43)..(392): Pfam Name: Pfam Description:  Pectinacetylesterase
  misc_feature (1)..(413): NCBI GI NO: 34913332 NR Description: putative pectin acetylesterase precursor
  misc_feature (43)..(410): NCBI GI NO: 18397406 NR Description: pectinacetylesterase, putative
  misc_feature (4)..(410): NCBI GI NO: 25347293 NR Description: probable pectinacetylesterase precursor T8L23.6
  misc_feature (4)..(410): NCBI GI NO: 30696158 NR Description: pectinacetylesterase, putative
  misc_feature (4)..(410): NCBI GI NO: 21703105 NR Description: At1g57590/T8L23_6 [Arabidopsis thaliana]
  misc_feature (5)..(409): NCBI GI NO: 28392968 NR Description: putative pectinacetylesterase
  misc_feature (1)..(410): NCBI GI NO: 15226462 NR Description: pectinacetylesterase, putative
  misc_feature (39)..(410): NCBI GI NO: 7487997 NR Description: pectin acetylesterase homolog F21E10
  misc_feature (43)..(256): NCBI GI NO: 6714404 NR Description: putative pectinacetylesterase
  misc_feature (291)..(410): NCBI GI NO: 6714404 NR Description: putative pectinacetylesterase
MASSWVLALVLALSAGASLARGSEPWWNETQVYATTANSGGGNGVFVGLTLIQSAAAKGAVCLDGSLPGYHLHRGFGSGANSWLVNLEGGGWCNDRSSCVFRKGSRRGSSNHMERQLQFTGILSNKPEENPDFYNWNRVKVRYCDGGSFTGDGSDAAAGLYFRGQRIWQAAMDDLMAQGMRYANQALLSGCSAGGVSTILHCDEFRGLFPSNTRVKCLADAGMFLDTVDVSGRREMRSFFNGIVRLQGSGRSLPRSCTSHMDKTSCFFPQNVLPTIRTPTFVLNTAYDVWQLQQSVAPRTADPQGLWSKCRTNHAFCNSNQLQFLQGFRNQMLDAVRGFSASRQNGLFINSCFAHCQSERQDTWYANNSPRLGNKKIADAVGDWFFERGNAKYTDCPYPCDGTCHHLVFRGDH

SEQ ID NO: 27121 - protein, 301 aa, Zea mays subsp. mays
  peptide (1)..(301): Ceres Seq. ID no. 12405103
  misc_feature (1)..(280): Pfam Name: Pfam Description:  Pectinacetylesterase
  misc_feature (1)..(301): NCBI GI NO: 34913332 NR Description: putative pectin acetylesterase precursor
  misc_feature (1)..(298): NCBI GI NO: 18397406 NR Description: pectinacetylesterase, putative
  misc_feature (1)..(298): NCBI GI NO: 25347293 NR Description: probable pectinacetylesterase precursor T8L23.6
  misc_feature (1)..(298): NCBI GI NO: 30696158 NR Description: pectinacetylesterase, putative
  misc_feature (1)..(298): NCBI GI NO: 21703105 NR Description: At1g57590/T8L23_6 [Arabidopsis thaliana]
  misc_feature (1)..(297): NCBI GI NO: 28392968 NR Description: putative pectinacetylesterase
  misc_feature (1)..(298): NCBI GI NO: 15226462 NR Description: pectinacetylesterase, putative
  misc_feature (1)..(298): NCBI GI NO: 7487997 NR Description: pectin acetylesterase homolog F21E10
  misc_feature (1)..(144): NCBI GI NO: 6714404 NR Description: putative pectinacetylesterase
  misc_feature (179)..(298): NCBI GI NO: 6714404 NR Description: putative pectinacetylesterase
MERQLQFTGILSNKPEENPDFYNWNRVKVRYCDGGSFTGDGSDAAAGLYFRGQRIWQAAMDDLMAQGMRYANQALLSGCSAGGVSTILHCDEFRGLFPSNTRVKCLADAGMFLDTVDVSGRREMRSFFNGIVRLQGSGRSLPRSCTSHMDKTSCFFPQNVLPTIRTPTFVLNTAYDVWQLQQSVAPRTADPQGLWSKCRTNHAFCNSNQLQFLQGFRNQMLDAVRGFSASRQNGLFINSCFAHCQSERQDTWYANNSPRLGNKKIADAVGDWFFERGNAKYTDCPYPCDGTCHHLVFRGDH

SEQ ID NO: 27122 - protein, 242 aa, Zea mays subsp. mays
  peptide (1)..(242): Ceres Seq. ID no. 12405104
  misc_feature (1)..(221): Pfam Name: Pfam Description:  Pectinacetylesterase
  misc_feature (1)..(242): NCBI GI NO: 34913332 NR Description: putative pectin acetylesterase precursor
  misc_feature (1)..(239): NCBI GI NO: 18397406 NR Description: pectinacetylesterase, putative
  misc_feature (1)..(239): NCBI GI NO: 25347293 NR Description: probable pectinacetylesterase precursor T8L23.6
  misc_feature (1)..(239): NCBI GI NO: 30696158 NR Description: pectinacetylesterase, putative
  misc_feature (1)..(239): NCBI GI NO: 21703105 NR Description: At1g57590/T8L23_6 [Arabidopsis thaliana]
  misc_feature (1)..(238): NCBI GI NO: 28392968 NR Description: putative pectinacetylesterase
  misc_feature (1)..(239): NCBI GI NO: 15226462 NR Description: pectinacetylesterase, putative
  misc_feature (1)..(239): NCBI GI NO: 7487997 NR Description: pectin acetylesterase homolog F21E10
  misc_feature (1)..(85): NCBI GI NO: 6714404 NR Description: putative pectinacetylesterase
  misc_feature (120)..(239): NCBI GI NO: 6714404 NR Description: putative pectinacetylesterase
MDDLMAQGMRYANQALLSGCSAGGVSTILHCDEFRGLFPSNTRVKCLADAGMFLDTVDVSGRREMRSFFNGIVRLQGSGRSLPRSCTSHMDKTSCFFPQNVLPTIRTPTFVLNTAYDVWQLQQSVAPRTADPQGLWSKCRTNHAFCNSNQLQFLQGFRNQMLDAVRGFSASRQNGLFINSCFAHCQSERQDTWYANNSPRLGNKKIADAVGDWFFERGNAKYTDCPYPCDGTCHHLVFRGDH

SEQ ID NO: 27123 - DNA, 1487 bp, Zea mays subsp. mays
  misc_feature (1)..(1487): Ceres Seq. ID no. 12358823
aagaaccctaggaaataacaggagaggggacgcgcgctcactagcaaaatgcaggcctcttccctccggcgagccctccttctgcggggaccgcgaggcgcccagctcttccccattcccgtaggcaacaagccccgtgccttctcctccgcgtcccccgcggcagcgcgctctcccaaagacgctcataatgcgccgccgccgattatgccgacgctgccgtggggtgatgcgctcgcagccacgcagcgcaccttctgcctgccgctcgctgggcgcgtcctcgccgcctcggcgaccgagaacgcggccgtggcccccgtcgcagtctacgcctcgctggccctggccgccgccggcgcgcgcggcgacacgcggcggcaggtcctccaggcgctgggcggcggcggcgggggcaggggcgccgcggttcaagcggccaacttggcgtcgcgcgtggtcaagcgggtgttcaaggaccggtccacgtccggcggcccgcggctggccttcgcaggaggaatatgggccgacacctcaacgagcctatcgcccggggttcgtggaggccgcccgtagtgtctacagctgcacggcgcggacggctgacttcattaacaagcctgaagatgccgccaagctaattaacatgtgggtcaaacaatccacaaaagatactgttacctcgctccttccggatggactaattgacaagaatacaggacttgttattggcagcgcactgtattttaggggaagatggcttgacaggactgatacgaggagtgacgcggtacaaaaattctgctgtctggatcgaacttgtgttgacgttccttttgtggaatatgatagaactcgacctttcgcagtccacgatggatttaaagtgattaagcttccttaccagcaaggaaataatgaacggaagttctccatgtacatcttcctgcctgatgctcatgatggcttgtttgaattagctaagaaagttttcgcggaaccatcattcttagaacaacacttgccaactgagaagcggcacgtggatatcaagattcccaagttcacagtgtcattccaggtcaatatgaagcagtttctgaaagaaatgggcctcgaattacccttcctccgtgatgcagatttcactgatatggtcaaggaagatggatccagaaatccgttgtatctatccgacatacttcataaagcagttttggaggttaatgatgaaggcgttgaagaaacttctgtgagaattggcatagggaagccctcaccaggagagcactttgttgccgaccatcctttcttctttgtcattagggaggaggtgtctggctcagtaatgttcatggggcacatactggacccatcatcacaatcttaatttcgggctctgcacttttgtcacctatatattacacatatatcttgtatgatctgactttgtcagtctggttcaatgagatttttagtacttg

SEQ ID NO: 27124 - protein, 400 aa, Zea mays subsp. mays
  peptide (1)..(400): Ceres Seq. ID no. 12358824
  misc_feature (121)..(396): Pfam Name: serine protease inhibitor Pfam Description: Serpin
  misc_feature (121)..(400): NCBI GI NO: 7438218 NR Description: serpin - barley
  misc_feature (124)..(396): NCBI GI NO: 40539102 NR Description: putative serine protease inhibitor
  misc_feature (121)..(396): NCBI GI NO: 7438222 NR Description: serpin homolog WZS3 - wheat
  misc_feature (121)..(396): NCBI GI NO: 7438221 NR Description: serpin WZS2 - wheat
  misc_feature (121)..(396): NCBI GI NO: 1310677 NR Description: protein z-type serpin
  misc_feature (121)..(396): NCBI GI NO: 5734504 NR Description: serpin [Triticum aestivum]
  misc_feature (121)..(396): NCBI GI NO: 131091 NR Description: Protein Z (Z4) (Major endosperm albumin)
  misc_feature (121)..(396): NCBI GI NO: 2130110 NR Description: serpin - wheat
  misc_feature (121)..(396): NCBI GI NO: 5734506 NR Description: serpin [Triticum aestivum]
  misc_feature (152)..(396): NCBI GI NO: 40539102 NR Description: putative serine protease inhibitor
MRRRRLCRRCRGVMRSQPRSAPSACRSLGASSPPRRPRTRPWPPSQSTPRWPWPPPARAATRGGRSSRRWAAAAGAGAPRFKRPTWRRAWSSGCSRTGPRPAARGWPSQEEYGPTPQRAYRPGFVEAARSVYSCTARTADFINKPEDAAKLINMWVKQSTKDTVTSLLPDGLIDKNTGLVIGSALYFRGRWLDRTDTRSDAVQKFCCLDRTCVDVPFVEYDRTRPFAVHDGFKVIKLPYQQGNNERKFSMYIFLPDAHDGLFELAKKVFAEPSFLEQHLPTEKRHVDIKIPKFTVSFQVNMKQFLKEMGLELPFLRDADFTDMVKEDGSRNPLYLSDILHKAVLEVNDEGVEETSVRIGIGKPSPGEHFVADHPFFFVIREEVSGSVMFMGHILDPSSQS

SEQ ID NO: 27125 - protein, 387 aa, Zea mays subsp. mays
  peptide (1)..(387): Ceres Seq. ID no. 12358825
  misc_feature (108)..(383): Pfam Name: serine protease inhibitor Pfam Description: Serpin
  misc_feature (108)..(387): NCBI GI NO: 7438218 NR Description: serpin - barley
  misc_feature (111)..(383): NCBI GI NO: 40539102 NR Description: putative serine protease inhibitor
  misc_feature (108)..(383): NCBI GI NO: 7438222 NR Description: serpin homolog WZS3 - wheat
  misc_feature (108)..(383): NCBI GI NO: 7438221 NR Description: serpin WZS2 - wheat
  misc_feature (108)..(383): NCBI GI NO: 1310677 NR Description: protein z-type serpin
  misc_feature (108)..(383): NCBI GI NO: 5734504 NR Description: serpin [Triticum aestivum]
  misc_feature (108)..(383): NCBI GI NO: 131091 NR Description: Protein Z (Z4) (Major endosperm albumin)
  misc_feature (108)..(383): NCBI GI NO: 2130110 NR Description: serpin - wheat
  misc_feature (108)..(383): NCBI GI NO: 5734506 NR Description: serpin [Triticum aestivum]
  misc_feature (139)..(383): NCBI GI NO: 40539102 NR Description: putative serine protease inhibitor
MRSQPRSAPSACRSLGASSPPRRPRTRPWPPSQSTPRWPWPPPARAATRGGRSSRRWAAAAGAGAPRFKRPTWRRAWSSGCSRTGPRPAARGWPSQEEYGPTPQRAYRPGFVEAARSVYSCTARTADFINKPEDAAKLINMWVKQSTKDTVTSLLPDGLIDKNTGLVIGSALYFRGRWLDRTDTRSDAVQKFCCLDRTCVDVPFVEYDRTRPFAVHDGFKVIKLPYQQGNNERKFSMYIFLPDAHDGLFELAKKVFAEPSFLEQHLPTEKRHVDIKIPKFTVSFQVNMKQFLKEMGLELPFLRDADFTDMVKEDGSRNPLYLSDILHKAVLEVNDEGVEETSVRIGIGKPSPGEHFVADHPFFFVIREEVSGSVMFMGHILDPSSQS

SEQ ID NO: 27126 - protein, 247 aa, Zea mays subsp. mays
  peptide (1)..(247): Ceres Seq. ID no. 12358826
  misc_feature (1)..(243): Pfam Name: serine protease inhibitor Pfam Description: Serpin
  misc_feature (1)..(247): NCBI GI NO: 7438218 NR Description: serpin - barley
  misc_feature (1)..(243): NCBI GI NO: 40539102 NR Description: putative serine protease inhibitor
  misc_feature (1)..(243): NCBI GI NO: 7438222 NR Description: serpin homolog WZS3 - wheat
  misc_feature (1)..(243): NCBI GI NO: 7438221 NR Description: serpin WZS2 - wheat
  misc_feature (1)..(243): NCBI GI NO: 1310677 NR Description: protein z-type serpin
  misc_feature (1)..(243): NCBI GI NO: 5734504 NR Description: serpin [Triticum aestivum]
  misc_feature (1)..(243): NCBI GI NO: 131091 NR Description: Protein Z (Z4) (Major endosperm albumin)
  misc_feature (1)..(243): NCBI GI NO: 2130110 NR Description: serpin - wheat
  misc_feature (1)..(243): NCBI GI NO: 5734506 NR Description: serpin [Triticum aestivum]
  misc_feature (1)..(243): NCBI GI NO: 40539102 NR Description: putative serine protease inhibitor
MWVKQSTKDTVTSLLPDGLIDKNTGLVIGSALYFRGRWLDRTDTRSDAVQKFCCLDRTCVDVPFVEYDRTRPFAVHDGFKVIKLPYQQGNNERKFSMYIFLPDAHDGLFELAKKVFAEPSFLEQHLPTEKRHVDIKIPKFTVSFQVNMKQFLKEMGLELPFLRDADFTDMVKEDGSRNPLYLSDILHKAVLEVNDEGVEETSVRIGIGKPSPGEHFVADHPFFFVIREEVSGSVMFMGHILDPSSQS

SEQ ID NO: 27127 - DNA, 1037 bp, Zea mays subsp. mays
  misc_feature (1)..(1037): Ceres Seq. ID no. 12349085
aacccaagagcgaaaatggatccgcaccagttcgccccctcccagcagtcggcgctgaccatggaatcggcggagatcacggccgccgccgccgccgcgcgcgcacccaacggcgctgcccgggctatcgtcgaggacgacgacgaggacgacgacgtccccgaggtggccgcctgcatatcgacgatgctcgaccgcgggggtagcgtggagagccaccgcctcttcctggcgcgccgcaccgcgctggagatgctccgcgaccgcgggtacgccgttccggaggaagagctcgcccggaccctcccggagttccgcgcctggtgggaatacaggccagagctcgaacgcctcgccttctccactaccctcgcctccgacccgtccagcaaggtgaaagttgtgttctgtccacctggacctgtcaaaatcgcagctatccggctgatatataccgaagtcaaagatgagaacttgtccagactgattctgatactgcagggcaaaataatgtctacaaccagagaatccatcaaggagatctttcgatttaaagttgacacattccagatcacggaattactggtgaacatcactaagcatgtcctcaagcccaagcatgaagtgttgactgcagaggggaaagctaagctcctgaaggagtacaatgtggtggattcacagttgcctcgcatgctggagaatgatgctgttgctcgctattacgggctaggcaagggaactgttgttaaggttatatacgacagcgagcttaccgggaaccatgtgacgtaccgatgcattacctgaggggcccatgtgtttcggtggatgaagtgtcgtaagcagtctgtaaaaaattacctctaagaggggcaggtgacactgttctgctaggcctttgtaagcacccaattatgcaggatgaagctcgctgtaagctattggtaaaatcatcttgcgccattgccgtaccttaagtgcttggtgttaatcttggaaacagtgagacaactaatcctgtagtgagttatctc

SEQ ID NO: 27128 - protein, 269 aa, Zea mays subsp. mays
  peptide (1)..(269): Ceres Seq. ID no. 12349086
  misc_feature (196)..(268): Pfam Name: Pfam Description:  RNA polymerase Rpb5, C-terminal domain
  misc_feature (56)..(267): NCBI GI NO: 8896071 NR Description: RPB5d [Brassica napus]
  misc_feature (59)..(268): NCBI GI NO: 15230206 NR Description: putative protein; protein id: At3g57080
  misc_feature (59)..(268): NCBI GI NO: 21617912 NR Description: putative DNA-directed RNA polymerase 23kD subunit
  misc_feature (69)..(269): NCBI GI NO: 15227327 NR Description: putative DNA-directed RNA polymerase 23kD subunit
  misc_feature (59)..(268): NCBI GI NO: 15232524 NR Description: RNA polymerase 24kDa subunit -like protein
  misc_feature (70)..(268): NCBI GI NO: 17507947 NR Description: RNA polymerase Rpb5
  misc_feature (70)..(268): NCBI GI NO: 39595790 NR Description: Hypothetical protein CBG12745
  misc_feature (71)..(268): NCBI GI NO: 15228724 NR Description: RNA polymerase I, II and III 24
  misc_feature (71)..(268): NCBI GI NO: 38344231 NR Description: OJ991113_30.8
  misc_feature (71)..(268): NCBI GI NO: 28497750 NR Description: polymerase (RNA) II (DNA directed) polypeptide E
NPRAKMDPHQFAPSQQSALTMESAEITAAAAAARAPNGAARAIVEDDDEDDDVPEVAACISTMLDRGGSVESHRLFLARRTALEMLRDRGYAVPEEELARTLPEFRAWWEYRPELERLAFSTTLASDPSSKVKVVFCPPGPVKIAAIRLIYTEVKDENLSRLILILQGKIMSTTRESIKEIFRFKVDTFQITELLVNITKHVLKPKHEVLTAEGKAKLLKEYNVVDSQLPRMLENDAVARYYGLGKGTVVKVIYDSELTGNHVTYRCIT

SEQ ID NO: 27129 - protein, 264 aa, Zea mays subsp. mays
  peptide (1)..(264): Ceres Seq. ID no. 12349087
  misc_feature (191)..(263): Pfam Name: Pfam Description:  RNA polymerase Rpb5, C-terminal domain
  misc_feature (51)..(262): NCBI GI NO: 8896071 NR Description: RPB5d [Brassica napus]
  misc_feature (54)..(263): NCBI GI NO: 15230206 NR Description: putative protein; protein id: At3g57080
  misc_feature (54)..(263): NCBI GI NO: 21617912 NR Description: putative DNA-directed RNA polymerase 23kD subunit
  misc_feature (64)..(264): NCBI GI NO: 15227327 NR Description: putative DNA-directed RNA polymerase 23kD subunit
  misc_feature (54)..(263): NCBI GI NO: 15232524 NR Description: RNA polymerase 24kDa subunit -like protein
  misc_feature (65)..(263): NCBI GI NO: 17507947 NR Description: RNA polymerase Rpb5
  misc_feature (65)..(263): NCBI GI NO: 39595790 NR Description: Hypothetical protein CBG12745
  misc_feature (66)..(263): NCBI GI NO: 15228724 NR Description: RNA polymerase I, II and III 24
  misc_feature (66)..(263): NCBI GI NO: 38344231 NR Description: OJ991113_30.8
  misc_feature (66)..(263): NCBI GI NO: 28497750 NR Description: polymerase (RNA) II (DNA directed) polypeptide E
MDPHQFAPSQQSALTMESAEITAAAAAARAPNGAARAIVEDDDEDDDVPEVAACISTMLDRGGSVESHRLFLARRTALEMLRDRGYAVPEEELARTLPEFRAWWEYRPELERLAFSTTLASDPSSKVKVVFCPPGPVKIAAIRLIYTEVKDENLSRLILILQGKIMSTTRESIKEIFRFKVDTFQITELLVNITKHVLKPKHEVLTAEGKAKLLKEYNVVDSQLPRMLENDAVARYYGLGKGTVVKVIYDSELTGNHVTYRCIT

SEQ ID NO: 27130 - protein, 249 aa, Zea mays subsp. mays
  peptide (1)..(249): Ceres Seq. ID no. 12349088
  misc_feature (176)..(248): Pfam Name: Pfam Description:  RNA polymerase Rpb5, C-terminal domain
  misc_feature (36)..(247): NCBI GI NO: 8896071 NR Description: RPB5d [Brassica napus]
  misc_feature (39)..(248): NCBI GI NO: 15230206 NR Description: putative protein; protein id: At3g57080
  misc_feature (39)..(248): NCBI GI NO: 21617912 NR Description: putative DNA-directed RNA polymerase 23kD subunit
  misc_feature (49)..(249): NCBI GI NO: 15227327 NR Description: putative DNA-directed RNA polymerase 23kD subunit
  misc_feature (39)..(248): NCBI GI NO: 15232524 NR Description: RNA polymerase 24kDa subunit -like protein
  misc_feature (50)..(248): NCBI GI NO: 17507947 NR Description: RNA polymerase Rpb5
  misc_feature (50)..(248): NCBI GI NO: 39595790 NR Description: Hypothetical protein CBG12745
  misc_feature (51)..(248): NCBI GI NO: 15228724 NR Description: RNA polymerase I, II and III 24
  misc_feature (51)..(248): NCBI GI NO: 38344231 NR Description: OJ991113_30.8
  misc_feature (51)..(248): NCBI GI NO: 28497750 NR Description: polymerase (RNA) II (DNA directed) polypeptide E
MESAEITAAAAAARAPNGAARAIVEDDDEDDDVPEVAACISTMLDRGGSVESHRLFLARRTALEMLRDRGYAVPEEELARTLPEFRAWWEYRPELERLAFSTTLASDPSSKVKVVFCPPGPVKIAAIRLIYTEVKDENLSRLILILQGKIMSTTRESIKEIFRFKVDTFQITELLVNITKHVLKPKHEVLTAEGKAKLLKEYNVVDSQLPRMLENDAVARYYGLGKGTVVKVIYDSELTGNHVTYRCIT

SEQ ID NO: 27131 - DNA, 1602 bp, Zea mays subsp. mays
  misc_feature (1)..(1602): Ceres Seq. ID no. 12407263
tatgtttatacgttagcaaaccaattcccatcccattactccaactccggcggcggccgcaccaccgccaaaaaccaatgcagatgacggcggatcaggaatcggcgggccaaggcgacggaggacgacacgatgagcggccggcggcgggtggacgacgacgacgaccacgacgtcgtcttcgacgccgggaagccgccgccgttccgcatcggcgacgtgcgggcggcggtgccggagcactgctggcgcaagagcccctggcggtcgctgtggtacgtggcgcgggacgtggcggtggtggcggcgctgggcgcggcggcggcgggcatggacagttgggcggtgtggccgctgtactgggcggcgcaggggaccatgttctgggcgctcttcgtgctgggacacgactgtggccatggcagcttctcggacagcgcgacgctcaacagcgtcgtgggccatctccttcactccttcatcctcgtcccttaccatggatggaggatcagccacagaacacaccatcagaaccacggccacatccacagggacgagtcatggcacccgatcacggagaagctgtaccggcaactagagccacgcaccaagaagctgagattcacggtgcccttcccgctgctcgcattccccgtctacctcttgtacaggagccccggcaagtcgggctcccacttccttcccagcagcgacctgttcagccccaaggagaagagcgacgtcatggtgtcaaccacctgctggtgcatcatgctcgcctccctcctcgccatggcgtgcgcgttcggcccactccaggtgctcaagatgtacggcatcccatacctggtgttcgtgatgtggcttgacctggtgacgtacctgcaccaccatgggcaccatcagcttcctctcccctggtaccgcggccaggagtggagctacctgcgcggcggcctcaccacggtggacagggactacggctggatcaacaacgtccaccacgacatcggcacccacgtcattcatcacctcttcccgcagatcccgcactaccatctcgtcgaagctaccaaggcagccaagccggtgctggggcgatactaccgggagccgcacaagtcaggcccgctgccacttcacctcctcgtcgtgctcctcaggagcctcagagtcgaccacttcgtcagcgaccacggggatgtcgtctactaccaaaccgaccatgacttgaacactagcagtgctcatggctgggccaaccaaaaccaccataagcaaaaataatggtttctcaaacacagagacgggctgatggttgctgttgttgttgctccaaggactcacacagtacaagaacttaaatatatatgatggtaagtagcatcatatataggcatgcgtatgacaaagccaaataattaaagagaagggagggatcctctagctgaagcaattaattaattacagtatcccactagatcgagtttgctaagcattactcctactatatacaatatgtactgttgcttgtattaattagctagatgttgtgttggagccttggatgatgaaactaaaggatgagccactaaaatttgt

SEQ ID NO: 27132 - protein, 384 aa, Zea mays subsp. mays
  peptide (1)..(384): Ceres Seq. ID no. 12407264
  misc_feature (76)..(321): Pfam Name: Pfam Description:  Fatty acid desaturase
  misc_feature (11)..(382): NCBI GI NO: 7433280 NR Description: probable omega-3 fatty acid desaturase (EC1
  misc_feature (11)..(382): NCBI GI NO: 7433275 NR Description: omega-3 fatty acid desaturase (EC 1
  misc_feature (1)..(373): NCBI GI NO: 21668465 NR Description: plastid omega-3 fatty acid desaturase
  misc_feature (17)..(371): NCBI GI NO: 1345971 NR Description: Omega-3 fatty acid desaturase
  misc_feature (1)..(367): NCBI GI NO: 1345970 NR Description: Omega-3 fatty acid desaturase
  misc_feature (1)..(371): NCBI GI NO: 7433278 NR Description: omega-3 fatty acid desaturase (EC 1
  misc_feature (17)..(368): NCBI GI NO: 7433276 NR Description: omega-3 fatty acid desaturase (EC 1
  misc_feature (17)..(368): NCBI GI NO: 1754795 NR Description: omega-3 fatty acid desaturase
  misc_feature (2)..(371): NCBI GI NO: 23345025 NR Description: microsomal omega-3 fatty acid desaturase
  misc_feature (1)..(371): NCBI GI NO: 7433277 NR Description: omega-3 fatty acid desaturase (EC 1
MSGRRRVDDDDDHDVVFDAGKPPPFRIGDVRAAVPEHCWRKSPWRSLWYVARDVAVVAALGAAAAGMDSWAVWPLYWAAQGTMFWALFVLGHDCGHGSFSDSATLNSVVGHLLHSFILVPYHGWRISHRTHHQNHGHIHRDESWHPITEKLYRQLEPRTKKLRFTVPFPLLAFPVYLLYRSPGKSGSHFLPSSDLFSPKEKSDVMVSTTCWCIMLASLLAMACAFGPLQVLKMYGIPYLVFVMWLDLVTYLHHHGHHQLPLPWYRGQEWSYLRGGLTTVDRDYGWINNVHHDIGTHVIHHLFPQIPHYHLVEATKAAKPVLGRYYREPHKSGPLPLHLLVVLLRSLRVDHFVSDHGDVVYYQTDHDLNTSSAHGWANQNHHKQK

SEQ ID NO: 27133 - protein, 318 aa, Zea mays subsp. mays
  peptide (1)..(318): Ceres Seq. ID no. 12407265
  misc_feature (10)..(255): Pfam Name: Pfam Description:  Fatty acid desaturase
  misc_feature (1)..(316): NCBI GI NO: 7433280 NR Description: probable omega-3 fatty acid desaturase (EC1
  misc_feature (1)..(316): NCBI GI NO: 7433275 NR Description: omega-3 fatty acid desaturase (EC 1
  misc_feature (1)..(307): NCBI GI NO: 21668465 NR Description: plastid omega-3 fatty acid desaturase
  misc_feature (1)..(305): NCBI GI NO: 1345971 NR Description: Omega-3 fatty acid desaturase
  misc_feature (1)..(301): NCBI GI NO: 1345970 NR Description: Omega-3 fatty acid desaturase
  misc_feature (1)..(305): NCBI GI NO: 7433278 NR Description: omega-3 fatty acid desaturase (EC 1
  misc_feature (1)..(302): NCBI GI NO: 7433276 NR Description: omega-3 fatty acid desaturase (EC 1
  misc_feature (1)..(302): NCBI GI NO: 1754795 NR Description: omega-3 fatty acid desaturase
  misc_feature (1)..(305): NCBI GI NO: 23345025 NR Description: microsomal omega-3 fatty acid desaturase
  misc_feature (1)..(305): NCBI GI NO: 7433277 NR Description: omega-3 fatty acid desaturase (EC 1
MDSWAVWPLYWAAQGTMFWALFVLGHDCGHGSFSDSATLNSVVGHLLHSFILVPYHGWRISHRTHHQNHGHIHRDESWHPITEKLYRQLEPRTKKLRFTVPFPLLAFPVYLLYRSPGKSGSHFLPSSDLFSPKEKSDVMVSTTCWCIMLASLLAMACAFGPLQVLKMYGIPYLVFVMWLDLVTYLHHHGHHQLPLPWYRGQEWSYLRGGLTTVDRDYGWINNVHHDIGTHVIHHLFPQIPHYHLVEATKAAKPVLGRYYREPHKSGPLPLHLLVVLLRSLRVDHFVSDHGDVVYYQTDHDLNTSSAHGWANQNHHKQK

SEQ ID NO: 27134 - protein, 302 aa, Zea mays subsp. mays
  peptide (1)..(302): Ceres Seq. ID no. 12407266
  misc_feature (1)..(239): Pfam Name: Pfam Description:  Fatty acid desaturase
  misc_feature (1)..(300): NCBI GI NO: 7433280 NR Description: probable omega-3 fatty acid desaturase (EC1
  misc_feature (1)..(300): NCBI GI NO: 7433275 NR Description: omega-3 fatty acid desaturase (EC 1
  misc_feature (1)..(291): NCBI GI NO: 21668465 NR Description: plastid omega-3 fatty acid desaturase
  misc_feature (1)..(289): NCBI GI NO: 1345971 NR Description: Omega-3 fatty acid desaturase
  misc_feature (1)..(285): NCBI GI NO: 1345970 NR Description: Omega-3 fatty acid desaturase
  misc_feature (1)..(289): NCBI GI NO: 7433278 NR Description: omega-3 fatty acid desaturase (EC 1
  misc_feature (1)..(286): NCBI GI NO: 7433276 NR Description: omega-3 fatty acid desaturase (EC 1
  misc_feature (1)..(286): NCBI GI NO: 1754795 NR Description: omega-3 fatty acid desaturase
  misc_feature (1)..(289): NCBI GI NO: 23345025 NR Description: microsomal omega-3 fatty acid desaturase
  misc_feature (1)..(289): NCBI GI NO: 7433277 NR Description: omega-3 fatty acid desaturase (EC 1
MFWALFVLGHDCGHGSFSDSATLNSVVGHLLHSFILVPYHGWRISHRTHHQNHGHIHRDESWHPITEKLYRQLEPRTKKLRFTVPFPLLAFPVYLLYRSPGKSGSHFLPSSDLFSPKEKSDVMVSTTCWCIMLASLLAMACAFGPLQVLKMYGIPYLVFVMWLDLVTYLHHHGHHQLPLPWYRGQEWSYLRGGLTTVDRDYGWINNVHHDIGTHVIHHLFPQIPHYHLVEATKAAKPVLGRYYREPHKSGPLPLHLLVVLLRSLRVDHFVSDHGDVVYYQTDHDLNTSSAHGWANQNHHKQK

SEQ ID NO: 27135 - DNA, 1907 bp, Zea mays subsp. mays
  misc_feature (1)..(1907): Ceres Seq. ID no. 13494394
ctaatcgacaaatggtcggtcgcaccgaacagcacgaccagaccagttgcccggctcaccaaatccaggcgtggccgtgcgaccatccctcccctcatggcgtcatcggcggcgcgatccctcgcgctcgtcgcgtctgcctcggcatcgctcggcgtcgggcagcggtcgtgggctcgcttggctgtctcttcctcttcggctgggtcggccctccccaagctccgcgggctccgctcgttcgccgcctccgcagggggcgccgtgatggggaagccaagccccggggtcgttgacgccgacgccgggatggacgccgtccagcggcggctcatgtttgaggacgagtgcattttagtggatgaacaagacaatgtcatcggccacgagtccaagtataactgccatctcatggagaagatagaagctggaaatgccctgcacagagctttcagtgttttccttttcaactccaaatatgagttgctactgcagcaaaggtctgcaacaaaagtgacatttccacttgtctggacaaacacctgctgtagccatcctctctaccgcgagtcagagttgattgaggaaaattgtgcaggggtgagaaatgcagcccagcgcaaactatttgatgagctgggaatagtggctgacgaattacctgtcgaccagttcattccgcttgggaggatgctttacaaggctccttcagatggaaaatggggcgaacacgagttggattacctcttgttcatggttcgtgacgtgaagctcgacccgaatcctgaagaggtggccgatgtcaagtacatgaaccggcatcagctgaaggagctgctcaggaaagccgatgccggggaagatggcgttaagctctccccttggttcaggctggtggtggacaactttctcatgggctggtgggatcatgtcgagcaagggactctgcagggggcagcagacatgaaaaccatccataaattgtaaatcttctagatcgcttaagcacgagtcttgccctgttgaggaataagcgcttgtcctgctgtttggtgctggaggaataatcgataaaattataacagagtgatcttaattctggaacgtaactatgcaaaaaaaaaaaaaaaaaacggcacgagaagcttttttttttttttttttcttttttttttttttttttttttttttttttttttttttttagaaccgagggctttccattgataatagcagtgaaaatattacaccaaatgggctagaaactggaacacctcgaaacgaagatacagaacaaactacagtagaccggccaactagacacacaaccgaccacggccgtcacatcaaagcatcagaaggggaggtggcctagccgccgaagccgtagagcgtgcggccctggcgcttgagcgcgtagacgacatccatggcggtgacggtcttgcggcgggcgtgctcggtgtaggtgacggcgtcgcggatgacgttctcgaggaagatcttgagcacgccgcgggtctcctcgtagatgagcccagaaatgcgcttgacgccgcccctcctggccagcctacggatcgccggcttcgtgatgccctggatgttgtcgcgcagcaccttgcggtggcgcttggcgccgcccttgcccagccccttgccgcccttgccgcgccccgacatcgccgaaaccgagaggtacgcggacggaggaggagaatcgtgccgttgtgcggttgaacttggattccgttgtccgaaatttctaatccgaaagatggatttcattgtcttcttcttcttagcattatgtcactatctcacgtcgtcctgtctcaatacagtctaaggttcatgtgatgttatccccatttgtccacgcacaagtgaatgcagtcactatttcg

SEQ ID NO: 27136 - protein, 328 aa, Zea mays subsp. mays
  peptide (1)..(328): Ceres Seq. ID no. 13494395
  misc_feature (147)..(299): Pfam Name: Pfam Description:  NUDIX domain
  misc_feature (97)..(328): NCBI GI NO: 33340598 NR Description: isopentenyl pyrophosphate isomerase [Zea mays]
  misc_feature (64)..(328): NCBI GI NO: 9759126 NR Description: isopentenyl pyrophosphate: dimethyllallylpyrophosphate isomerase
  misc_feature (81)..(328): NCBI GI NO: 6856560 NR Description: isopentenyl pyrophosphate: dimethyllallylpyrophosphate isomerase
  misc_feature (29)..(328): NCBI GI NO: 6856550 NR Description: isopentenyl pyrophosphate: dimethyllallylpyrophosphate isomerase
  misc_feature (96)..(328): NCBI GI NO: 13603408 NR Description: isopentenyl diphosphate isomerase 2
  misc_feature (101)..(328): NCBI GI NO: 1085973 NR Description: isopentenyl-diphosphate Delta-isomerase (EC5
  misc_feature (101)..(328): NCBI GI NO: 6225526 NR Description: ISOPENTENYL-DIPHOSPHATE DELTA-ISOMERASE I
  misc_feature (100)..(328): NCBI GI NO: 19568937 NR Description: isopentenyl pyrophosphate isomerase IDI2
  misc_feature (101)..(328): NCBI GI NO: 34898490 NR Description: putative isopentenyl pyrophosphate:dimethyllallylpyrophosphate isomerase
  misc_feature (73)..(328): NCBI GI NO: 1213442 NR Description: isopentenyl pyrophosphate isomerase
LIDKWSVAPNSTTRPVARLTKSRRGRATIPPLMASSAARSLALVASASASLGVGQRSWARLAVSSSSAGSALPKLRGLRSFAASAGGAVMGKPSPGVVDADAGMDAVQRRLMFEDECILVDEQDNVIGHESKYNCHLMEKIEAGNALHRAFSVFLFNSKYELLLQQRSATKVTFPLVWTNTCCSHPLYRESELIEENCAGVRNAAQRKLFDELGIVADELPVDQFIPLGRMLYKAPSDGKWGEHELDYLLFMVRDVKLDPNPEEVADVKYMNRHQLKELLRKADAGEDGVKLSPWFRLVVDNFLMGWWDHVEQGTLQGAADMKTIHKL

SEQ ID NO: 27137 - protein, 296 aa, Zea mays subsp. mays
  peptide (1)..(296): Ceres Seq. ID no. 13494396
  misc_feature (115)..(267): Pfam Name: Pfam Description:  NUDIX domain
  misc_feature (65)..(296): NCBI GI NO: 33340598 NR Description: isopentenyl pyrophosphate isomerase [Zea mays]
  misc_feature (32)..(296): NCBI GI NO: 9759126 NR Description: isopentenyl pyrophosphate: dimethyllallylpyrophosphate isomerase
  misc_feature (49)..(296): NCBI GI NO: 6856560 NR Description: isopentenyl pyrophosphate: dimethyllallylpyrophosphate isomerase
  misc_feature (1)..(296): NCBI GI NO: 6856550 NR Description: isopentenyl pyrophosphate: dimethyllallylpyrophosphate isomerase
  misc_feature (64)..(296): NCBI GI NO: 13603408 NR Description: isopentenyl diphosphate isomerase 2
  misc_feature (69)..(296): NCBI GI NO: 1085973 NR Description: isopentenyl-diphosphate Delta-isomerase (EC5
  misc_feature (69)..(296): NCBI GI NO: 6225526 NR Description: ISOPENTENYL-DIPHOSPHATE DELTA-ISOMERASE I
  misc_feature (68)..(296): NCBI GI NO: 19568937 NR Description: isopentenyl pyrophosphate isomerase IDI2
  misc_feature (69)..(296): NCBI GI NO: 34898490 NR Description: putative isopentenyl pyrophosphate:dimethyllallylpyrophosphate isomerase
  misc_feature (41)..(296): NCBI GI NO: 1213442 NR Description: isopentenyl pyrophosphate isomerase
MASSAARSLALVASASASLGVGQRSWARLAVSSSSAGSALPKLRGLRSFAASAGGAVMGKPSPGVVDADAGMDAVQRRLMFEDECILVDEQDNVIGHESKYNCHLMEKIEAGNALHRAFSVFLFNSKYELLLQQRSATKVTFPLVWTNTCCSHPLYRESELIEENCAGVRNAAQRKLFDELGIVADELPVDQFIPLGRMLYKAPSDGKWGEHELDYLLFMVRDVKLDPNPEEVADVKYMNRHQLKELLRKADAGEDGVKLSPWFRLVVDNFLMGWWDHVEQGTLQGAADMKTIHKL

SEQ ID NO: 27138 - protein, 239 aa, Zea mays subsp. mays
  peptide (1)..(239): Ceres Seq. ID no. 13494397
  misc_feature (58)..(210): Pfam Name: Pfam Description:  NUDIX domain
  misc_feature (8)..(239): NCBI GI NO: 33340598 NR Description: isopentenyl pyrophosphate isomerase [Zea mays]
  misc_feature (1)..(239): NCBI GI NO: 9759126 NR Description: isopentenyl pyrophosphate: dimethyllallylpyrophosphate isomerase
  misc_feature (1)..(239): NCBI GI NO: 6856560 NR Description: isopentenyl pyrophosphate: dimethyllallylpyrophosphate isomerase
  misc_feature (1)..(239): NCBI GI NO: 6856550 NR Description: isopentenyl pyrophosphate: dimethyllallylpyrophosphate isomerase
  misc_feature (7)..(239): NCBI GI NO: 13603408 NR Description: isopentenyl diphosphate isomerase 2
  misc_feature (12)..(239): NCBI GI NO: 1085973 NR Description: isopentenyl-diphosphate Delta-isomerase (EC5
  misc_feature (12)..(239): NCBI GI NO: 6225526 NR Description: ISOPENTENYL-DIPHOSPHATE DELTA-ISOMERASE I
  misc_feature (11)..(239): NCBI GI NO: 19568937 NR Description: isopentenyl pyrophosphate isomerase IDI2
  misc_feature (12)..(239): NCBI GI NO: 34898490 NR Description: putative isopentenyl pyrophosphate:dimethyllallylpyrophosphate isomerase
  misc_feature (1)..(239): NCBI GI NO: 1213442 NR Description: isopentenyl pyrophosphate isomerase
MGKPSPGVVDADAGMDAVQRRLMFEDECILVDEQDNVIGHESKYNCHLMEKIEAGNALHRAFSVFLFNSKYELLLQQRSATKVTFPLVWTNTCCSHPLYRESELIEENCAGVRNAAQRKLFDELGIVADELPVDQFIPLGRMLYKAPSDGKWGEHELDYLLFMVRDVKLDPNPEEVADVKYMNRHQLKELLRKADAGEDGVKLSPWFRLVVDNFLMGWWDHVEQGTLQGAADMKTIHKL

SEQ ID NO: 27139 - DNA, 2114 bp, Zea mays subsp. mays
  misc_feature (1)..(2114): Ceres Seq. ID no. 12376562
acccccacttaaccaagaaaacggaatcaaagaaaacctgtccctgaaacgacgacgcaacatcgttacgtctacaagcctgtgcctgtcccatcgatcgatcaaccatggagattgcattggcagccaagaagaagaaccgtgcccgtcgccacctcgccgttcttctcctgctcctcgcctgcgcctgcgccggcattgcgcccgcgagcggcgccggcgggaggtgggacctccagcagcgcagcatcggggtgtcggcgatgcacatgcagctcctgcacaacgaccgcgtcatcatcttcgaccgcaccgacttcggccactccaacctctccctccccgacggacgctgccgcgtcaacccgcgggagcgcgtgctccctcagggggactgcaccgcgcactccgtcgagtacgacgtcgccgccaacgcgttccgcccgctcttcgtcttcaccgacacctggtgctcctcgggcaccgtcgcgcccgacggcacgctcgtccagaccggcggctggaacgacgggttccgcaacgcgcgcaccatgcccgcgtgcagcgacggcgacgagagctgcgactggtccgagacgcaggacgcgctctcggccaaccggtggtacgccaccaaccagatcctccccgacggccgcgcgttcatcatcggcggccggaggcagttcagctacgagttctacccaaaggcgggcccttcggatacgtccgtcatcccgatgccatttctggtgcagacgagggaccccgaggagaacaatctttatccgttcgtgcacctcaacatagacggcaaccttttcatcttctccaacaaccgcgccgtcctcttggactacagcagcaacaagatcgtgcggacgtaccccgtgctgggcgacggcgacccgcggaactaccccagctcgggctcctcggtgctgctcccgctgaaacccaaccccaccgaggccgaggtgctggtctgcggcggcgcgccggcgggctcctacaactccaccaagcagcagggcggcaccgccggcgctttcgtcccggcgctgacgacgtgtgggcggatcaagatcaccgacgccacgccggcgtgggtcatcgagacaatgccgtcgccgcgggtgatgggcgacatgatcctgctgcccaacggcgcggaggtggccatcatcaacggcgccgcggacggcaccgccgggtgggagtccgccaagaccccggcgtacgcgcccgtcgtctaccgcccggaccactcgccgggggaccggttcgaggagcagaacgcggcgggcgtcgcgcggctgtaccactcctcggcggtgctcctccgcgacggccgcctgctggtgggcggcagcaacccgcacacctactacaacttcagcaacgtgcagttccccaccgacctcagcctggaggccttctcgccggagtacctcgacgcgtccaacgacatgctccggccgaggatcctcgacccgtcccccaccggcgcgccggcgaccgtgggctacggggcgacgatggcgatccggttcctggtcccggcattggcgcggagaaggcgtggcggccgcgccggcggcctcggtgacgtgtcggtgacgatggtggcgccgtccttcacgacgcactcgttcgcgatgaaccagcggctgctgttccttgacgtgaccaagaacgtggcggtgcgcggccgagccggcgcgttcagcgcgtcggtgacgatgccggcgacagcggtgctggcgccaccggggtactacatgctgttcgtggtgaacgggcacatccccagcgaggggatctgggtcaaaatacaggcacagtgagagcgtgcgacagggaagggttatacatttcattcattttgtttcgttattgccattgatactcccctcttcttagttcttgttactactctacaggtgtacgtaaaaagacaaagacccttgtataaaagaggtgtaaatccatggtagcgttgacagtcactgactgtgactggacactgtgttgctgtctctcgttgacgtgagtcgtgagatgagattggaaagaaaaaaaaaaaaaaaaaaaaaaaaaaaaaaaaacaaaaa

SEQ ID NO: 27140 - protein, 579 aa, Zea mays subsp. mays
  peptide (1)..(579): Ceres Seq. ID no. 12376563
  misc_feature (16)..(577): NCBI GI NO: 15222300 NR Description: unknown protein; protein id: At1g75620.1
  misc_feature (34)..(577): NCBI GI NO: 15223699 NR Description: unknown protein; protein id: At1g19900
  misc_feature (53)..(577): NCBI GI NO: 25352604 NR Description: hypothetical protein F6F9.4
  misc_feature (19)..(577): NCBI GI NO: 15230360 NR Description: putative protein; protein id: At3g57620.1
  misc_feature (38)..(576): NCBI GI NO: 25352602 NR Description: F14L17.20 protein - Arabidopsis thaliana
  misc_feature (38)..(573): NCBI GI NO: 15223754 NR Description: hypothetical protein; protein id: At1g14430.1
  misc_feature (39)..(485): NCBI GI NO: 15232379 NR Description: putative protein; protein id: At3g53950
  misc_feature (499)..(576): NCBI GI NO: 15232379 NR Description: putative protein; protein id: At3g53950
  misc_feature (39)..(576): NCBI GI NO: 15220398 NR Description: glyoxal oxidase
  misc_feature (38)..(565): NCBI GI NO: 15241135 NR Description: putative protein; protein id: At5g19580
MEIALAAKKKNRARRHLAVLLLLLACACAGIAPASGAGGRWDLQQRSIGVSAMHMQLLHNDRVIIFDRTDFGHSNLSLPDGRCRVNPRERVLPQGDCTAHSVEYDVAANAFRPLFVFTDTWCSSGTVAPDGTLVQTGGWNDGFRNARTMPACSDGDESCDWSETQDALSANRWYATNQILPDGRAFIIGGRRQFSYEFYPKAGPSDTSVIPMPFLVQTRDPEENNLYPFVHLNIDGNLFIFSNNRAVLLDYSSNKIVRTYPVLGDGDPRNYPSSGSSVLLPLKPNPTEAEVLVCGGAPAGSYNSTKQQGGTAGAFVPALTTCGRIKITDATPAWVIETMPSPRVMGDMILLPNGAEVAIINGAADGTAGWESAKTPAYAPVVYRPDHSPGDRFEEQNAAGVARLYHSSAVLLRDGRLLVGGSNPHTYYNFSNVQFPTDLSLEAFSPEYLDASNDMLRPRILDPSPTGAPATVGYGATMAIRFLVPALARRRRGGRAGGLGDVSVTMVAPSFTTHSFAMNQRLLFLDVTKNVAVRGRAGAFSASVTMPATAVLAPPGYYMLFVVNGHIPSEGIWVKIQAQ

SEQ ID NO: 27141 - protein, 535 aa, Zea mays subsp. mays
  peptide (1)..(535): Ceres Seq. ID no. 12376564
  misc_feature (385)..(492): Pfam Name: Pfam Description:  FHIPEP family
PPLNQENGIKENLSLKRRRNIVTSTSLCLSHRSINHGDCIGSQEEEPCPSPPRRSSPAPRLRLRRHCARERRRREVGPPAAQHRGVGDAHAAPAQRPRHHLRPHRLRPLQPLPPRRTLPRQPAGARAPSGGLHRALRRVRRRRQRVPPALRLHRHLVLLGHRRARRHARPDRRLERRVPQRAHHARVQRRRRELRLVRDAGRALGQPVVRHQPDPPRRPRVHHRRPEAVQLRVLPKGGPFGYVRHPDAISGADEGPRGEQSLSVRAPQHRRQPFHLLQQPRRPLGLQQQQDRADVPRAGRRRPAELPQLGLLGAAPAETQPHRGRGAGLRRRAGGLLQLHQAAGRHRRRFRPGADDVWADQDHRRHAGVGHRDNAVAAGDGRHDPAAQRRGGGHHQRRRGRHRRVGVRQDPGVRARRLPPGPLAGGPVRGAERGGRRAAVPLLGGAPPRRPPAGGRQQPAHLLQLQQRAVPHRPQPGGLLAGVPRRVQRHAPAEDPRPVPHRRAGDRGLRGDDGDPVPGPGIGAEKAWRPRRRPR

SEQ ID NO: 27142 - protein, 527 aa, Zea mays subsp. mays
  peptide (1)..(527): Ceres Seq. ID no. 12376565
  misc_feature (1)..(525): NCBI GI NO: 15222300 NR Description: unknown protein; protein id: At1g75620.1
  misc_feature (1)..(525): NCBI GI NO: 15223699 NR Description: unknown protein; protein id: At1g19900
  misc_feature (1)..(525): NCBI GI NO: 25352604 NR Description: hypothetical protein F6F9.4
  misc_feature (1)..(525): NCBI GI NO: 15230360 NR Description: putative protein; protein id: At3g57620.1
  misc_feature (1)..(524): NCBI GI NO: 25352602 NR Description: F14L17.20 protein - Arabidopsis thaliana
  misc_feature (1)..(521): NCBI GI NO: 15223754 NR Description: hypothetical protein; protein id: At1g14430.1
  misc_feature (1)..(433): NCBI GI NO: 15232379 NR Description: putative protein; protein id: At3g53950
  misc_feature (447)..(524): NCBI GI NO: 15232379 NR Description: putative protein; protein id: At3g53950
  misc_feature (1)..(524): NCBI GI NO: 15220398 NR Description: glyoxal oxidase
  misc_feature (1)..(513): NCBI GI NO: 15241135 NR Description: putative protein; protein id: At5g19580
MHMQLLHNDRVIIFDRTDFGHSNLSLPDGRCRVNPRERVLPQGDCTAHSVEYDVAANAFRPLFVFTDTWCSSGTVAPDGTLVQTGGWNDGFRNARTMPACSDGDESCDWSETQDALSANRWYATNQILPDGRAFIIGGRRQFSYEFYPKAGPSDTSVIPMPFLVQTRDPEENNLYPFVHLNIDGNLFIFSNNRAVLLDYSSNKIVRTYPVLGDGDPRNYPSSGSSVLLPLKPNPTEAEVLVCGGAPAGSYNSTKQQGGTAGAFVPALTTCGRIKITDATPAWVIETMPSPRVMGDMILLPNGAEVAIINGAADGTAGWESAKTPAYAPVVYRPDHSPGDRFEEQNAAGVARLYHSSAVLLRDGRLLVGGSNPHTYYNFSNVQFPTDLSLEAFSPEYLDASNDMLRPRILDPSPTGAPATVGYGATMAIRFLVPALARRRRGGRAGGLGDVSVTMVAPSFTTHSFAMNQRLLFLDVTKNVAVRGRAGAFSASVTMPATAVLAPPGYYMLFVVNGHIPSEGIWVKIQAQ

SEQ ID NO: 27143 - DNA, 1268 bp, Zea mays subsp. mays
  misc_feature (1)..(1268): Ceres Seq. ID no. 12409505
ctcttgctcggtcgcctttcccggtctttggtgtggataaaccggctttcttgctgttctcgatccttcttcaattcgctgtagtttttccttttgtcgcttgctcttgttctctttccaagaccgaggaagacgagtcagatttggtgattgtgtagagcgtacaagtgattgttcttggagaagcataggcctctcttggctgctcttgtcttcttgagcaaggaggcggaggaaaggaaagacatggaagaggaatccgtcgcagcttcaaggtactactgccacatgtgctcgctgatcataaggcccgaactgggcatcgaggaggtgaagtgcccccactgccacaccggcttcgtggaggagatggcgggcgaccggcgaggcagcgacgacgcagccatcagaggccgtcctcccggcggcgaggcgagctctaacgcctcggacgcggcgctggagcgcgaggtttcgctctgggcgcctgtgctcatggacttcatcgccgcctcgtccggccgccacggcctcgacggccacggaggggacctcgccgctttggcgcgaaggcagtaccgcaacatcgccctcctgcagctgctcaacgcgctccaggaaggcgacaccgatgccgggcgcgagcgggtcgtgctcatgagccccgcggacgcgcgcgccatgcttatgggacaagagcgaggggacggcgccgccgccctgggccccggcggtctgacgctcggggacctgttcctcggcccggggctggacttgctgctggagtacctggccgagaccgacccaaaccggcagggcacgccgccggccaggaaggaggccgtggccgcgttgccgacggtccgggtgcgcgaggacttcacctgccccgtgtgcctggacgaggtcgcgggcggcggcgacgcgcgcgagatgccgtgcaagcaccggttccacgaccagtgcatcctgccctggctggagatgcacagctcctgccccgtgtgcaggcaccagctgcccacggaggagccggcggaggcaattggcagcgacagaggcgccggtgttgagtccagtggcaacgcgcgcggcggcgggaggaggcattggttctcgtggcccttcggagggttgttctcgcaaagatccagcgggaactcctcgtcgtcctgatgatgcatgaacacgataataatatgcaagggaacacctcatcgtccctgatgatgctaatgaacaggataataatatgcgtcgatgtagcc

SEQ ID NO: 27144 - protein, 309 aa, Zea mays subsp. mays
  peptide (1)..(309): Ceres Seq. ID no. 12409506
  misc_feature (214)..(254): Pfam Name: RING finger Pfam Description: Zinc finger, C3HC4 type
  misc_feature (94)..(260): NCBI GI NO: 15241188 NR Description: putative protein; protein id: At5g56340
  misc_feature (3)..(93): NCBI GI NO: 15241188 NR Description: putative protein; protein id: At5g56340
  misc_feature (265)..(309): NCBI GI NO: 15241188 NR Description: putative protein; protein id: At5g56340
  misc_feature (93)..(309): NCBI GI NO: 22328949 NR Description: putative protein; protein id: At4g26400
  misc_feature (8)..(88): NCBI GI NO: 22328949 NR Description: putative protein; protein id: At4g26400
  misc_feature (93)..(309): NCBI GI NO: 7486783 NR Description: hypothetical protein M3E9
  misc_feature (19)..(88): NCBI GI NO: 7486783 NR Description: hypothetical protein M3E9
  misc_feature (1)..(287): NCBI GI NO: 34903272 NR Description: unnamed protein product
  misc_feature (3)..(262): NCBI GI NO: 18405411 NR Description: expressed protein; protein id: At1g55530
  misc_feature (123)..(309): NCBI GI NO: 32129334 NR Description: unknown protein
MEEESVAASRYYCHMCSLIIRPELGIEEVKCPHCHTGFVEEMAGDRRGSDDAAIRGRPPGGEASSNASDAALEREVSLWAPVLMDFIAASSGRHGLDGHGGDLAALARRQYRNIALLQLLNALQEGDTDAGRERVVLMSPADARAMLMGQERGDGAAALGPGGLTLGDLFLGPGLDLLLEYLAETDPNRQGTPPARKEAVAALPTVRVREDFTCPVCLDEVAGGGDAREMPCKHRFHDQCILPWLEMHSSCPVCRHQLPTEEPAEAIGSDRGAGVESSGNARGGGRRHWFSWPFGGLFSQRSSGNSSSS

SEQ ID NO: 27145 - protein, 295 aa, Zea mays subsp. mays
  peptide (1)..(295): Ceres Seq. ID no. 12409507
  misc_feature (200)..(240): Pfam Name: RING finger Pfam Description: Zinc finger, C3HC4 type
  misc_feature (80)..(246): NCBI GI NO: 15241188 NR Description: putative protein; protein id: At5g56340
  misc_feature (1)..(79): NCBI GI NO: 15241188 NR Description: putative protein; protein id: At5g56340
  misc_feature (251)..(295): NCBI GI NO: 15241188 NR Description: putative protein; protein id: At5g56340
  misc_feature (79)..(295): NCBI GI NO: 22328949 NR Description: putative protein; protein id: At4g26400
  misc_feature (1)..(74): NCBI GI NO: 22328949 NR Description: putative protein; protein id: At4g26400
  misc_feature (79)..(295): NCBI GI NO: 7486783 NR Description: hypothetical protein M3E9
  misc_feature (5)..(74): NCBI GI NO: 7486783 NR Description: hypothetical protein M3E9
  misc_feature (1)..(273): NCBI GI NO: 34903272 NR Description: unnamed protein product
  misc_feature (1)..(248): NCBI GI NO: 18405411 NR Description: expressed protein; protein id: At1g55530
  misc_feature (109)..(295): NCBI GI NO: 32129334 NR Description: unknown protein
MCSLIIRPELGIEEVKCPHCHTGFVEEMAGDRRGSDDAAIRGRPPGGEASSNASDAALEREVSLWAPVLMDFIAASSGRHGLDGHGGDLAALARRQYRNIALLQLLNALQEGDTDAGRERVVLMSPADARAMLMGQERGDGAAALGPGGLTLGDLFLGPGLDLLLEYLAETDPNRQGTPPARKEAVAALPTVRVREDFTCPVCLDEVAGGGDAREMPCKHRFHDQCILPWLEMHSSCPVCRHQLPTEEPAEAIGSDRGAGVESSGNARGGGRRHWFSWPFGGLFSQRSSGNSSSS

SEQ ID NO: 27146 - protein, 268 aa, Zea mays subsp. mays
  peptide (1)..(268): Ceres Seq. ID no. 12409508
  misc_feature (173)..(213): Pfam Name: RING finger Pfam Description: Zinc finger, C3HC4 type
  misc_feature (53)..(219): NCBI GI NO: 15241188 NR Description: putative protein; protein id: At5g56340
  misc_feature (1)..(52): NCBI GI NO: 15241188 NR Description: putative protein; protein id: At5g56340
  misc_feature (224)..(268): NCBI GI NO: 15241188 NR Description: putative protein; protein id: At5g56340
  misc_feature (52)..(268): NCBI GI NO: 22328949 NR Description: putative protein; protein id: At4g26400
  misc_feature (1)..(47): NCBI GI NO: 22328949 NR Description: putative protein; protein id: At4g26400
  misc_feature (52)..(268): NCBI GI NO: 7486783 NR Description: hypothetical protein M3E9
  misc_feature (1)..(47): NCBI GI NO: 7486783 NR Description: hypothetical protein M3E9
  misc_feature (1)..(246): NCBI GI NO: 34903272 NR Description: unnamed protein product
  misc_feature (1)..(221): NCBI GI NO: 18405411 NR Description: expressed protein; protein id: At1g55530
  misc_feature (82)..(268): NCBI GI NO: 32129334 NR Description: unknown protein
MAGDRRGSDDAAIRGRPPGGEASSNASDAALEREVSLWAPVLMDFIAASSGRHGLDGHGGDLAALARRQYRNIALLQLLNALQEGDTDAGRERVVLMSPADARAMLMGQERGDGAAALGPGGLTLGDLFLGPGLDLLLEYLAETDPNRQGTPPARKEAVAALPTVRVREDFTCPVCLDEVAGGGDAREMPCKHRFHDQCILPWLEMHSSCPVCRHQLPTEEPAEAIGSDRGAGVESSGNARGGGRRHWFSWPFGGLFSQRSSGNSSSS

SEQ ID NO: 27147 - DNA, 1468 bp, Zea mays subsp. mays
  misc_feature (1)..(1468): Ceres Seq. ID no. 12353780
gcatctccctttaccattgtctcccccctcgtccgacctcctcgccgccgcagacgaccgccgccgccgctgccgctgccgctgccgctgcgaaccctttgtgaatcttcgttgtccgggctgtgtggggcaggcatggcgctccggaggctgctgcaggggagcgtcctgccgcggataatcggcagggatttggcaccggccgtggcgccgttttcaacggagtccggggagaccattcgtgccacgctctttcccggcgatggcatcgggccagagatcgctgagtctgtcaagcaggtattcaatgttgcaggggtaccaattgaatgggaagaacactatgtcggtacagaagttgatcccagaacagagagttttttgacttgggaaagcctggagtcagtgcgtagaaacaaagttggcttgaaaggacctatggctacacctattggaaagggccatcgatctttgaatcttacattaaggaaagaacttgggctctatgccaatgtcagaccttgcaacagcctcccaggttacaagaccagatacgatgatgttaaccttgtaacaattcgtgaaaatactgaaggagaatatagtggtcttgagcatcaggttgtgagaggtgttgtggaaagtttgaaaattattacacgccaagcaagtttgagagtggcagagtatgctttccattatgccaaggccaatggccgggaaagagtctctgcgatccacaaagccaatattatgaggaagacagatggtcttttcctcaagtgttgccgtgaagtgtctgaaaagtaccctgaaattcaatacgaggaggtcatcattgacaattgctgtatgacgcttgtgaagaatcctggtctttttgacgtattagtgatgccaaatctctatggtgacattattagtgatctatgtgctggtttgatcgggggcttgggcctaacacccagttgcaatattggtgaaggtggcatttgtctggcagaagctgttcatggttctgctcctgatattgctggcaagaacctcgcgaacccgactgctcttatgctgagtgctgtcatgttgttgcgccacatgcaattcaacgacaaagcagaccggatccacaacgccatcctccagaccatcgccgaggggaagtacaggactgctgatcttggtggaaaggcatcgacatcagagtttacaaacgcagtctgtgatcacatctgagaaacggatgtgattcttccttctgattgttttgtcatcctaatatttttttgtcacatatgagaggagctttagctttaagaggttaactggcagcacctcgaacttctttggggtgtttaacacggtttgagaccgtcaaataattttgtcacatttcttgcggttcagaaattctttcaacattggaatggagccaagaattgtctgtaataatcaacatcagcattataac

SEQ ID NO: 27148 - protein, 410 aa, Zea mays subsp. mays
  peptide (1)..(410): Ceres Seq. ID no. 12353781
  misc_feature (81)..(406): Pfam Name: Pfam Description:  Isocitrate/isopropylmalate dehydrogenase
  misc_feature (46)..(410): NCBI GI NO: 34903262 NR Description: unnamed protein product
  misc_feature (72)..(410): NCBI GI NO: 7431333 NR Description: probable isocitrate dehydrogenase (NAD) (EC1
  misc_feature (44)..(410): NCBI GI NO: 11251553 NR Description: 3-isopropylmalate dehydrogenase-like protein -Arabidopsis thaliana
  misc_feature (44)..(410): NCBI GI NO: 18414179 NR Description: putative protein; protein id: At5g03290
  misc_feature (82)..(410): NCBI GI NO: 28974492 NR Description: NAD-dependent isocitrate dehydrogenase alpha subunit
  misc_feature (72)..(387): NCBI GI NO: 266463 NR Description: 3-isopropylmalate dehydrogenase
  misc_feature (72)..(387): NCBI GI NO: 7427677 NR Description: 3-isopropylmalate dehydrogenase (EC 1
  misc_feature (49)..(410): NCBI GI NO: 21536667 NR Description: putative (NAD+) isocitrate dehydrogenase
  misc_feature (55)..(410): NCBI GI NO: 39850137 NR Description: Unknown (protein for MGC:76128)
  misc_feature (76)..(410): NCBI GI NO: 18250284 NR Description: isocitrate dehydrogenase 3
ASPFTIVSPLVRPPRRRRRPPPPLPLPLPLRTLCESSLSGLCGAGMALRRLLQGSVLPRIIGRDLAPAVAPFSTESGETIRATLFPGDGIGPEIAESVKQVFNVAGVPIEWEEHYVGTEVDPRTESFLTWESLESVRRNKVGLKGPMATPIGKGHRSLNLTLRKELGLYANVRPCNSLPGYKTRYDDVNLVTIRENTEGEYSGLEHQVVRGVVESLKIITRQASLRVAEYAFHYAKANGRERVSAIHKANIMRKTDGLFLKCCREVSEKYPEIQYEEVIIDNCCMTLVKNPGLFDVLVMPNLYGDIISDLCAGLIGGLGLTPSCNIGEGGICLAEAVHGSAPDIAGKNLANPTALMLSAVMLLRHMQFNDKADRIHNAILQTIAEGKYRTADLGGKASTSEFTNAVCDHI

SEQ ID NO: 27149 - protein, 365 aa, Zea mays subsp. mays
  peptide (1)..(365): Ceres Seq. ID no. 12353782
  misc_feature (36)..(361): Pfam Name: Pfam Description:  Isocitrate/isopropylmalate dehydrogenase
  misc_feature (1)..(365): NCBI GI NO: 34903262 NR Description: unnamed protein product
  misc_feature (27)..(365): NCBI GI NO: 7431333 NR Description: probable isocitrate dehydrogenase (NAD) (EC1
  misc_feature (1)..(365): NCBI GI NO: 11251553 NR Description: 3-isopropylmalate dehydrogenase-like protein -Arabidopsis thaliana
  misc_feature (1)..(365): NCBI GI NO: 18414179 NR Description: putative protein; protein id: At5g03290
  misc_feature (37)..(365): NCBI GI NO: 28974492 NR Description: NAD-dependent isocitrate dehydrogenase alpha subunit
  misc_feature (27)..(342): NCBI GI NO: 266463 NR Description: 3-isopropylmalate dehydrogenase
  misc_feature (27)..(342): NCBI GI NO: 7427677 NR Description: 3-isopropylmalate dehydrogenase (EC 1
  misc_feature (4)..(365): NCBI GI NO: 21536667 NR Description: putative (NAD+) isocitrate dehydrogenase
  misc_feature (10)..(365): NCBI GI NO: 39850137 NR Description: Unknown (protein for MGC:76128)
  misc_feature (31)..(365): NCBI GI NO: 18250284 NR Description: isocitrate dehydrogenase 3
MALRRLLQGSVLPRIIGRDLAPAVAPFSTESGETIRATLFPGDGIGPEIAESVKQVFNVAGVPIEWEEHYVGTEVDPRTESFLTWESLESVRRNKVGLKGPMATPIGKGHRSLNLTLRKELGLYANVRPCNSLPGYKTRYDDVNLVTIRENTEGEYSGLEHQVVRGVVESLKIITRQASLRVAEYAFHYAKANGRERVSAIHKANIMRKTDGLFLKCCREVSEKYPEIQYEEVIIDNCCMTLVKNPGLFDVLVMPNLYGDIISDLCAGLIGGLGLTPSCNIGEGGICLAEAVHGSAPDIAGKNLANPTALMLSAVMLLRHMQFNDKADRIHNAILQTIAEGKYRTADLGGKASTSEFTNAVCDHI

SEQ ID NO: 27150 - protein, 264 aa, Zea mays subsp. mays
  peptide (1)..(264): Ceres Seq. ID no. 12353783
  misc_feature (1)..(260): Pfam Name: Pfam Description:  Isocitrate/isopropylmalate dehydrogenase
  misc_feature (1)..(264): NCBI GI NO: 34903262 NR Description: unnamed protein product
  misc_feature (1)..(264): NCBI GI NO: 7431333 NR Description: probable isocitrate dehydrogenase (NAD) (EC1
  misc_feature (1)..(264): NCBI GI NO: 11251553 NR Description: 3-isopropylmalate dehydrogenase-like protein -Arabidopsis thaliana
  misc_feature (1)..(264): NCBI GI NO: 18414179 NR Description: putative protein; protein id: At5g03290
  misc_feature (1)..(264): NCBI GI NO: 28974492 NR Description: NAD-dependent isocitrate dehydrogenase alpha subunit
  misc_feature (1)..(241): NCBI GI NO: 266463 NR Description: 3-isopropylmalate dehydrogenase
  misc_feature (1)..(241): NCBI GI NO: 7427677 NR Description: 3-isopropylmalate dehydrogenase (EC 1
  misc_feature (1)..(264): NCBI GI NO: 21536667 NR Description: putative (NAD+) isocitrate dehydrogenase
  misc_feature (1)..(264): NCBI GI NO: 39850137 NR Description: Unknown (protein for MGC:76128)
  misc_feature (1)..(264): NCBI GI NO: 18250284 NR Description: isocitrate dehydrogenase 3
MATPIGKGHRSLNLTLRKELGLYANVRPCNSLPGYKTRYDDVNLVTIRENTEGEYSGLEHQVVRGVVESLKIITRQASLRVAEYAFHYAKANGRERVSAIHKANIMRKTDGLFLKCCREVSEKYPEIQYEEVIIDNCCMTLVKNPGLFDVLVMPNLYGDIISDLCAGLIGGLGLTPSCNIGEGGICLAEAVHGSAPDIAGKNLANPTALMLSAVMLLRHMQFNDKADRIHNAILQTIAEGKYRTADLGGKASTSEFTNAVCDHI

SEQ ID NO: 27151 - DNA, 1962 bp, Zea mays subsp. mays
  misc_feature (1)..(1962): Ceres Seq. ID no. 12407748
gtacacacgagcgccccgcggaaagggtagcaaacggcccggacagtgagccgcgcacctttcacacttgacttgatgggttgctggcgctcgtcgctgcgctcagggccccacgcggcggagaagccgccccgccaccgccaccgcccgccaccgccaccgacgaacggccccacctcctccctgaacgcgcagcaggccgcgcccccggcccgcgcctccggggaagtaccggcgctcgccgagttctcgctggcggagctccgcgcggccacggccgggttcgcgccggggaacatcgtctccgagagcggtgagaaggcgcccaacctcgtctacagaggccagctcaggggccccggcggtgccccgccgcgcgcagttgccgtgaagaagttcgccaagctcgcgtggcccgaccccaagcagttcgcggaggaggcgaagggggtcggaggcctgcggcaccggagcatggcgaaccttatcggttattgctgcgacggcgacgatcgcctgctcgtcgccgagttcatgcccaacgacaccctcgccaagcaccttttccactgggaaaaccagactattgagtgggctatgcgtctgagagttgcatactacatttcccaagcattggaatactgtagtaccaaggggtggcctttatatcatgacctaaatgcatacagggtcctctttgatgagaatggtgaccctcggctgtcatgctttggtctgatgaaaaacagcagggatggaaaaagctatagcacgaacctagcatatacacctccagaatatctgagaaatggcagggttactccagaaagtgtcattttcagttttggcactgtacttcttgaccttctcagtgggaaacgcataccgccttcacatgcgcttgatatcatgagaggcagaaacatccaagcagttatggattcacatttggaggggaactactcaattgaggtggctactacattggtgaatcttgcttctcagtgtctacaatatgagccaagagatcgtcctggcataaaaaagttggtttccattctggagcctttgcagaaaaaaatagaggtaccgtcctatgtgatgcttggatttgcaaagccagtggaagaaccacaggcacctcctactccacagcgccctctttctcccatgggagatgcttgttccagaatggaccttactgccatctatcagatcctattcacaacgcattaccgagatgatgaagggagcaatgagctgtcttttcaagaatggacacagcagatgagggatatgctggatgcaaggaaacgtggcgactctgccttcaaagacaaagattttaaggcagcaatcgattgctatactcagtttgtcgatgtggggataatggtgtcaccgactgtattcgccagacgaagcttgtgctaccttatgtgtgaccaacctgatgcggccctccgtgatgcaatgcaagcgcagatcgtctaccctgattggccaacagcattctacatgcaggcagttgcactatccaagctaaacatgcagagtgacgccgtggacatgctgaacgaggcatcacagctagaagagaagaggcaaaagagcacaagagttccttgaatggcattgtcagctcagagaagtggcacgtcttctatacatataacatagatcgcacactatgtagtacagtagtatattctccaaccttttccaccctgtaaaaagcgcatagtatattgcgtggtctagaattagaagtaagaagtgaactgcagagaagatgctctttgctccctgtactctggagccctgtgatggcacttgtgtgataggttcttcatttttttgggcccatgtatataacatctgttgcatgggagtttagagtataggttgccggttgttcaggagggccctgtcgccgaagataataaacatgttatgtttgtg

SEQ ID NO: 27152 - protein, 517 aa, Zea mays subsp. mays
  peptide (1)..(517): Ceres Seq. ID no. 12407749
  misc_feature (1)..(517): NCBI GI NO: 37536550 NR Description: protein kinase-like protein
  misc_feature (1)..(515): NCBI GI NO: 18418600 NR Description: putative protein; protein id: At4g35230
  misc_feature (1)..(515): NCBI GI NO: 7486022 NR Description: hypothetical protein F23E12
  misc_feature (1)..(515): NCBI GI NO: 37537032 NR Description: putative protein kinase
  misc_feature (41)..(513): NCBI GI NO: 22327962 NR Description: protein kinase - like; protein id: At5g59010
  misc_feature (43)..(510): NCBI GI NO: 15232406 NR Description: protein kinase -like protein; protein id:At3g54030
  misc_feature (43)..(510): NCBI GI NO: 21553556 NR Description: protein kinase-like protein [Arabidopsis thaliana]
  misc_feature (49)..(510): NCBI GI NO: 15237604 NR Description: protein kinase-like; protein id: At5g41260.1
  misc_feature (29)..(515): NCBI GI NO: 15237465 NR Description: protein kinase-like protein; protein id:At5g46570
  misc_feature (29)..(515): NCBI GI NO: 28393210 NR Description: putative protein kinase [Arabidopsis thaliana]
MGCWRSSLRSGPHAAEKPPRHRHRPPPPPTNGPTSSLNAQQAAPPARASGEVPALAEFSLAELRAATAGFAPGNIVSESGEKAPNLVYRGQLRGPGGAPPRAVAVKKFAKLAWPDPKQFAEEAKGVGGLRHRSMANLIGYCCDGDDRLLVAEFMPNDTLAKHLFHWENQTIEWAMRLRVAYYISQALEYCSTKGWPLYHDLNAYRVLFDENGDPRLSCFGLMKNSRDGKSYSTNLAYTPPEYLRNGRVTPESVIFSFGTVLLDLLSGKRIPPSHALDIMRGRNIQAVMDSHLEGNYSIEVATTLVNLASQCLQYEPRDRPGIKKLVSILEPLQKKIEVPSYVMLGFAKPVEEPQAPPTPQRPLSPMGDACSRMDLTAIYQILFTTHYRDDEGSNELSFQEWTQQMRDMLDARKRGDSAFKDKDFKAAIDCYTQFVDVGIMVSPTVFARRSLCYLMCDQPDAALRDAMQAQIVYPDWPTAFYMQAVALSKLNMQSDAVDMLNEASQLEEKRQKSTRVP

SEQ ID NO: 27153 - protein, 384 aa, Zea mays subsp. mays
  peptide (1)..(384): Ceres Seq. ID no. 12407750
  misc_feature (1)..(384): NCBI GI NO: 37536550 NR Description: protein kinase-like protein
  misc_feature (1)..(382): NCBI GI NO: 18418600 NR Description: putative protein; protein id: At4g35230
  misc_feature (1)..(382): NCBI GI NO: 7486022 NR Description: hypothetical protein F23E12
  misc_feature (1)..(382): NCBI GI NO: 37537032 NR Description: putative protein kinase
  misc_feature (1)..(380): NCBI GI NO: 22327962 NR Description: protein kinase - like; protein id: At5g59010
  misc_feature (1)..(377): NCBI GI NO: 15232406 NR Description: protein kinase -like protein; protein id:At3g54030
  misc_feature (1)..(377): NCBI GI NO: 21553556 NR Description: protein kinase-like protein [Arabidopsis thaliana]
  misc_feature (1)..(377): NCBI GI NO: 15237604 NR Description: protein kinase-like; protein id: At5g41260.1
  misc_feature (1)..(382): NCBI GI NO: 15237465 NR Description: protein kinase-like protein; protein id:At5g46570
  misc_feature (1)..(382): NCBI GI NO: 28393210 NR Description: putative protein kinase [Arabidopsis thaliana]
MANLIGYCCDGDDRLLVAEFMPNDTLAKHLFHWENQTIEWAMRLRVAYYISQALEYCSTKGWPLYHDLNAYRVLFDENGDPRLSCFGLMKNSRDGKSYSTNLAYTPPEYLRNGRVTPESVIFSFGTVLLDLLSGKRIPPSHALDIMRGRNIQAVMDSHLEGNYSIEVATTLVNLASQCLQYEPRDRPGIKKLVSILEPLQKKIEVPSYVMLGFAKPVEEPQAPPTPQRPLSPMGDACSRMDLTAIYQILFTTHYRDDEGSNELSFQEWTQQMRDMLDARKRGDSAFKDKDFKAAIDCYTQFVDVGIMVSPTVFARRSLCYLMCDQPDAALRDAMQAQIVYPDWPTAFYMQAVALSKLNMQSDAVDMLNEASQLEEKRQKSTRVP

SEQ ID NO: 27154 - protein, 364 aa, Zea mays subsp. mays
  peptide (1)..(364): Ceres Seq. ID no. 12407751
  misc_feature (1)..(364): NCBI GI NO: 37536550 NR Description: protein kinase-like protein
  misc_feature (1)..(362): NCBI GI NO: 18418600 NR Description: putative protein; protein id: At4g35230
  misc_feature (1)..(362): NCBI GI NO: 7486022 NR Description: hypothetical protein F23E12
  misc_feature (1)..(362): NCBI GI NO: 37537032 NR Description: putative protein kinase
  misc_feature (1)..(360): NCBI GI NO: 22327962 NR Description: protein kinase - like; protein id: At5g59010
  misc_feature (1)..(357): NCBI GI NO: 15232406 NR Description: protein kinase -like protein; protein id:At3g54030
  misc_feature (1)..(357): NCBI GI NO: 21553556 NR Description: protein kinase-like protein [Arabidopsis thaliana]
  misc_feature (1)..(357): NCBI GI NO: 15237604 NR Description: protein kinase-like; protein id: At5g41260.1
  misc_feature (1)..(362): NCBI GI NO: 15237465 NR Description: protein kinase-like protein; protein id:At5g46570
  misc_feature (1)..(362): NCBI GI NO: 28393210 NR Description: putative protein kinase [Arabidopsis thaliana]
MPNDTLAKHLFHWENQTIEWAMRLRVAYYISQALEYCSTKGWPLYHDLNAYRVLFDENGDPRLSCFGLMKNSRDGKSYSTNLAYTPPEYLRNGRVTPESVIFSFGTVLLDLLSGKRIPPSHALDIMRGRNIQAVMDSHLEGNYSIEVATTLVNLASQCLQYEPRDRPGIKKLVSILEPLQKKIEVPSYVMLGFAKPVEEPQAPPTPQRPLSPMGDACSRMDLTAIYQILFTTHYRDDEGSNELSFQEWTQQMRDMLDARKRGDSAFKDKDFKAAIDCYTQFVDVGIMVSPTVFARRSLCYLMCDQPDAALRDAMQAQIVYPDWPTAFYMQAVALSKLNMQSDAVDMLNEASQLEEKRQKSTRVP

SEQ ID NO: 27155 - DNA, 1407 bp, Zea mays subsp. mays
  misc_feature (1)..(1407): Ceres Seq. ID no. 12358313
gatacaaaacacaaactctcggagacagggaagtagcgtagctagatccagagctcggcgccagagatacccgacatcctcgtcatgtctccggttgcaagcaagggagtagtgatggacggtgcggtggcggtggcggcagtggccgccgccgtgctgctgtgcctccatctgccggcggtggcgcgaggccagctgcaggtggggttctacaacacgagctgccccaacgccgagtccctggtccgccaggcggtggccagcgcgttcgccaacgactccggcatcgccgccggcctcatccgcctccatttccacgactgcttcgtcaggggctgcgatgcgtcggtgctgctgacctccgccaacaacacggcggagcgtgacgcgccgcccaacaacccgagcctccacgggttccaggtgatcgacgcggcgaaggcggcggtggagcagagctgcccgcagacggtgtcgtgcgcggacatcgtggccttcgcggcgcgcgacagcatcaacctcactggcaacctgccgtaccaggtgccctcgggccgccgggacggcaacgtctccctcgacacggaggccaacagcaacctgccggcgccaacgttcaacgcgtcccagctggtggccagcttcgcggccaagaacctcaccgacgaggagatggtcatcctctccggcgcccacaccgtcggccgctccttctgcacatcgtttctcgcgcgcatctacaacggatccaccccgatcgttgactctggcctgagcgccgggtacgccacactgctgcgcgcgctgtgcccgtccaacgccaactcgtccacgcccacgaccacggtgatcgaccccagcacgccggcggtgctggacaacaactactacaagctgctgccgctcaacctgggcctcttcttctccgacaaccagctgcgcgtcaactccacgctcaacgcctccgtcaacagcttcgccgccaacgagacgctctggaaggagaagttcgtcgccgccatgtcaagatgggaaacatccaggtgctcacggggacccagggccagatcaggctcaactgcagcatcgtcaacaacggctcgtcgtcggtggggatccagcagatgacagtgcccaactcctactctggcgccaccgcgtcccttgatgatgagatcgccacgagctgatctagatcggcgcggtgtgatgtgatgatagatatttgcattgtgtgtccatctttaggctattaattagtacgtttgctcccggtacgcgcgagagtgcgtagttcgtgtgtcattcatatgcgcgtacacgagatttccagtatcaccatgcatgtatcccgtgaatcatcatcagtaaataaaactggtgctctttgagagtctattattatcg

SEQ ID NO: 27156 - protein, 347 aa, Zea mays subsp. mays
  peptide (1)..(347): Ceres Seq. ID no. 12358314
  misc_feature (54)..(301): Pfam Name: Pfam Description:  Peroxidase
  misc_feature (11)..(313): NCBI GI NO: 34894758 NR Description: putative peroxidase
  misc_feature (32)..(313): NCBI GI NO: 34894752 NR Description: putative peroxidase
  misc_feature (22)..(313): NCBI GI NO: 34894760 NR Description: putative peroxidase
  misc_feature (38)..(313): NCBI GI NO: 12056448 NR Description: peroxidase [Zea mays]
  misc_feature (15)..(323): NCBI GI NO: 34894748 NR Description: putative peroxidase
  misc_feature (26)..(313): NCBI GI NO: 34894766 NR Description: putative peroxidase
  misc_feature (24)..(313): NCBI GI NO: 12056452 NR Description: peroxidase [Zea mays]
  misc_feature (20)..(313): NCBI GI NO: 7453849 NR Description: peroxidase prx12 precursor [Spinacia oleracea]
  misc_feature (23)..(313): NCBI GI NO: 4760700 NR Description: peroxidase 1 [Scutellaria baicalensis]
  misc_feature (25)..(313): NCBI GI NO: 34902236 NR Description: Putative peroxidase
MSPVASKGVVMDGAVAVAAVAAAVLLCLHLPAVARGQLQVGFYNTSCPNAESLVRQAVASAFANDSGIAAGLIRLHFHDCFVRGCDASVLLTSANNTAERDAPPNNPSLHGFQVIDAAKAAVEQSCPQTVSCADIVAFAARDSINLTGNLPYQVPSGRRDGNVSLDTEANSNLPAPTFNASQLVASFAAKNLTDEEMVILSGAHTVGRSFCTSFLARIYNGSTPIVDSGLSAGYATLLRALCPSNANSSTPTTTVIDPSTPAVLDNNYYKLLPLNLGLFFSDNQLRVNSTLNASVNSFAANETLWKEKFVAAMSRWETSRCSRGPRARSGSTAASSTTARRRWGSSR

SEQ ID NO: 27157 - protein, 337 aa, Zea mays subsp. mays
  peptide (1)..(337): Ceres Seq. ID no. 12358315
  misc_feature (44)..(291): Pfam Name: Pfam Description:  Peroxidase
  misc_feature (1)..(303): NCBI GI NO: 34894758 NR Description: putative peroxidase
  misc_feature (22)..(303): NCBI GI NO: 34894752 NR Description: putative peroxidase
  misc_feature (12)..(303): NCBI GI NO: 34894760 NR Description: putative peroxidase
  misc_feature (28)..(303): NCBI GI NO: 12056448 NR Description: peroxidase [Zea mays]
  misc_feature (5)..(313): NCBI GI NO: 34894748 NR Description: putative peroxidase
  misc_feature (16)..(303): NCBI GI NO: 34894766 NR Description: putative peroxidase
  misc_feature (14)..(303): NCBI GI NO: 12056452 NR Description: peroxidase [Zea mays]
  misc_feature (10)..(303): NCBI GI NO: 7453849 NR Description: peroxidase prx12 precursor [Spinacia oleracea]
  misc_feature (13)..(303): NCBI GI NO: 4760700 NR Description: peroxidase 1 [Scutellaria baicalensis]
  misc_feature (15)..(303): NCBI GI NO: 34902236 NR Description: Putative peroxidase
MDGAVAVAAVAAAVLLCLHLPAVARGQLQVGFYNTSCPNAESLVRQAVASAFANDSGIAAGLIRLHFHDCFVRGCDASVLLTSANNTAERDAPPNNPSLHGFQVIDAAKAAVEQSCPQTVSCADIVAFAARDSINLTGNLPYQVPSGRRDGNVSLDTEANSNLPAPTFNASQLVASFAAKNLTDEEMVILSGAHTVGRSFCTSFLARIYNGSTPIVDSGLSAGYATLLRALCPSNANSSTPTTTVIDPSTPAVLDNNYYKLLPLNLGLFFSDNQLRVNSTLNASVNSFAANETLWKEKFVAAMSRWETSRCSRGPRARSGSTAASSTTARRRWGSSR

SEQ ID NO: 27158 - DNA, 1547 bp, Zea mays subsp. mays
  misc_feature (1)..(1547): Ceres Seq. ID no. 12409501
gcacaagtcgagggccaccgctccgcatccgcatcttcttccagagcaagtcgagcgcggcggccacaaaacccagtcccatacgcacccgtccgttccgcgcgatcagccgagcgatgtcgtcgtcggcgcccgcaccggccgccatggccgtggacgacgcggaggacgaccagctcgcctccatgtccacggaggagatcatcagggcctcccgtctcctcgacaacgagatccgcgtccacaaggatgagctgcagcgggtcgaacctggagctggagtctatcaaggagaagaccaaggagaaccaggagaagattaagctcaacaagcagctgccgtacctcgtcggcaacatcgtcgagattttggaaatgaaccctgaggatgaggctgaagaagatggtgctaacatcgatctggactcacaaaggaaaggaaaatgtgttgttctgaagacatccaccagacaaaccatattccttcctgtaattgggttagttgaccccgataagctaaagcctggcgatttagttggagttaacaaagacagctacttgatactagatacattgccttcagagtatgactcacgggttaaggcaatggaagtagatgagaaacctactgaggattacaatgacattggcggacttgagaaacagattcaagagcttgtggaagcaatagtgttaccaatgacacacaaggaccgatttcaaaaattgggcattcgtccccccaaaggggttcttttgtatggaccccctgggaccgggaaaacactcatggctcgtgcatgcgctgcacagactaatgcaacatttctgaaattggctggtccacaacttgtccagatgttcattggtgatggagctaagcttgttagagatgcttttcagcttgctaaggagaaagccccgtgcatcatctttattgatgaaattgatgccattggaacaaagcgttttgacagtgaagttagtggcgatagagaagtgcaaaggacaatgttggaattgctgaatcagcttgatggatttagcagcgatgagaggataaaggtgatagctgcaacaaatcgtgctgatattcttgatcctgctctgatgagatctggtcgtctggaccgtaagattgagttccctcatccatcagaggaagcaagagctagaatcctgcagatccactcgaggaaaatgaatgtgaatccagatgtcaactttgaagagttggcgcgttcaaccgatgatttcaatggcgctcagctaaaggctgtttgcgtagaggctggcatgctcgctctacgccgagatgctacagaggttacccacgaggatttcaacgaggggatcatccaagtgcaggcaaagaagaagtccagcttgaattactacgcgtaagggggggaacgcccggtacttggtgatcattcagttgtttgtgacactgccattgtctgggcaggctaacttactatttgtactataagcaagctgttgcttttgtgtcttactccgtatgagagtatcatttatgaaatatt

SEQ ID NO: 27159 - protein, 467 aa, Zea mays subsp. mays
  peptide (1)..(467): Ceres Seq. ID no. 12409502
  misc_feature (250)..(437): Pfam Name: AAA Pfam Description: ATPase family associated with various cellular activities
  misc_feature (89)..(467): NCBI GI NO: 17297989 NR Description: 26S proteasome regulatory particle triple-A ATPase subunit5a
  misc_feature (89)..(467): NCBI GI NO: 1174613 NR Description: 26S PROTEASE REGULATORY SUBUNIT 6A HOMOLOG
  misc_feature (89)..(467): NCBI GI NO: 1729860 NR Description: 26S PROTEASE REGULATORY SUBUNIT 6A HOMOLOG
  misc_feature (89)..(467): NCBI GI NO: 12697589 NR Description: Tat binding protein like protein [Brassica rapa]
  misc_feature (89)..(467): NCBI GI NO: 3024434 NR Description: 26S PROTEASE REGULATORY SUBUNIT 6A HOMOLOG
  misc_feature (89)..(467): NCBI GI NO: 15230005 NR Description: 26S proteasome AAA-ATPase subunit RPT5a
  misc_feature (89)..(467): NCBI GI NO: 23197864 NR Description: 26S proteasome AAA-ATPase subunit RPT5a
  misc_feature (89)..(467): NCBI GI NO: 5669047 NR Description: 19S proteasome regulatory complex subunit S6A
  misc_feature (89)..(467): NCBI GI NO: 15217431 NR Description: 26S protease regulatory subunit 6A
  misc_feature (89)..(467): NCBI GI NO: 3024431 NR Description: 26S protease regulatory subunit 6A homolog
AQVEGHRSASASSSRASRARRPQNPVPYAPVRSARSAERCRRRRPHRPPWPWTTRRTTSSPPCPRRRSSGPPVSSTTRSASTRMSCSGSNLELESIKEKTKENQEKIKLNKQLPYLVGNIVEILEMNPEDEAEEDGANIDLDSQRKGKCVVLKTSTRQTIFLPVIGLVDPDKLKPGDLVGVNKDSYLILDTLPSEYDSRVKAMEVDEKPTEDYNDIGGLEKQIQELVEAIVLPMTHKDRFQKLGIRPPKGVLLYGPPGTGKTLMARACAAQTNATFLKLAGPQLVQMFIGDGAKLVRDAFQLAKEKAPCIIFIDEIDAIGTKRFDSEVSGDREVQRTMLELLNQLDGFSSDERIKVIAATNRADILDPALMRSGRLDRKIEFPHPSEEARARILQIHSRKMNVNPDVNFEELARSTDDFNGAQLKAVCVEAGMLALRRDATEVTHEDFNEGIIQVQAKKKSSLNYYA

SEQ ID NO: 27160 - protein, 384 aa, Zea mays subsp. mays
  peptide (1)..(384): Ceres Seq. ID no. 12409503
  misc_feature (167)..(354): Pfam Name: AAA Pfam Description: ATPase family associated with various cellular activities
  misc_feature (6)..(384): NCBI GI NO: 17297989 NR Description: 26S proteasome regulatory particle triple-A ATPase subunit5a
  misc_feature (6)..(384): NCBI GI NO: 1174613 NR Description: 26S PROTEASE REGULATORY SUBUNIT 6A HOMOLOG
  misc_feature (6)..(384): NCBI GI NO: 1729860 NR Description: 26S PROTEASE REGULATORY SUBUNIT 6A HOMOLOG
  misc_feature (6)..(384): NCBI GI NO: 12697589 NR Description: Tat binding protein like protein [Brassica rapa]
  misc_feature (6)..(384): NCBI GI NO: 3024434 NR Description: 26S PROTEASE REGULATORY SUBUNIT 6A HOMOLOG
  misc_feature (6)..(384): NCBI GI NO: 15230005 NR Description: 26S proteasome AAA-ATPase subunit RPT5a
  misc_feature (6)..(384): NCBI GI NO: 23197864 NR Description: 26S proteasome AAA-ATPase subunit RPT5a
  misc_feature (6)..(384): NCBI GI NO: 5669047 NR Description: 19S proteasome regulatory complex subunit S6A
  misc_feature (6)..(384): NCBI GI NO: 15217431 NR Description: 26S protease regulatory subunit 6A
  misc_feature (6)..(384): NCBI GI NO: 3024431 NR Description: 26S protease regulatory subunit 6A homolog
MSCSGSNLELESIKEKTKENQEKIKLNKQLPYLVGNIVEILEMNPEDEAEEDGANIDLDSQRKGKCVVLKTSTRQTIFLPVIGLVDPDKLKPGDLVGVNKDSYLILDTLPSEYDSRVKAMEVDEKPTEDYNDIGGLEKQIQELVEAIVLPMTHKDRFQKLGIRPPKGVLLYGPPGTGKTLMARACAAQTNATFLKLAGPQLVQMFIGDGAKLVRDAFQLAKEKAPCIIFIDEIDAIGTKRFDSEVSGDREVQRTMLELLNQLDGFSSDERIKVIAATNRADILDPALMRSGRLDRKIEFPHPSEEARARILQIHSRKMNVNPDVNFEELARSTDDFNGAQLKAVCVEAGMLALRRDATEVTHEDFNEGIIQVQAKKKSSLNYYA

SEQ ID NO: 27161 - protein, 342 aa, Zea mays subsp. mays
  peptide (1)..(342): Ceres Seq. ID no. 12409504
  misc_feature (125)..(312): Pfam Name: AAA Pfam Description: ATPase family associated with various cellular activities
  misc_feature (1)..(342): NCBI GI NO: 17297989 NR Description: 26S proteasome regulatory particle triple-A ATPase subunit5a
  misc_feature (1)..(342): NCBI GI NO: 1174613 NR Description: 26S PROTEASE REGULATORY SUBUNIT 6A HOMOLOG
  misc_feature (1)..(342): NCBI GI NO: 1729860 NR Description: 26S PROTEASE REGULATORY SUBUNIT 6A HOMOLOG
  misc_feature (1)..(342): NCBI GI NO: 12697589 NR Description: Tat binding protein like protein [Brassica rapa]
  misc_feature (1)..(342): NCBI GI NO: 3024434 NR Description: 26S PROTEASE REGULATORY SUBUNIT 6A HOMOLOG
  misc_feature (1)..(342): NCBI GI NO: 15230005 NR Description: 26S proteasome AAA-ATPase subunit RPT5a
  misc_feature (1)..(342): NCBI GI NO: 23197864 NR Description: 26S proteasome AAA-ATPase subunit RPT5a
  misc_feature (1)..(342): NCBI GI NO: 5669047 NR Description: 19S proteasome regulatory complex subunit S6A
  misc_feature (1)..(342): NCBI GI NO: 15217431 NR Description: 26S protease regulatory subunit 6A
  misc_feature (1)..(342): NCBI GI NO: 3024431 NR Description: 26S protease regulatory subunit 6A homolog
MNPEDEAEEDGANIDLDSQRKGKCVVLKTSTRQTIFLPVIGLVDPDKLKPGDLVGVNKDSYLILDTLPSEYDSRVKAMEVDEKPTEDYNDIGGLEKQIQELVEAIVLPMTHKDRFQKLGIRPPKGVLLYGPPGTGKTLMARACAAQTNATFLKLAGPQLVQMFIGDGAKLVRDAFQLAKEKAPCIIFIDEIDAIGTKRFDSEVSGDREVQRTMLELLNQLDGFSSDERIKVIAATNRADILDPALMRSGRLDRKIEFPHPSEEARARILQIHSRKMNVNPDVNFEELARSTDDFNGAQLKAVCVEAGMLALRRDATEVTHEDFNEGIIQVQAKKKSSLNYYA

SEQ ID NO: 27162 - DNA, 1140 bp, Zea mays subsp. mays
  misc_feature (1)..(1140): Ceres Seq. ID no. 12353784
atcctgtccccctcccacctttcccttccccgccgctctcgcttcgcttgcccgcacaccgagatttcctgcccgctcgttccgctgctctcatcgactcctcctgcgtgcctgccgaccggtccgaggcacgccgcggcggaggctctgccggccgggtcgtcggattcggccttaggttggttggttgggttgggtcgcatgtccacggcggtggcgcggccggcgcacggcggattccggcggtcggggagcgggaagccggatccggacgaggcggacaggatgacgcggagcgccaacgggtacttggtccaagaagaggaggaggaagagcatggcgaagaggcggcggcgaggagagaggatgaggacgaggaagaggaagaggaggaggcggaggcggtgtcggaggcctcgtcgatcggggcggcgtcgtccgacagctcctcctccatcggggagaactccgcgtccgacaaggaggaggaggaggaggaggttgagagtaaggcgcaggggcttggcatgatggggctggccacgctcgaatccttggatgatgccctgccctccaagcggggcctgtccagcttctacgcgggcaagtccaagtcgttcacgagcctggcggaggccgcggcggcggcggccgccagggagatcgccaagccggagaacccgttcaacaagcggcggcgcgtgctgcaggcgtggtcgcggcggcgggcgtcgtgcagcgcgctggccgccgcgtacctgccgccgctgctggccccggaccacgccgtggtggaggaggacgacgaggagggcgcggacgacgaggaggaggaggacgaggatgaggagcatggtggtggcggcggcgggctcaggggcacgaggaagccgcccacgttcccgtccccgcggctgagcgtgcacgtcgccgccgccggccagatggcgcggaacgggtcgtttcggtccccgaggtccttctccatgacggatctccacagcgccgccggctacgagtagccccggcgggcgggcggacaggattagagagtgctgatgtgttctaggtgcttttgttttactggtgatgtcgccattggtgctgccattaattactgctatatgatcatcattatg

SEQ ID NO: 27163 - protein, 340 aa, Zea mays subsp. mays
  peptide (1)..(340): Ceres Seq. ID no. 12353785
  misc_feature (100)..(173): Pfam Name: Pfam Description:  Prothymosin/parathymosin family
  misc_feature (68)..(339): NCBI GI NO: 34905120 NR Description: P0686C03.43
  misc_feature (112)..(286): NCBI GI NO: 28393161 NR Description: unknown protein [Arabidopsis thaliana]
  misc_feature (112)..(286): NCBI GI NO: 15238642 NR Description: putative protein; protein id: At5g24890
  misc_feature (146)..(285): NCBI GI NO: 15724184 NR Description: At2g24550/F25P17.15 [Arabidopsis thaliana]
  misc_feature (146)..(287): NCBI GI NO: 28916430 NR Description: putative KID-containing protein [Brassica napus]
  misc_feature (146)..(279): NCBI GI NO: 25412223 NR Description: hypothetical protein At2g24550
  misc_feature (146)..(253): NCBI GI NO: 18400574 NR Description: expressed protein; protein id: At2g24550
  misc_feature (123)..(282): NCBI GI NO: 15235970 NR Description: putative protein; protein id: At4g31510.1
  misc_feature (125)..(240): NCBI GI NO: 9294810 NR Description: MTD1 [Medicago truncatula]
  misc_feature (145)..(275): NCBI GI NO: 15229793 NR Description: putative protein; protein id: At3g43850.1
ILSPSHLSLPRRSRFACPHTEISCPLVPLLSSTPPACLPTGPRHAAAEALPAGSSDSALGWLVGLGRMSTAVARPAHGGFRRSGSGKPDPDEADRMTRSANGYLVQEEEEEEHGEEAAARREDEDEEEEEEEAEAVSEASSIGAASSDSSSSIGENSASDKEEEEEEVESKAQGLGMMGLATLESLDDALPSKRGLSSFYAGKSKSFTSLAEAAAAAAAREIAKPENPFNKRRRVLQAWSRRRASCSALAAAYLPPLLAPDHAVVEEDDEEGADDEEEEDEDEEHGGGGGGLRGTRKPPTFPSPRLSVHVAAAGQMARNGSFRSPRSFSMTDLHSAAGYE

SEQ ID NO: 27164 - protein, 273 aa, Zea mays subsp. mays
  peptide (1)..(273): Ceres Seq. ID no. 12353786
  misc_feature (33)..(106): Pfam Name: Pfam Description:  Prothymosin/parathymosin family
  misc_feature (1)..(272): NCBI GI NO: 34905120 NR Description: P0686C03.43
  misc_feature (45)..(219): NCBI GI NO: 28393161 NR Description: unknown protein [Arabidopsis thaliana]
  misc_feature (45)..(219): NCBI GI NO: 15238642 NR Description: putative protein; protein id: At5g24890
  misc_feature (79)..(218): NCBI GI NO: 15724184 NR Description: At2g24550/F25P17.15 [Arabidopsis thaliana]
  misc_feature (79)..(220): NCBI GI NO: 28916430 NR Description: putative KID-containing protein [Brassica napus]
  misc_feature (79)..(212): NCBI GI NO: 25412223 NR Description: hypothetical protein At2g24550
  misc_feature (79)..(186): NCBI GI NO: 18400574 NR Description: expressed protein; protein id: At2g24550
  misc_feature (56)..(215): NCBI GI NO: 15235970 NR Description: putative protein; protein id: At4g31510.1
  misc_feature (58)..(173): NCBI GI NO: 9294810 NR Description: MTD1 [Medicago truncatula]
  misc_feature (78)..(208): NCBI GI NO: 15229793 NR Description: putative protein; protein id: At3g43850.1
MSTAVARPAHGGFRRSGSGKPDPDEADRMTRSANGYLVQEEEEEEHGEEAAARREDEDEEEEEEEAEAVSEASSIGAASSDSSSSIGENSASDKEEEEEEVESKAQGLGMMGLATLESLDDALPSKRGLSSFYAGKSKSFTSLAEAAAAAAAREIAKPENPFNKRRRVLQAWSRRRASCSALAAAYLPPLLAPDHAVVEEDDEEGADDEEEEDEDEEHGGGGGGLRGTRKPPTFPSPRLSVHVAAAGQMARNGSFRSPRSFSMTDLHSAAGYE

SEQ ID NO: 27165 - protein, 245 aa, Zea mays subsp. mays
  peptide (1)..(245): Ceres Seq. ID no. 12353787
  misc_feature (5)..(78): Pfam Name: Pfam Description:  Prothymosin/parathymosin family
  misc_feature (1)..(244): NCBI GI NO: 34905120 NR Description: P0686C03.43
  misc_feature (17)..(191): NCBI GI NO: 28393161 NR Description: unknown protein [Arabidopsis thaliana]
  misc_feature (17)..(191): NCBI GI NO: 15238642 NR Description: putative protein; protein id: At5g24890
  misc_feature (51)..(190): NCBI GI NO: 15724184 NR Description: At2g24550/F25P17.15 [Arabidopsis thaliana]
  misc_feature (51)..(192): NCBI GI NO: 28916430 NR Description: putative KID-containing protein [Brassica napus]
  misc_feature (51)..(184): NCBI GI NO: 25412223 NR Description: hypothetical protein At2g24550
  misc_feature (51)..(158): NCBI GI NO: 18400574 NR Description: expressed protein; protein id: At2g24550
  misc_feature (28)..(187): NCBI GI NO: 15235970 NR Description: putative protein; protein id: At4g31510.1
  misc_feature (30)..(145): NCBI GI NO: 9294810 NR Description: MTD1 [Medicago truncatula]
  misc_feature (50)..(180): NCBI GI NO: 15229793 NR Description: putative protein; protein id: At3g43850.1
MTRSANGYLVQEEEEEEHGEEAAARREDEDEEEEEEEAEAVSEASSIGAASSDSSSSIGENSASDKEEEEEEVESKAQGLGMMGLATLESLDDALPSKRGLSSFYAGKSKSFTSLAEAAAAAAAREIAKPENPFNKRRRVLQAWSRRRASCSALAAAYLPPLLAPDHAVVEEDDEEGADDEEEEDEDEEHGGGGGGLRGTRKPPTFPSPRLSVHVAAAGQMARNGSFRSPRSFSMTDLHSAAGYE

SEQ ID NO: 27166 - DNA, 1522 bp, Zea mays subsp. mays; identical to SEQ ID NO: 23502
  misc_feature (1)..(1522): Ceres Seq. ID no. 12358133

SEQ ID NO: 27167 - protein, 283 aa, Zea mays subsp. mays; identical to SEQ ID NO: 23503
  peptide (1)..(283): Ceres Seq. ID no. 12358134
  misc_feature (1)..(98): Pfam Name: Pfam Description:  Glyoxalase/Bleomycin resistance protein/Dioxygenasesuperfamily
  misc_feature (1)..(143): NCBI GI NO: 15220397 NR Description: glyoxalase I, putative
  misc_feature (186)..(282): NCBI GI NO: 15220397 NR Description: glyoxalase I, putative
  misc_feature (1)..(143): NCBI GI NO: 21537360 NR Description: glyoxalase I, putative [Arabidopsis thaliana]
  misc_feature (186)..(282): NCBI GI NO: 21537360 NR Description: glyoxalase I, putative [Arabidopsis thaliana]
  misc_feature (1)..(143): NCBI GI NO: 25350143 NR Description: protein F1N21.10 [imported] - Arabidopsis thaliana
  misc_feature (186)..(282): NCBI GI NO: 25350143 NR Description: protein F1N21.10 [imported] - Arabidopsis thaliana
  misc_feature (1)..(143): NCBI GI NO: 7619802 NR Description: putative glyoxalase I [Triticum aestivum]
  misc_feature (186)..(282): NCBI GI NO: 7619802 NR Description: putative glyoxalase I [Triticum aestivum]
  misc_feature (1)..(143): NCBI GI NO: 11281993 NR Description: lactoylglutathione lyase (EC 4.4.1.5)
  misc_feature (186)..(282): NCBI GI NO: 11281993 NR Description: lactoylglutathione lyase (EC 4.4.1.5)

SEQ ID NO: 27168 - protein, 172 aa, Zea mays subsp. mays; identical to SEQ ID NO: 23504
  peptide (1)..(172): Ceres Seq. ID no. 12358135
  misc_feature (75)..(157): Pfam Name: Pfam Description:  Glyoxalase/Bleomycin resistance protein/Dioxygenasesuperfamily
  misc_feature (1)..(32): NCBI GI NO: 15220397 NR Description: glyoxalase I, putative
  misc_feature (75)..(171): NCBI GI NO: 15220397 NR Description: glyoxalase I, putative
  misc_feature (1)..(32): NCBI GI NO: 21537360 NR Description: glyoxalase I, putative [Arabidopsis thaliana]
  misc_feature (75)..(171): NCBI GI NO: 21537360 NR Description: glyoxalase I, putative [Arabidopsis thaliana]
  misc_feature (1)..(32): NCBI GI NO: 25350143 NR Description: protein F1N21.10 [imported] - Arabidopsis thaliana
  misc_feature (75)..(171): NCBI GI NO: 25350143 NR Description: protein F1N21.10 [imported] - Arabidopsis thaliana
  misc_feature (1)..(32): NCBI GI NO: 7619802 NR Description: putative glyoxalase I [Triticum aestivum]
  misc_feature (75)..(171): NCBI GI NO: 7619802 NR Description: putative glyoxalase I [Triticum aestivum]
  misc_feature (1)..(32): NCBI GI NO: 11281993 NR Description: lactoylglutathione lyase (EC 4.4.1.5)
  misc_feature (75)..(171): NCBI GI NO: 11281993 NR Description: lactoylglutathione lyase (EC 4.4.1.5)

SEQ ID NO: 27169 - protein, 153 aa, Zea mays subsp. mays; identical to SEQ ID NO: 23505
  peptide (1)..(153): Ceres Seq. ID no. 12358136
  misc_feature (56)..(138): Pfam Name: Pfam Description:  Glyoxalase/Bleomycin resistance protein/Dioxygenasesuperfamily
  misc_feature (1)..(13): NCBI GI NO: 15220397 NR Description: glyoxalase I, putative
  misc_feature (56)..(152): NCBI GI NO: 15220397 NR Description: glyoxalase I, putative
  misc_feature (1)..(13): NCBI GI NO: 21537360 NR Description: glyoxalase I, putative [Arabidopsis thaliana]
  misc_feature (56)..(152): NCBI GI NO: 21537360 NR Description: glyoxalase I, putative [Arabidopsis thaliana]
  misc_feature (1)..(13): NCBI GI NO: 25350143 NR Description: protein F1N21.10 [imported] - Arabidopsis thaliana
  misc_feature (56)..(152): NCBI GI NO: 25350143 NR Description: protein F1N21.10 [imported] - Arabidopsis thaliana
  misc_feature (1)..(13): NCBI GI NO: 7619802 NR Description: putative glyoxalase I [Triticum aestivum]
  misc_feature (56)..(152): NCBI GI NO: 7619802 NR Description: putative glyoxalase I [Triticum aestivum]
  misc_feature (1)..(13): NCBI GI NO: 11281993 NR Description: lactoylglutathione lyase (EC 4.4.1.5)
  misc_feature (56)..(152): NCBI GI NO: 11281993 NR Description: lactoylglutathione lyase (EC 4.4.1.5)

SEQ ID NO: 27170 - DNA, 1565 bp, Zea mays subsp. mays
  misc_feature (1)..(1565): Ceres Seq. ID no. 12407744
aacgctcgaactccacatcccccggtgttccccctccgctctccttcttaacccgtcccactgaactggatttcctctcgctattgtggtatactgtagcacgccagacgcaactagtcacggtcacggtcaagctcattgcgagcggagcgccctcctgtcgcttctgccgccgccgccaccgccgccgctcggctataaagtcgccagctctgttcaccgccgcttttcctctgcatccgtctgtggtgcggaattgaattccggtgggatttgggagccgagaggagaaggcggtaggcggggatggagacaccgggagggagcggggccccgtcgctggcgcggcagggctcggtgtactcgctaacgttcgacgagttccagaccgcgctcggcggcgccagcaaggacttcggctccatgaacatggacgagctgctgcgcaacatctggacggccgaggagtccaacgccatgaccgcggccgccccgaccacggcggccgcatccatggacgcgcatgggcagcatcagcagcaggccggggcgcccatccagcgccagggctccttcacgctgccgcgcacgctcagccagaagacggtcgacgaggtctggcgcgagatcgtgggcctcaccgacggggaggacgcgcaggcggttgcggctcccgctcccacgcccgcgcacgcgccgctgccggcgcaggcacagcggcagcagacgctggggtccatgactctggaggatttcctggtacgcgccggcgtggtttgtgaggacatggggcagcagaccctcgtgcagcagccgcacacgcagggttttttctcccaggggaatgcggtcgcgccgcagaccatgcagctggggaacggggtggtgaccggggtcgtcgggcaggggctcggaggagggatgacggtggcggtgccgacgacgccggtcgtgttcaacgggatggggaaggtggaggcgggggatctttcgtcgctgtcgccggtgccgtatcccttcgacactgcactgagggtgaggaagggaccgaccgtcgagaaggtggtggagaggaggcagaggcgcatgatcaagaacagggagtcggcagccaggtcgcgcgcgaggaagcaggcatacataatggagctagaagctgaggtggcaaaactcaaggacctgaatgacgagttgcagaaaaagcaggttgaaatgctgaagaagcaaaaggatgaggtcctggagcgaatcaacaaccaacatggaccgaaggcaaagaaactttgtcttcaccgcaccctgactggcccatggtagcctgctgaagcttgcacagacctcaccgaagtcgagatcgtcggcttagatgtgctcgtgtgtataccagatgatctcaagttgttctgtgacgtgggttgttgtctgtgcctgacagttcaccgtttaggttcagctgcgcaatcctcatataaacaatgaggcgtactaccttatctgttcatttaactccctcctattgccatggtgagatcatgcatgtaacttaggccttgttcgtttgtgcc

SEQ ID NO: 27171 - protein, 336 aa, Zea mays subsp. mays
  peptide (1)..(336): Ceres Seq. ID no. 12407745
  misc_feature (251)..(313): Pfam Name: Pfam Description:  bZIP transcription factor
  misc_feature (1)..(199): NCBI GI NO: 7406677 NR Description: putative ripening-related bZIP protein
  misc_feature (179)..(336): NCBI GI NO: 7406677 NR Description: putative ripening-related bZIP protein
  misc_feature (4)..(192): NCBI GI NO: 18402186 NR Description: abscisic acid responsive elements-binding factor
  misc_feature (196)..(336): NCBI GI NO: 18402186 NR Description: abscisic acid responsive elements-binding factor
  misc_feature (4)..(192): NCBI GI NO: 11994451 NR Description: abscisic acid responsive elements-binding factor
  misc_feature (196)..(332): NCBI GI NO: 11994451 NR Description: abscisic acid responsive elements-binding factor
  misc_feature (1)..(191): NCBI GI NO: 13775111 NR Description: bZIP transcription factor 6 [Phaseolus vulgaris]
  misc_feature (166)..(336): NCBI GI NO: 13775111 NR Description: bZIP transcription factor 6 [Phaseolus vulgaris]
  misc_feature (4)..(336): NCBI GI NO: 27469352 NR Description: bZIP transcription factor ABI5
  misc_feature (163)..(336): NCBI GI NO: 18402757 NR Description: abscisic acid responsive elements-binding factor
METPGGSGAPSLARQGSVYSLTFDEFQTALGGASKDFGSMNMDELLRNIWTAEESNAMTAAAPTTAAASMDAHGQHQQQAGAPIQRQGSFTLPRTLSQKTVDEVWREIVGLTDGEDAQAVAAPAPTPAHAPLPAQAQRQQTLGSMTLEDFLVRAGVVCEDMGQQTLVQQPHTQGFFSQGNAVAPQTMQLGNGVVTGVVGQGLGGGMTVAVPTTPVVFNGMGKVEAGDLSSLSPVPYPFDTALRVRKGPTVEKVVERRQRRMIKNRESAARSRARKQAYIMELEAEVAKLKDLNDELQKKQVEMLKKQKDEVLERINNQHGPKAKKLCLHRTLTGPW

SEQ ID NO: 27172 - protein, 297 aa, Zea mays subsp. mays
  peptide (1)..(297): Ceres Seq. ID no. 12407746
  misc_feature (212)..(274): Pfam Name: Pfam Description:  bZIP transcription factor
  misc_feature (1)..(160): NCBI GI NO: 7406677 NR Description: putative ripening-related bZIP protein
  misc_feature (140)..(297): NCBI GI NO: 7406677 NR Description: putative ripening-related bZIP protein
  misc_feature (1)..(153): NCBI GI NO: 18402186 NR Description: abscisic acid responsive elements-binding factor
  misc_feature (157)..(297): NCBI GI NO: 18402186 NR Description: abscisic acid responsive elements-binding factor
  misc_feature (1)..(153): NCBI GI NO: 11994451 NR Description: abscisic acid responsive elements-binding factor
  misc_feature (157)..(293): NCBI GI NO: 11994451 NR Description: abscisic acid responsive elements-binding factor
  misc_feature (1)..(152): NCBI GI NO: 13775111 NR Description: bZIP transcription factor 6 [Phaseolus vulgaris]
  misc_feature (127)..(297): NCBI GI NO: 13775111 NR Description: bZIP transcription factor 6 [Phaseolus vulgaris]
  misc_feature (1)..(297): NCBI GI NO: 27469352 NR Description: bZIP transcription factor ABI5
  misc_feature (124)..(297): NCBI GI NO: 18402757 NR Description: abscisic acid responsive elements-binding factor
MNMDELLRNIWTAEESNAMTAAAPTTAAASMDAHGQHQQQAGAPIQRQGSFTLPRTLSQKTVDEVWREIVGLTDGEDAQAVAAPAPTPAHAPLPAQAQRQQTLGSMTLEDFLVRAGVVCEDMGQQTLVQQPHTQGFFSQGNAVAPQTMQLGNGVVTGVVGQGLGGGMTVAVPTTPVVFNGMGKVEAGDLSSLSPVPYPFDTALRVRKGPTVEKVVERRQRRMIKNRESAARSRARKQAYIMELEAEVAKLKDLNDELQKKQVEMLKKQKDEVLERINNQHGPKAKKLCLHRTLTGPW

SEQ ID NO: 27173 - protein, 295 aa, Zea mays subsp. mays
  peptide (1)..(295): Ceres Seq. ID no. 12407747
  misc_feature (210)..(272): Pfam Name: Pfam Description:  bZIP transcription factor
  misc_feature (1)..(158): NCBI GI NO: 7406677 NR Description: putative ripening-related bZIP protein
  misc_feature (138)..(295): NCBI GI NO: 7406677 NR Description: putative ripening-related bZIP protein
  misc_feature (1)..(151): NCBI GI NO: 18402186 NR Description: abscisic acid responsive elements-binding factor
  misc_feature (155)..(295): NCBI GI NO: 18402186 NR Description: abscisic acid responsive elements-binding factor
  misc_feature (1)..(151): NCBI GI NO: 11994451 NR Description: abscisic acid responsive elements-binding factor
  misc_feature (155)..(291): NCBI GI NO: 11994451 NR Description: abscisic acid responsive elements-binding factor
  misc_feature (1)..(150): NCBI GI NO: 13775111 NR Description: bZIP transcription factor 6 [Phaseolus vulgaris]
  misc_feature (125)..(295): NCBI GI NO: 13775111 NR Description: bZIP transcription factor 6 [Phaseolus vulgaris]
  misc_feature (1)..(295): NCBI GI NO: 27469352 NR Description: bZIP transcription factor ABI5
  misc_feature (122)..(295): NCBI GI NO: 18402757 NR Description: abscisic acid responsive elements-binding factor
MDELLRNIWTAEESNAMTAAAPTTAAASMDAHGQHQQQAGAPIQRQGSFTLPRTLSQKTVDEVWREIVGLTDGEDAQAVAAPAPTPAHAPLPAQAQRQQTLGSMTLEDFLVRAGVVCEDMGQQTLVQQPHTQGFFSQGNAVAPQTMQLGNGVVTGVVGQGLGGGMTVAVPTTPVVFNGMGKVEAGDLSSLSPVPYPFDTALRVRKGPTVEKVVERRQRRMIKNRESAARSRARKQAYIMELEAEVAKLKDLNDELQKKQVEMLKKQKDEVLERINNQHGPKAKKLCLHRTLTGPW

SEQ ID NO: 27174 - DNA, 1697 bp, Zea mays subsp. mays
  misc_feature (1)..(1697): Ceres Seq. ID no. 12382234
  misc_feature (1691)..(1691): n is a, c, t, g, unknown, or other
gcacgagaccattacctagaacatcctaatcgaaaagtcctgcgaatccagtccgtcgacttccccgacgccgccgtggcagcagtcgccgccgacgaagtcggcaccagcagcggcggcgttaccacctctcgtccgctctccagccaccctcccccctctaccaccacatcgtccatacttactctcgagctccccggcgcaaaccccgtcgcgcccagccgaagccctaggatcctccacacccgcggcgtcatccacctctaccactcgtcgtcctccacttccacctcctcctcctacgcctcggcggtcgcagccacctcttcctcctcatccgggccggccaccccgcagcccgcctccgactcgcacctgcccctatgtcgcggcacgcgcctcctggtgctcgccgttccgacgcgcgtttcgccggaggactttgttcgcttctgcggcccccacctcgagtgtgcagccgacattcgtttcatcagggatgatggagtggaggaccggtacagcgttctagtggagtttgaggaccagagtagcgctgaatggttctacgccgatctcaatggctggaggttctcaacctctgagaaagattggatcaggacatcagtgggattttggcaactacttgtgatcactctttccgttgctcatgtgtttcagtgtggaccaattcatcctgtccggtatgccagttttgtcagaagcagtctgaaaattctacatgttctgtttgccaaaccactggaaacctctggatatgtgtgatatgtggttttgttggatgcggacggtatcaagaaggacatgcgaaacagcactggaaagatactcagcattgctattcgctagatttggaaacacaacgtgtttgggactatgttggtgacagttttgtacatcggctgaatcaatccaagagtgacgcaaagcatgctaagttcaaatcaaaaagtaaatattctggggatgaatgtgtaaactgctcgtgcaatgatgactctgatatgggtggagctatgttcagcagcaaagctgaaacaattgtggacgagtacaatcgtctcctggcaagccaacttgaaactcagagagaggtgcagacgtgcagttcattcctgctaagttttctatgtcactattgaaagcaaatattatgagggcctgttgtctgaggctaaaagaaacaaggagcaccagatttctgaagctgctgataaagctgtaagtgataagcttgaagagatgcaacttaagctcgagaatcttattgtggagaaaaagaaagttgcagatatgaacgaaaaactcactaggagccaagacatgtggcgccagacactaagagatatagaggaaagggaaagagcacagttgaagtcgaaggatgaaatgattctcgatctggaagaacagataaaggatttcaaattttccatcaaactgcagaagtcaatagagaagaacgatggtgtcaagggtggtacgctggttccactccctacggtttcagattctggaggcaagggtaaaaggtcatcaagaacaagcaagaggaggaattagtatcctttgctgagtagcaattagtcttgactggaacagacgtatacgaaccttattggcatgtatttactagcctgttatgatgaactacagcgtgatgtttgatngtcacg

SEQ ID NO: 27175 - protein, 261 aa, Zea mays subsp. mays
  peptide (1)..(261): Ceres Seq. ID no. 12382235
  misc_feature (14)..(202): NCBI GI NO: 38345493 NR Description: OSJNBa0010D21.6
  misc_feature (127)..(204): NCBI GI NO: 15227893 NR Description: hypothetical protein; protein id: At2g42160.1
  misc_feature (111)..(207): NCBI GI NO: 15225236 NR Description: hypothetical protein; protein id: At2g26000.1
  misc_feature (130)..(204): NCBI GI NO: 10800417 NR Description: BRCA1 associated protein [Homo sapiens]
  misc_feature (130)..(204): NCBI GI NO: 3252872 NR Description: BRCA1-associated protein 2 [Homo sapiens]
ARDHYLEHPNRKVLRIQSVDFPDAAVAAVAADEVGTSSGGVTTSRPLSSHPPPSTTTSSILTLELPGANPVAPSRSPRILHTRGVIHLYHSSSSTSTSSSYASAVAATSSSSSGPATPQPASDSHLPLCRGTRLLVLAVPTRVSPEDFVRFCGPHLECAADIRFIRDDGVEDRYSVLVEFEDQSSAEWFYADLNGWRFSTSEKDWIRTSVGFWQLLVITLSVAHVFQCGPIHPVRYASFVRSSLKILHVLFAKPLETSGYV

SEQ ID NO: 27176 - DNA, 1662 bp, Zea mays subsp. mays
  misc_feature (1)..(1662): Ceres Seq. ID no. 12404887
  misc_feature (157)..(157): n is a, c, t, g, unknown, or other
  misc_feature (168)..(168): n is a, c, t, g, unknown, or other
ctaaaccgctatggtccatccacatccacagtcgccatcgcccccacctctcaccgtcgtcttcgtgcaccactcggcctccactgccggtcgcgcctcccagccacctcgtgccgctctgccaccccgcgcatcctccaccgcccctatggctgcnacgggcgagcnctgcccgagcagtcgaccgccctttccgtgccgccccgcctccccgctaggcctccactgcccactgctccggcgcctacagtggaaggcaaggagaaggacatcgggcggcggtagctggatctggcaagcacaaggccgcgcccccggggcgcctggatctgcgttgcttgcaacccccccccccccccccccacacacacacacacacaacagatctgctacagggacaatctgatggtcggcgcatcgcctagaggccggtggtggcgagtcacgcctcctcagccctcatcctcacgtcgtcgccaccgcagatccgcccaacggcccctgacccgacaatgacgattatcttattgctagcaccgatggggtggggacaaagctgaagcttgctttcgaaactggtattcatgatacaatcgacattgacctggtggcaatgagcgtcaatgacattgtaactctaggtgcaaaaccattgttcttcctagattactatgcaacgagcaagcttgatgttgatcttgcagagaaggttatcaaggggattagggatggctgcgaacaatcagattgtgctctcctaggaggggagacagcagaaatgcctggtttctatgcagagggtgaatatgatctaagtggttttgctgtgggtgttgtgaagaaggataaaatcattgatggaaaaacattgttaagggagatgtgcttataggtcttccttccagtggtgttcattctaacgggttctctcttgttagaaggagtactgagaaaagtggactttctttggatgattagctcccaagaaatgatggcataacaactacagttggtgaagctctaatggcaccaaccttcatctatgttaagcaggtgcttgagattattagcaaaggtggtgtgaaaggactagcccacatcactggtggtggctttactagcaatatcccaagagtattcccctctggatgcggggcaaaaaatttactgggtcatgggaaatacctccaatcttcagttggcttcaacaggcaagaacaaatgatcttcaaacttcgcctttgattttcagtagcaactattctgagaaacatcaggcactgcattggcgtactggtcataaaaatgattgcctccagataataagttctgctgcttcaaattcagttctgccagctgtaggaatagggtttgtccgctggtttgctaaggcaagcaacgtacatagactgctcgtcttggatcctttaggaatcataaaagcatatagaggaactatgtataggctacaaagaagcataagaagcatttttatagcagaagccaagtgttctgatgattttgttttttcaattgtgttttctgttattggttcagtatgcacatatattgacatgatttatggcatggcatctgccatctttgttatatttatgacatcgttcttgattgatgtgtgcgacatgaatgatagatcttttt

SEQ ID NO: 27177 - protein, 171 aa, Zea mays subsp. mays
  peptide (1)..(171): Ceres Seq. ID no. 12404888
  misc_feature (1)..(21): NCBI GI NO: 23029993 NR Description: hypothetical protein
  misc_feature (1)..(21): NCBI GI NO: 34897250 NR Description: putative 5'-phosphoribosyl-5-aminoimidazolesynthetase
  misc_feature (1)..(22): NCBI GI NO: 1709925 NR Description: Phosphoribosylformylglycinamidine cyclo-ligase
MRGKKFTGSWEIPPIFSWLQQARTNDLQTSPLIFSSNYSEKHQALHWRTGHKNDCLQIISSAASNSVLPAVGIGFVRWFAKASNVHRLLVLDPLGIIKAYRGTMYRLQRSIRSIFIAEAKCSDDFVFSIVFSVIGSVCTYIDMIYGMASAIFVIFMTSFLIDVCDMNDRSF

SEQ ID NO: 27178 - protein, 131 aa, Zea mays subsp. mays
  peptide (1)..(131): Ceres Seq. ID no. 12404889
  misc_feature (49)..(49): Xaa is any aa, unknown or other
  misc_feature (53)..(53): Xaa is any aa, unknown or other
MVHPHPQSPSPPPLTVVFVHHSASTAGRASQPPRAALPPRASSTAPMAXTGEXCPSSRPPFPCRPASPLGLHCPLLRRLQWKARRRTSGGGSWIWQAQGRAPGAPGSALLATPPPPPPHTHTHNRSATGTI

SEQ ID NO: 27179 - protein, 94 aa, Zea mays subsp. mays
  peptide (1)..(94): Ceres Seq. ID no. 12404890
  misc_feature (53)..(53): Xaa is any aa, unknown or other
  misc_feature (56)..(56): Xaa is any aa, unknown or other
LNRYGPSTSTVAIAPTSHRRLRAPLGLHCRSRLPATSCRSATPRILHRPYGCXGRXLPEQSTALSVPPRLPARPPLPTAPAPTVEGKEKDIGRR

SEQ ID NO: 27180 - DNA, 920 bp, Zea mays subsp. mays
  misc_feature (1)..(920): Ceres Seq. ID no. 12359483
gtttttcccctcctcttcctttcccccccacccccactactctctctcgccccaaaaccagatcgccacgaccaagggcagagggccccggaggggcgcgtagcaatggcggcaggctaccgggccgaggacgattacgattacctcttcaaggtggtcctgatcggcgactccggcgtcggcaagtccaacttgctctcacgcttcacgcgcaacgagttcagcctcgagtccaagtccacaatcggcgtcgagttcgccacccgctctctccaggtcgacggcaaggtcgtcaaggcccagatttgggacaccgccggccaggaacgataccgtgcaatcactagtgcgtattaccgaggcgctgttggggcgttgcttgtatatgacgtcactcgccactcaacctttgagaacgttgagcgttggctgaaggagctgagagaccacacagaccccaatatagttgttatgctggttggcaacaaatctgatctccgccatcttgtagcagttcaaaccgacgaaggaaaagcattcgcagagagggaatcgttgtacttcatggagacctctgcgcttgagtcgaccaacgttgagaatgcatttgcagaagtcctagctcagatctaccgtattgtgagcaagagagcagttgaagcaggtgaagatgcagcatctgggcctggcaggggcgagaagataaacattaaggatgacgtctcggcagtgaagaagggtggctgctgctctagctgagctgccgtgctgtaattttttttggggagttgtgggatgtagcttatgttatggcattttcagcgactggaaattggtagtggcatttagcagcctctattacctagagaggttattgtcaaactgaaaaaaaaaactgaaggttagatcagtttagagct

SEQ ID NO: 27181 - protein, 252 aa, Zea mays subsp. mays
  peptide (1)..(252): Ceres Seq. ID no. 12359484
  misc_feature (51)..(212): Pfam Name: Pfam Description:  Ras family
  misc_feature (36)..(251): NCBI GI NO: 13195452 NR Description: GTP-binding protein [Oryza sativa]
  misc_feature (36)..(251): NCBI GI NO: 730512 NR Description: RAS-RELATED PROTEIN RIC2
  misc_feature (38)..(252): NCBI GI NO: 15234020 NR Description: ras-related GTP binding protein, putative
  misc_feature (38)..(252): NCBI GI NO: 15242483 NR Description: GTP-binding protein, putative
  misc_feature (38)..(252): NCBI GI NO: 21536533 NR Description: Rab-type small GTP-binding protein-like
  misc_feature (39)..(252): NCBI GI NO: 34909538 NR Description: putative GTP-binding protein
  misc_feature (38)..(252): NCBI GI NO: 541979 NR Description: GTP-binding protein, ras-like - fava bean
  misc_feature (38)..(252): NCBI GI NO: 22597170 NR Description: GTP-binding protein [Glycine max]
  misc_feature (38)..(252): NCBI GI NO: 22597172 NR Description: small GTP-binding protein [Glycine max]
  misc_feature (38)..(252): NCBI GI NO: 15219955 NR Description: GTP binding protein, putative
VFPLLFLSPPPPLLSLAPKPDRHDQGQRAPEGRVAMAAGYRAEDDYDYLFKVVLIGDSGVGKSNLLSRFTRNEFSLESKSTIGVEFATRSLQVDGKVVKAQIWDTAGQERYRAITSAYYRGAVGALLVYDVTRHSTFENVERWLKELRDHTDPNIVVMLVGNKSDLRHLVAVQTDEGKAFAERESLYFMETSALESTNVENAFAEVLAQIYRIVSKRAVEAGEDAASGPGRGEKINIKDDVSAVKKGGCCSS

SEQ ID NO: 27182 - protein, 217 aa, Zea mays subsp. mays
  peptide (1)..(217): Ceres Seq. ID no. 12359485
  misc_feature (16)..(177): Pfam Name: Pfam Description:  Ras family
  misc_feature (1)..(216): NCBI GI NO: 13195452 NR Description: GTP-binding protein [Oryza sativa]
  misc_feature (1)..(216): NCBI GI NO: 730512 NR Description: RAS-RELATED PROTEIN RIC2
  misc_feature (3)..(217): NCBI GI NO: 15234020 NR Description: ras-related GTP binding protein, putative
  misc_feature (3)..(217): NCBI GI NO: 15242483 NR Description: GTP-binding protein, putative
  misc_feature (3)..(217): NCBI GI NO: 21536533 NR Description: Rab-type small GTP-binding protein-like
  misc_feature (4)..(217): NCBI GI NO: 34909538 NR Description: putative GTP-binding protein
  misc_feature (3)..(217): NCBI GI NO: 541979 NR Description: GTP-binding protein, ras-like - fava bean
  misc_feature (3)..(217): NCBI GI NO: 22597170 NR Description: GTP-binding protein [Glycine max]
  misc_feature (3)..(217): NCBI GI NO: 22597172 NR Description: small GTP-binding protein [Glycine max]
  misc_feature (3)..(217): NCBI GI NO: 15219955 NR Description: GTP binding protein, putative
MAAGYRAEDDYDYLFKVVLIGDSGVGKSNLLSRFTRNEFSLESKSTIGVEFATRSLQVDGKVVKAQIWDTAGQERYRAITSAYYRGAVGALLVYDVTRHSTFENVERWLKELRDHTDPNIVVMLVGNKSDLRHLVAVQTDEGKAFAERESLYFMETSALESTNVENAFAEVLAQIYRIVSKRAVEAGEDAASGPGRGEKINIKDDVSAVKKGGCCSS

SEQ ID NO: 27183 - DNA, 1550 bp, Zea mays subsp. mays
  misc_feature (1)..(1550): Ceres Seq. ID no. 12409494
acactccaaaccacaagcgcagccgccgtcacttctgccccatcgcggccccatcctgccgctcgtcgacgacgccaccccgcccctcgaccgcggctaacgccgccagtgtcgcaagcaagctttggtgccgccgccttcacacaggctttgaaggaggtggagcgccgggagcacgaggccgagacgaagacccgccacctccagggatggcccaagcaccgccatgacccgaggagtgaggatgaggatcccgaggaggtggagtcatatgtggaggattcccgcgaggagaacgcggaggcggtgcccgtagctgtagggaaccgggccaagagcactggaaaggggaaggcgcagatgtaccgccacctggtgttccccgtgctggagttcctccaggagcggcagctcttctcggagtcagagatcctggaggccaagatccgcctcctcagcggcacgggccacgtcaggggtagcctccccaagggaaatggaggatagcttctgggtccggcgacaagttgcagttgcagcagtgctccaatgttttggtcaatggatttgttctaaaagaatacacagaaagatagtcagaagcacaccaatatagggcatttccacttacttggatggtaaagaagacactcctacaaattgaaatgcacgtacttcgggcttcacgacaactggactggacaggtgtctgcacgcttcagttgaagccccagatatcacagagctcatgctgtccatggagctgcttggtgatgcacggtcaacatggcccttagttgggatcctgttccctgatgatcttgagggtatagtttttctgatataagattttgatgacggacgaacagggaccctctgagcagttccctttactttcaaaaagtgcctttcttgaacggtcaattgaagaaaattctgaccaagaagaatgcatcatcaagctaaatgacattcctaggggtgccaagtcatttgagctagttgcaaggttctgctatggtgtgaaaatagagctttcacctgcaaatgttgtctacctacggtgtgcctcaaagcatctagaaatgactgaagaagtagctgaggaaaacctgattgcacagtcagaaatgtttctcaaccaagtggttctccgtaactggaaagattatttggcagcattggaaacacgtgatgacctactcccccatgctgaagacctccagattgtgaacagatgtatcgagccattggcatcaaaagctactagagtgaacagatgcttttgtgactgatcagctctggagcagctagagtgatgtagttgtgggcttttgaacaatagttagagtgatatgaaacattagtgatgtagttgtgggcttttgaactacttcaagctggagtgatgtcgctgtggtgtttttgtgactgatcatctctggagcttttgtgaatgatctagctagctatccgtaaatgatctagttatgaatgatattataattgtgatgcttttgtgaatatataattgtggtgcttttgtgttc

SEQ ID NO: 27184 - protein, 168 aa, Zea mays subsp. mays
  peptide (1)..(168): Ceres Seq. ID no. 12409495
TLQTTSAAAVTSAPSRPHPAARRRRHPAPRPRLTPPVSQASFGAAAFTQALKEVERREHEAETKTRHLQGWPKHRHDPRSEDEDPEEVESYVEDSREENAEAVPVAVGNRAKSTGKGKAQMYRHLVFPVLEFLQERQLFSESEILEAKIRLLSGTGHVRGSLPKGNGG

SEQ ID NO: 27185 - protein, 146 aa, Zea mays subsp. mays
  peptide (1)..(146): Ceres Seq. ID no. 12409496
  misc_feature (10)..(137): NCBI GI NO: 18481720 NR Description: hypothetical protein [Sorghum bicolor]
  misc_feature (10)..(138): NCBI GI NO: 15220750 NR Description: non-phototropic hypocotyl, putative
  misc_feature (10)..(138): NCBI GI NO: 25336228 NR Description: F26G16.2 protein - Arabidopsis thaliana
  misc_feature (10)..(137): NCBI GI NO: 15242687 NR Description: photoreceptor-interacting protein - like
  misc_feature (10)..(145): NCBI GI NO: 15289880 NR Description: putative photoreceptor-interacting protein-likeprotein
  misc_feature (1)..(137): NCBI GI NO: 15240666 NR Description: photoreceptor-interacting protein-like
  misc_feature (10)..(137): NCBI GI NO: 6224712 NR Description: non-phototropic hypocotyl 3 [Arabidopsis thaliana]
  misc_feature (10)..(137): NCBI GI NO: 18424815 NR Description: non-phototropic hypocotyl 3 (gb|AAF05914
  misc_feature (10)..(137): NCBI GI NO: 32492175 NR Description: OSJNBb0034I13.5
  misc_feature (10)..(146): NCBI GI NO: 22328160 NR Description: similar to non-phototropic hypocotyl-like protein
MTDEQGPSEQFPLLSKSAFLERSIEENSDQEECIIKLNDIPRGAKSFELVARFCYGVKIELSPANVVYLRCASKHLEMTEEVAEENLIAQSEMFLNQVVLRNWKDYLAALETRDDLLPHAEDLQIVNRCIEPLASKATRVNRCFCD

SEQ ID NO: 27186 - DNA, 1056 bp, Zea mays subsp. mays
  misc_feature (1)..(1056): Ceres Seq. ID no. 13498940
  misc_feature (446)..(446): n is a, c, t, g, unknown, or other
  misc_feature (441)..(441): n is a, c, t, g, unknown, or other
  misc_feature (402)..(402): n is a, c, t, g, unknown, or other
  misc_feature (419)..(419): n is a, c, t, g, unknown, or other
  misc_feature (403)..(403): n is a, c, t, g, unknown, or other
  misc_feature (437)..(437): n is a, c, t, g, unknown, or other
  misc_feature (418)..(418): n is a, c, t, g, unknown, or other
  misc_feature (424)..(424): n is a, c, t, g, unknown, or other
  misc_feature (442)..(442): n is a, c, t, g, unknown, or other
  misc_feature (423)..(423): n is a, c, t, g, unknown, or other
  misc_feature (415)..(415): n is a, c, t, g, unknown, or other
gcacgagaccattacctagaacatcctaatcaaaacaagaacagagcagtactgcaggagagcgagtgagctgtccaaagcgtccggccaaacccgcgtgtgtccaccactcctcctgcacaagcaccgccacaatgcggccgcacaccctggcgctgctcctgctcctgctggccacgccggcggcgacgcgtctggcatcggccgcctgcgcgggcgagaagttccccgcggggcgggcgtacgcggcgtgcgaggacctcccgaagctgggcgcgtcgctgcactggacgtacgacgcggcaaagagctccctgtccgtggcgttcgtggcggcgccggcggcggccggcgggtgggtggcgtgggggctgaacccgacgggcgagggcatggccggcnngcaggcgactgntgnngctnncggggtccgggtncggnnccgnggcgcccaccgtgcggacgtacaacatcacggggtacgtcccgctggggaacgtctcgacgccgctggacttcccggccaccgacctcgccgcggacgccgcagccgggggcaggatccgggtgtacggcacgctgcagctgcgcgaggggatgagggccgtgaaccaggtgtggcaggtcggcgcgtcatccaccgccggcgcccccgacaagcacgcgttccagccggacaacctcggcgccaagagcaagctcgtcctcgccggcaagtcccccgcggcggcgtccccgtcgcccgcccccgcgcctcatgcgtccggcggcggcgcggcgtcgtccaagtcccccaacgccgccgcggccgcggccggcgtggccgcgccggtagccctcgtgctcgcgctggtgggattcttggcgacggtatgatgacgcgtccacggtggctggatgggtgggcggtgagcaggggaggaagtattattgcactgttttctttatttttggttcgtttttcaggtttgttttaggctgtgaaataataataaaaacggttggctggctgcacttgttgttgagctgctgtttggtaggaatatacagtgattt

SEQ ID NO: 27187 - protein, 280 aa, Zea mays subsp. mays
  peptide (1)..(280): Ceres Seq. ID no. 13498941
  misc_feature (1)..(92): NCBI GI NO: 30680258 NR Description: auxin-induced protein (AIR12)
  misc_feature (1)..(92): NCBI GI NO: 11357190 NR Description: auxin-induced protein AIR12
  misc_feature (3)..(98): NCBI GI NO: 29647484 NR Description: OJ1191_A10.2
  misc_feature (8)..(92): NCBI GI NO: 15235545 NR Description: auxin-induced protein, putative
  misc_feature (8)..(92): NCBI GI NO: 21593814 NR Description: unknown [Arabidopsis thaliana]
  misc_feature (1)..(92): NCBI GI NO: 38424013 NR Description: auxin-induced protein-like
  misc_feature (12)..(106): NCBI GI NO: 24414271 NR Description: Unknown protein
  misc_feature (1)..(91): NCBI GI NO: 18404500 NR Description: auxin-induced protein family
  misc_feature (1)..(117): NCBI GI NO: 18421491 NR Description: auxin-induced protein family
  misc_feature (1)..(117): NCBI GI NO: 21592781 NR Description: putative membrane protein [Arabidopsis thaliana]
  misc_feature (90)..(90): Xaa is any aa, unknown or other
  misc_feature (94)..(94): Xaa is any aa, unknown or other
  misc_feature (95)..(95): Xaa is any aa, unknown or other
  misc_feature (97)..(97): Xaa is any aa, unknown or other
  misc_feature (101)..(101): Xaa is any aa, unknown or other
  misc_feature (103)..(103): Xaa is any aa, unknown or other
  misc_feature (104)..(104): Xaa is any aa, unknown or other
MRPHTLALLLLLLATPAATRLASAACAGEKFPAGRAYAACEDLPKLGASLHWTYDAAKSSLSVAFVAAPAAAGGWVAWGLNPTGEGMAGXQATXXAXGVRXRXXGAHRADVQHHGVRPAGERLDAAGLPGHRPRRGRRSRGQDPGVRHAAAARGDEGREPGVAGRRVIHRRRPRQARVPAGQPRRQEQARPRRQVPRGGVPVARPRASCVRRRRGVVQVPQRRRGRGRRGRAGSPRARAGGILGDGMMTRPRWLDGWAVSRGGSIIALFSLFLVRFSGLF

SEQ ID NO: 27188 - protein, 194 aa, Zea mays subsp. mays
  peptide (1)..(194): Ceres Seq. ID no. 13498942
  misc_feature (1)..(12): NCBI GI NO: 29647484 NR Description: OJ1191_A10.2
  misc_feature (1)..(20): NCBI GI NO: 24414271 NR Description: Unknown protein
  misc_feature (1)..(31): NCBI GI NO: 18421491 NR Description: auxin-induced protein family
  misc_feature (1)..(31): NCBI GI NO: 21592781 NR Description: putative membrane protein [Arabidopsis thaliana]
  misc_feature (4)..(4): Xaa is any aa, unknown or other
  misc_feature (8)..(8): Xaa is any aa, unknown or other
  misc_feature (9)..(9): Xaa is any aa, unknown or other
  misc_feature (11)..(11): Xaa is any aa, unknown or other
  misc_feature (15)..(15): Xaa is any aa, unknown or other
  misc_feature (17)..(17): Xaa is any aa, unknown or other
  misc_feature (18)..(18): Xaa is any aa, unknown or other
MAGXQATXXAXGVRXRXXGAHRADVQHHGVRPAGERLDAAGLPGHRPRRGRRSRGQDPGVRHAAAARGDEGREPGVAGRRVIHRRRPRQARVPAGQPRRQEQARPRRQVPRGGVPVARPRASCVRRRRGVVQVPQRRRGRGRRGRAGSPRARAGGILGDGMMTRPRWLDGWAVSRGGSIIALFSLFLVRFSGLF

SEQ ID NO: 27189 - DNA, 1493 bp, Zea mays subsp. mays
  misc_feature (1)..(1493): Ceres Seq. ID no. 13495154
ctgttcatttcctcctgctcccccctcctccctcccccccccctcctcgccgctcgccgttgaagaggtaggcccacgggccggcgagaatggaggcggcgacgatggcgtggacggcggcggtggtcggggcggggctggtgtactggttcgtctgggtgatgggcgcggcggaggtgaagggcaagcgggcggtggatctcaagatgggatccatcacgcgggacaaggtgcaggacaagtacacgcagtactggtccttcttccgccgccccaaggagacggccaccacggcggcgtcggcggagaaggtgccggccttcgtcgacaccttctacaacctcgtgaccgacatctacgagtgggggtggggccagtccttccacttctccccgtccctccccggccgctcccaccgcgacgccacgcgcgtccacgaggagcgcgtcgccgacctcctcggcgccaggccgggccaccgcctcctggacgtcggctgcggcgtcggcgggcccatgcgcgccatcgccgcgcactcggggatccaacgtcgtcggcatcaccatcaacgagtaccaggtgaaccgcgcccgcgcgcacaaccgcaaggccggcctcgactccccgcgctgcgaggtcgtctgcggcaacttcctctccatgccgttcccggacgcctccttcgacggcgcctactccatcgaggccacctgccacgcgcccaggctgcaggacgtgtacggcgaggtctaccgcgtgctcaagccggggggactctacgtctcctacgagtgggtcaccaccccgctgtaccgcgccgaggacccggaccacgtcgagtgcatccacggcatcgagcgcggcgacgcgctaccggggctccgccgccaggacgagatcgcgtccatcgctaaggaggtcgggttcgaggtgctcaaggagcaggacctggcgctgccccccgcgctgccctggtggacgcgcctcaagatgggccgcatcgcctactggcgcaactccctcgtcgtccgcgtgctcaccatgctccgggtcgcgcccaagggcgtctccgaggtgcacgagatgctgtacgagaccgcgcagcacctcacccgcggcggcgagaccggcatcttcacgcccatgcacatggtgctcctccgcaagcccgccgccgccgcctccaccgaggaggccaactagtgtaagactacacaccgccaccaatcagttactactcgcccaccgcaagggggagaaaatggggagggaggaaaaagatgcaagcagcagcagcaccagaggtaagaagagcaggctaatcggcgacttgaagaagttacaaattgatctattagagaagaagatactactaggaacgattcttctctccgtttactcttttccctgttcgtagctttgagttttaatttttgttttttggtggacggattgttccggggaggtcgaggttgggatctaaatttattttc

SEQ ID NO: 27190 - protein, 274 aa, Zea mays subsp. mays
  peptide (1)..(274): Ceres Seq. ID no. 13495155
  misc_feature (87)..(147): Pfam Name: Pfam Description:  ubiE/COQ5 methyltransferase family
  misc_feature (9)..(151): NCBI GI NO: 7443717 NR Description: probable sterol 24-C-methyltransferase (EC2
  misc_feature (1)..(150): NCBI GI NO: 21555010 NR Description: sterol-C-methyltransferase [Arabidopsis thaliana]
  misc_feature (1)..(151): NCBI GI NO: 3560533 NR Description: 24-methylene lophenol C24(1)methyltransferase
  misc_feature (82)..(151): NCBI GI NO: 14192727 NR Description: S-adenosyl methionine:sterol methyl transferase
  misc_feature (79)..(150): NCBI GI NO: 7443720 NR Description: probable sterol 24-C-methyltransferase (EC2
  misc_feature (82)..(151): NCBI GI NO: 12642580 NR Description: sterol methyl transferase
  misc_feature (1)..(150): NCBI GI NO: 7443718 NR Description: probable sterol 24-C-methyltransferase (EC2
  misc_feature (79)..(150): NCBI GI NO: 1872473 NR Description: delta-24-sterol methyltransferase
  misc_feature (79)..(150): NCBI GI NO: 7489677 NR Description: probable sterol 24-C-methyltransferase (EC2
  misc_feature (1)..(150): NCBI GI NO: 1061040 NR Description: sterol-C-methyltransferase [Arabidopsis thaliana]
MEAATMAWTAAVVGAGLVYWFVWVMGAAEVKGKRAVDLKMGSITRDKVQDKYTQYWSFFRRPKETATTAASAEKVPAFVDTFYNLVTDIYEWGWGQSFHFSPSLPGRSHRDATRVHEERVADLLGARPGHRLLDVGCGVGGPMRAIAAHSGIQRRRHHHQRVPGEPRPRAQPQGRPRLPALRGRLRQLPLHAVPGRLLRRRLLHRGHLPRAQAAGRVRRGLPRAQAGGTLRLLRVGHHPAVPRRGPGPRRVHPRHRARRRATGAPPPGRDRVHR

SEQ ID NO: 27191 - protein, 269 aa, Zea mays subsp. mays
  peptide (1)..(269): Ceres Seq. ID no. 13495156
  misc_feature (82)..(142): Pfam Name: Pfam Description:  ubiE/COQ5 methyltransferase family
  misc_feature (4)..(146): NCBI GI NO: 7443717 NR Description: probable sterol 24-C-methyltransferase (EC2
  misc_feature (1)..(145): NCBI GI NO: 21555010 NR Description: sterol-C-methyltransferase [Arabidopsis thaliana]
  misc_feature (1)..(146): NCBI GI NO: 3560533 NR Description: 24-methylene lophenol C24(1)methyltransferase
  misc_feature (77)..(146): NCBI GI NO: 14192727 NR Description: S-adenosyl methionine:sterol methyl transferase
  misc_feature (74)..(145): NCBI GI NO: 7443720 NR Description: probable sterol 24-C-methyltransferase (EC2
  misc_feature (77)..(146): NCBI GI NO: 12642580 NR Description: sterol methyl transferase
  misc_feature (1)..(145): NCBI GI NO: 7443718 NR Description: probable sterol 24-C-methyltransferase (EC2
  misc_feature (74)..(145): NCBI GI NO: 1872473 NR Description: delta-24-sterol methyltransferase
  misc_feature (74)..(145): NCBI GI NO: 7489677 NR Description: probable sterol 24-C-methyltransferase (EC2
  misc_feature (1)..(145): NCBI GI NO: 1061040 NR Description: sterol-C-methyltransferase [Arabidopsis thaliana]
MAWTAAVVGAGLVYWFVWVMGAAEVKGKRAVDLKMGSITRDKVQDKYTQYWSFFRRPKETATTAASAEKVPAFVDTFYNLVTDIYEWGWGQSFHFSPSLPGRSHRDATRVHEERVADLLGARPGHRLLDVGCGVGGPMRAIAAHSGIQRRRHHHQRVPGEPRPRAQPQGRPRLPALRGRLRQLPLHAVPGRLLRRRLLHRGHLPRAQAAGRVRRGLPRAQAGGTLRLLRVGHHPAVPRRGPGPRRVHPRHRARRRATGAPPPGRDRVHR

SEQ ID NO: 27192 - protein, 250 aa, Zea mays subsp. mays
  peptide (1)..(250): Ceres Seq. ID no. 13495157
  misc_feature (63)..(123): Pfam Name: Pfam Description:  ubiE/COQ5 methyltransferase family
  misc_feature (1)..(127): NCBI GI NO: 7443717 NR Description: probable sterol 24-C-methyltransferase (EC2
  misc_feature (1)..(126): NCBI GI NO: 21555010 NR Description: sterol-C-methyltransferase [Arabidopsis thaliana]
  misc_feature (1)..(127): NCBI GI NO: 3560533 NR Description: 24-methylene lophenol C24(1)methyltransferase
  misc_feature (58)..(127): NCBI GI NO: 14192727 NR Description: S-adenosyl methionine:sterol methyl transferase
  misc_feature (55)..(126): NCBI GI NO: 7443720 NR Description: probable sterol 24-C-methyltransferase (EC2
  misc_feature (58)..(127): NCBI GI NO: 12642580 NR Description: sterol methyl transferase
  misc_feature (1)..(126): NCBI GI NO: 7443718 NR Description: probable sterol 24-C-methyltransferase (EC2
  misc_feature (55)..(126): NCBI GI NO: 1872473 NR Description: delta-24-sterol methyltransferase
  misc_feature (55)..(126): NCBI GI NO: 7489677 NR Description: probable sterol 24-C-methyltransferase (EC2
  misc_feature (1)..(126): NCBI GI NO: 1061040 NR Description: sterol-C-methyltransferase [Arabidopsis thaliana]
MGAAEVKGKRAVDLKMGSITRDKVQDKYTQYWSFFRRPKETATTAASAEKVPAFVDTFYNLVTDIYEWGWGQSFHFSPSLPGRSHRDATRVHEERVADLLGARPGHRLLDVGCGVGGPMRAIAAHSGIQRRRHHHQRVPGEPRPRAQPQGRPRLPALRGRLRQLPLHAVPGRLLRRRLLHRGHLPRAQAAGRVRRGLPRAQAGGTLRLLRVGHHPAVPRRGPGPRRVHPRHRARRRATGAPPPGRDRVHR

SEQ ID NO: 27193 - DNA, 1681 bp, Zea mays subsp. mays
  misc_feature (1)..(1681): Ceres Seq. ID no. 13498741
atctattgaactccactcacagacagcagccacagcggagcttaattagcaatcattgactatgggtgcgctcttgccatggctggcatggttgctcgtctccctcgtcggcgtctacctcctcggccatctcgtgcaggcccgtcgtcgtcgtggtctaccgccgggaccccacccgctgcccatcatcggcagcctccacctgctcggtaaccaaccgcaccgctccctcgccaggctcgccaagacccacggcccgctcgtgtcgctccgcctgggctcggtgaccacggtggtcgcctcctccccggccgccgcccgggagatcctgcagcggcacgacgccgccttcagcaacaggtccgtgccggacgccccgggcgcccacgccaggaactccacggtgtggctgcccaacgcgccgcgctggcgcgcgctgcggaagatcatgggcacgcagctgttcgcgccgcacaggctggacgcgctccagcacctccggcgcgacaaggcgcgggagctcgtggaccacgtgcggcggctggcgcgcaggggcgagcccgtgaacgtcggccgcgtcgccttcaccaccagcctcaacctcgtctcgcgcaccatcttctcccgcgacctggccagcctcgaggacgacggcgcgtccaggaagttccaggaggtggtgacggacatcatggaggccgtgggcagccccaacgtctccgacttcttcccggcgctcgccgttgccgacctgcagggctgccggcgtcggctggcgcggctgttcgcgcggctgcaccggatcttcgacgaagagatcgacgcgaggctgcgtggccgcgacgctggcgagcccaagaagaacgacttcctcgacctgctgctggacgccgcagaggacgatgacaacacggccggcctggatcgcgacacgctccgttcactcttcacggacttgttttctgctgggagtgacacaagctccagctcagtggaatgggcaatggtggagctgcttcgaagccccggcttcaatggctaaagcatgcgacgagcttgcaacagtcatcggcccaagaaaagacatcgaggaatctgatattgggcggctgccctacctccaagccgtggtgaaagagaccttcaggctgcatcctgctgccccgctgttgctaccgcggcgtgcccaggccgacgtgaagatgatgggctacgtgattcccgaaggttctcgagtgttcgtaaacgtatgggcgatgggtcgagacgaggagacgtggcctgagcctgagaagtttttgcccgagaggttcctggggaagaagacgcagcaggcggttgatctcaggggcggggacttcgatctcatcccgttcggtggaggacgccggatctgccctgggatgccgctggcgatcaggatggtgcatctgctgcttgcgtcgctcttgaatcagtttgcatggaggcttccggctgagctagagaggaatggagttgacatggctgagaatttcggcatcacgttgaccaaggccgtgcctctttgtgctatagccacagagatctgagtcggcaagctattctattctagttaactattctatggtcgatatatgtacatgtatccttatcaaatttcgaaataaacttagcaaataggttagaggatgtttggttc

SEQ ID NO: 27194 - protein, 326 aa, Zea mays subsp. mays
  peptide (1)..(326): Ceres Seq. ID no. 13498742
  misc_feature (34)..(326): Pfam Name: Pfam Description:  Cytochrome P450
  misc_feature (1)..(326): NCBI GI NO: 37531412 NR Description: putative cytochrome P450
  misc_feature (4)..(326): NCBI GI NO: 37531380 NR Description: putative Cytochrome P450
  misc_feature (5)..(322): NCBI GI NO: 37531420 NR Description: putative cytochrome P450
  misc_feature (3)..(308): NCBI GI NO: 37531420 NR Description: putative cytochrome P450
  misc_feature (27)..(322): NCBI GI NO: 17065916 NR Description: geraniol 10-hydroxylase [Catharanthus roseus]
  misc_feature (4)..(322): NCBI GI NO: 7406712 NR Description: putative ripening-related P-450 enzyme
  misc_feature (3)..(322): NCBI GI NO: 15225512 NR Description: cytochrome p450 family [Arabidopsis thaliana]
  misc_feature (18)..(322): NCBI GI NO: 27529728 NR Description: cytochrome P450 [Petunia x hybrida]
  misc_feature (7)..(322): NCBI GI NO: 33320161 NR Description: cytochrome P450 [Pastinaca sativa]
  misc_feature (11)..(322): NCBI GI NO: 3929333 NR Description: Cytochrome P450 76B1
MGALLPWLAWLLVSLVGVYLLGHLVQARRRRGLPPGPHPLPIIGSLHLLGNQPHRSLARLAKTHGPLVSLRLGSVTTVVASSPAAAREILQRHDAAFSNRSVPDAPGAHARNSTVWLPNAPRWRALRKIMGTQLFAPHRLDALQHLRRDKARELVDHVRRLARRGEPVNVGRVAFTTSLNLVSRTIFSRDLASLEDDGASRKFQEVVTDIMEAVGSPNVSDFFPALAVADLQGCRRRLARLFARLHRIFDEEIDARLRGRDAGEPKKNDFLDLLLDAAEDDDNTAGLDRDTLRSLFTDLFSAGSDTSSSSVEWAMVELLRSPGFNG

SEQ ID NO: 27195 - protein, 222 aa, Zea mays subsp. mays
  peptide (1)..(222): Ceres Seq. ID no. 13498743
  misc_feature (42)..(217): Pfam Name: Pfam Description:  Cytochrome P450
  misc_feature (42)..(219): NCBI GI NO: 37531412 NR Description: putative cytochrome P450
  misc_feature (44)..(220): NCBI GI NO: 37531380 NR Description: putative Cytochrome P450
  misc_feature (42)..(211): NCBI GI NO: 37531420 NR Description: putative cytochrome P450
  misc_feature (14)..(222): NCBI GI NO: 17065916 NR Description: geraniol 10-hydroxylase [Catharanthus roseus]
  misc_feature (42)..(222): NCBI GI NO: 7406712 NR Description: putative ripening-related P-450 enzyme
  misc_feature (42)..(218): NCBI GI NO: 15225512 NR Description: cytochrome p450 family [Arabidopsis thaliana]
  misc_feature (42)..(212): NCBI GI NO: 27529728 NR Description: cytochrome P450 [Petunia x hybrida]
  misc_feature (42)..(220): NCBI GI NO: 33320161 NR Description: cytochrome P450 [Pastinaca sativa]
  misc_feature (42)..(218): NCBI GI NO: 3929333 NR Description: Cytochrome P450 76B1
  misc_feature (42)..(218): NCBI GI NO: 7430634 NR Description: cytochrome P450 76B1
MTTRPAWIATRSVHSSRTCFLLGVTQAPAQWNGQWWSCFEAPASMAKACDELATVIGPRKDIEESDIGRLPYLQAVVKETFRLHPAAPLLLPRRAQADVKMMGYVIPEGSRVFVNVWAMGRDEETWPEPEKFLPERFLGKKTQQAVDLRGGDFDLIPFGGGRRICPGMPLAIRMVHLLLASLLNQFAWRLPAELERNGVDMAENFGITLTKAVPLCAIATEI

SEQ ID NO: 27196 - protein, 197 aa, Zea mays subsp. mays
  peptide (1)..(197): Ceres Seq. ID no. 13498744
  misc_feature (1)..(197): Pfam Name: Pfam Description:  Cytochrome P450
  misc_feature (1)..(197): NCBI GI NO: 37531412 NR Description: putative cytochrome P450
  misc_feature (1)..(197): NCBI GI NO: 37531380 NR Description: putative Cytochrome P450
  misc_feature (1)..(193): NCBI GI NO: 37531420 NR Description: putative cytochrome P450
  misc_feature (1)..(179): NCBI GI NO: 37531420 NR Description: putative cytochrome P450
  misc_feature (1)..(193): NCBI GI NO: 17065916 NR Description: geraniol 10-hydroxylase [Catharanthus roseus]
  misc_feature (1)..(193): NCBI GI NO: 7406712 NR Description: putative ripening-related P-450 enzyme
  misc_feature (1)..(193): NCBI GI NO: 15225512 NR Description: cytochrome p450 family [Arabidopsis thaliana]
  misc_feature (1)..(193): NCBI GI NO: 27529728 NR Description: cytochrome P450 [Petunia x hybrida]
  misc_feature (1)..(193): NCBI GI NO: 33320161 NR Description: cytochrome P450 [Pastinaca sativa]
  misc_feature (1)..(193): NCBI GI NO: 3929333 NR Description: Cytochrome P450 76B1
MGTQLFAPHRLDALQHLRRDKARELVDHVRRLARRGEPVNVGRVAFTTSLNLVSRTIFSRDLASLEDDGASRKFQEVVTDIMEAVGSPNVSDFFPALAVADLQGCRRRLARLFARLHRIFDEEIDARLRGRDAGEPKKNDFLDLLLDAAEDDDNTAGLDRDTLRSLFTDLFSAGSDTSSSSVEWAMVELLRSPGFNG

SEQ ID NO: 27197 - DNA, 1421 bp, Zea mays subsp. mays
  misc_feature (1)..(1421): Ceres Seq. ID no. 12405097
gaagctagaggctctctggcgccgacggtcgacccacacgcgcgtccagcgatttcgccggggggagatcttgccattccgtggagcaccatccgcggtagcctagccgcgactggagatcggggcttgcgggccgtggagccacccaagaaggtagccgcgaaaatcttgatccggccggggacggggcctttggaggttcgtccctcgatcgggtgtcgtctgcgaaagccgggtcgaacaaatcgtcgcgactggaggcggcgcgggggcatgggggcgtgggtctcggtcctgctcgggatggacggagccgcggcggccgggcctgctgctgtgggcctgggcgacctgccggagctctgcgccgcccaggtgctgctccggctcgacccgccggagatctgcaggctcgcgcaggtcaaccacgcgttccgcggcgccgcgggggctgacttcgtgtgggaagccaagctgccggagaactacagctacctgatggagttcgtggggagcggcgacgaggggaggcggaggcggcggcggaccgggaagaaggagatctacgcgaggctcgccaggcctgtgcctttttgtgacggcaagaaggaattctggttggacaagaacaaaggcatgatctgtatggcactgtcgtccaaagcactggtgattactgggattgatgacagaagatactggcaacacatgccaacttcagaatcgagattccagtctgtagcctaccttcagcaaatctggtggtttgaggtggttggtgaagtcgatttctgcttccctgttggaacatatagcttgtacttcagggtccatcttgggaagttctacagacgatttggccgccgccagtgcacctcagagcatgttcatggttgggacaagaagcctgttcgcttccagctatcgacctctgacgggcagcaggcattgtctcagtgctacctggaggagcccgggagctgggtcctgtaccatgctggcgattttgtggcctcaaagcctgaccagctgatgaagctgaagttctccatggcacagatcgactgcacgcacacaaaaggcggactgtgcatcgactcggttcttatctatccaaaagggaaggggtttcaccaggagagggtggtcaggtctcagaaatgagggttgtagatgttgtggaggtactcacattaggatgttagagcaaatgcagcttgcagcctgatcttatttttactttgggctctagttcgcagcagaggtgaagtgtatgtggttgtagaactcaggtattgtgtggtcaggtgaccaccagagtgctctgtcagtcctttggcaaggtcgttttcgccccccttcagctgaatttggacagcgagatagccatgaaactgtactgaaatgagttcgaaggtgcc

SEQ ID NO: 27198 - protein, 387 aa, Zea mays subsp. mays
  peptide (1)..(387): Ceres Seq. ID no. 12405098
  misc_feature (115)..(160): Pfam Name: Pfam Description:  F-box domain
  misc_feature (92)..(387): NCBI GI NO: 37536186 NR Description: unknown protein
  misc_feature (118)..(374): NCBI GI NO: 38567911 NR Description: OSJNBa0088I22.7
  misc_feature (115)..(373): NCBI GI NO: 23397334 NR Description: unknown protein [Arabidopsis thaliana]
  misc_feature (115)..(373): NCBI GI NO: 30695337 NR Description: F-box protein (lectin-related)
  misc_feature (114)..(372): NCBI GI NO: 15222051 NR Description: hypothetical protein; protein id: At1g12710.1
  misc_feature (114)..(372): NCBI GI NO: 15221677 NR Description: unknown protein; protein id: At1g63090.1
  misc_feature (92)..(374): NCBI GI NO: 15231726 NR Description: putative protein; protein id: At3g53000.1
  misc_feature (114)..(372): NCBI GI NO: 15242282 NR Description: putative protein; protein id: At5g52120
  misc_feature (198)..(372): NCBI GI NO: 27754673 NR Description: unknown protein [Arabidopsis thaliana]
  misc_feature (118)..(283): NCBI GI NO: 15226908 NR Description: putative phloem-specific lectin
EARGSLAPTVDPHARPAISPGGDLAIPWSTIRGSLAATGDRGLRAVEPPKKVAAKILIRPGTGPLEVRPSIGCRLRKPGRTNRRDWRRRGGMGAWVSVLLGMDGAAAAGPAAVGLGDLPELCAAQVLLRLDPPEICRLAQVNHAFRGAAGADFVWEAKLPENYSYLMEFVGSGDEGRRRRRRTGKKEIYARLARPVPFCDGKKEFWLDKNKGMICMALSSKALVITGIDDRRYWQHMPTSESRFQSVAYLQQIWWFEVVGEVDFCFPVGTYSLYFRVHLGKFYRRFGRRQCTSEHVHGWDKKPVRFQLSTSDGQQALSQCYLEEPGSWVLYHAGDFVASKPDQLMKLKFSMAQIDCTHTKGGLCIDSVLIYPKGKGFHQERVVRSQK

SEQ ID NO: 27199 - protein, 296 aa, Zea mays subsp. mays
  peptide (1)..(296): Ceres Seq. ID no. 12405099
  misc_feature (24)..(69): Pfam Name: Pfam Description:  F-box domain
  misc_feature (1)..(296): NCBI GI NO: 37536186 NR Description: unknown protein
  misc_feature (27)..(283): NCBI GI NO: 38567911 NR Description: OSJNBa0088I22.7
  misc_feature (24)..(282): NCBI GI NO: 23397334 NR Description: unknown protein [Arabidopsis thaliana]
  misc_feature (24)..(282): NCBI GI NO: 30695337 NR Description: F-box protein (lectin-related)
  misc_feature (23)..(281): NCBI GI NO: 15222051 NR Description: hypothetical protein; protein id: At1g12710.1
  misc_feature (23)..(281): NCBI GI NO: 15221677 NR Description: unknown protein; protein id: At1g63090.1
  misc_feature (1)..(283): NCBI GI NO: 15231726 NR Description: putative protein; protein id: At3g53000.1
  misc_feature (23)..(281): NCBI GI NO: 15242282 NR Description: putative protein; protein id: At5g52120
  misc_feature (107)..(281): NCBI GI NO: 27754673 NR Description: unknown protein [Arabidopsis thaliana]
  misc_feature (27)..(192): NCBI GI NO: 15226908 NR Description: putative phloem-specific lectin
MGAWVSVLLGMDGAAAAGPAAVGLGDLPELCAAQVLLRLDPPEICRLAQVNHAFRGAAGADFVWEAKLPENYSYLMEFVGSGDEGRRRRRRTGKKEIYARLARPVPFCDGKKEFWLDKNKGMICMALSSKALVITGIDDRRYWQHMPTSESRFQSVAYLQQIWWFEVVGEVDFCFPVGTYSLYFRVHLGKFYRRFGRRQCTSEHVHGWDKKPVRFQLSTSDGQQALSQCYLEEPGSWVLYHAGDFVASKPDQLMKLKFSMAQIDCTHTKGGLCIDSVLIYPKGKGFHQERVVRSQK

SEQ ID NO: 27200 - protein, 286 aa, Zea mays subsp. mays
  peptide (1)..(286): Ceres Seq. ID no. 12405100
  misc_feature (14)..(59): Pfam Name: Pfam Description:  F-box domain
  misc_feature (1)..(286): NCBI GI NO: 37536186 NR Description: unknown protein
  misc_feature (17)..(273): NCBI GI NO: 38567911 NR Description: OSJNBa0088I22.7
  misc_feature (14)..(272): NCBI GI NO: 23397334 NR Description: unknown protein [Arabidopsis thaliana]
  misc_feature (14)..(272): NCBI GI NO: 30695337 NR Description: F-box protein (lectin-related)
  misc_feature (13)..(271): NCBI GI NO: 15222051 NR Description: hypothetical protein; protein id: At1g12710.1
  misc_feature (13)..(271): NCBI GI NO: 15221677 NR Description: unknown protein; protein id: At1g63090.1
  misc_feature (1)..(273): NCBI GI NO: 15231726 NR Description: putative protein; protein id: At3g53000.1
  misc_feature (13)..(271): NCBI GI NO: 15242282 NR Description: putative protein; protein id: At5g52120
  misc_feature (97)..(271): NCBI GI NO: 27754673 NR Description: unknown protein [Arabidopsis thaliana]
  misc_feature (17)..(182): NCBI GI NO: 15226908 NR Description: putative phloem-specific lectin
MDGAAAAGPAAVGLGDLPELCAAQVLLRLDPPEICRLAQVNHAFRGAAGADFVWEAKLPENYSYLMEFVGSGDEGRRRRRRTGKKEIYARLARPVPFCDGKKEFWLDKNKGMICMALSSKALVITGIDDRRYWQHMPTSESRFQSVAYLQQIWWFEVVGEVDFCFPVGTYSLYFRVHLGKFYRRFGRRQCTSEHVHGWDKKPVRFQLSTSDGQQALSQCYLEEPGSWVLYHAGDFVASKPDQLMKLKFSMAQIDCTHTKGGLCIDSVLIYPKGKGFHQERVVRSQK

SEQ ID NO: 27201 - DNA, 1450 bp, Zea mays subsp. mays
  misc_feature (1)..(1450): Ceres Seq. ID no. 12373657
gcacgagaccattacctagaacatcctaatcgaaaactcactccaaagccaacaaacagagctccaactcagaaagcatccgtcccttggcagcagcaacaagctactagctatgtgtgtttacagcgagcgaggggaaaaaaaagaaaacatctaagatatactccatcatcttcgtttgattaacccgcccagtaaagccatgggtactaatgatagagcggtcatttctctagtactcctcgtgtgcatcgctagccgctcgtccttgggtgccgctgaaactgacgttgagcagaagcgctcgtcagtcccgttgatgtttgtgttcggtgattcgctggtcgatgtcggaaacaataacttcctgccgccgcctgcaccccgtgctgcatctccgtacggcatcgacttccctgctggcacccccggcgccgtctcaggacggttcacgaatggctacaaccttgccgatttagtcgcgcgacgtctggggttcaagatgagtccacctgcttacctctcgttgacaccgttatcaaagtttgacctgttcacgtgccgaattggtgccaattacgcgtctggcggatctggcattctcaacaccacgggaaacgggacactcacgctgcagaaacaaatcacgctgttctcgaaaactaaagcaagaatgtcgtggggccgctgcaagctcagctctatggtatcgaggtcgttgttccttatcagcgccggcggcaatgacttctccgccttcagtgaaatgggcatgggcgaacaagacgccccagcctacatcagtagcatggtctcaacctatgtccagcatatcgacgcgttgtacaagttgggagcacggaggttggggatcctagacgtgccagcgatcggctgtaccccaggctccagagtccccatggccaacggcggatgcaacgacgctgccaactctatggcgcagaacttcaacaaactcctaaggctcgaggtggcgaaagccgtcgcatcctccatgcccggcatgagatactccattgcaagcacctacaattttgtcaccgacttgatggacagccatctagtggctgggctccgggtggtcgacagggcatgctgcggatcgggaaaactgaacgccgcggtcatgtgcgcccagccaaacacgacttactgttcggatcgcgacgactacatgttctgggacatgctacatcctacgcaggcaacaaatgaacgtggggtggtcgccatcttctacggcccgcaggagtacgcggatcccatcaactttgcacagttggccgctgccacagcaaatgatgatgatgatataaatactgctatggccgcaggcgtctatgccgccatatgataaaccctatttatgtcgattggcatgcagctgcgacatgtcactacctgagtactatatacgtaattcagttgg

SEQ ID NO: 27202 - protein, 390 aa, Zea mays subsp. mays
  peptide (1)..(390): Ceres Seq. ID no. 12373658
  misc_feature (40)..(345): Pfam Name: Pfam Description:  GDSL-like Lipase/Acylhydrolase
  misc_feature (6)..(368): NCBI GI NO: 38345853 NR Description: OSJNBa0084K11.17
  misc_feature (2)..(369): NCBI GI NO: 29837765 NR Description: putative GDSL-like lipase/acylhydrolase
  misc_feature (20)..(367): NCBI GI NO: 38345537 NR Description: OSJNBa0020J04.12
  misc_feature (9)..(369): NCBI GI NO: 15235421 NR Description: Proline-rich APG - like protein
  misc_feature (32)..(345): NCBI GI NO: 13174242 NR Description: putative proline-rich protein [Oryza sativa]
  misc_feature (1)..(369): NCBI GI NO: 15240452 NR Description: GDSL-motif lipase/hydrolase-like protein
  misc_feature (8)..(345): NCBI GI NO: 30693137 NR Description: lipase family [Arabidopsis thaliana]
  misc_feature (8)..(345): NCBI GI NO: 21537293 NR Description: GDSL-motif lipase/hydrolase-like protein
  misc_feature (11)..(367): NCBI GI NO: 15227849 NR Description: putative GDSL-motif lipase/hydrolase
  misc_feature (8)..(368): NCBI GI NO: 18398991 NR Description: unknown protein; protein id: At1g33811
MGTNDRAVISLVLLVCIASRSSLGAAETDVEQKRSSVPLMFVFGDSLVDVGNNNFLPPPAPRAASPYGIDFPAGTPGAVSGRFTNGYNLADLVARRLGFKMSPPAYLSLTPLSKFDLFTCRIGANYASGGSGILNTTGNGTLTLQKQITLFSKTKARMSWGRCKLSSMVSRSLFLISAGGNDFSAFSEMGMGEQDAPAYISSMVSTYVQHIDALYKLGARRLGILDVPAIGCTPGSRVPMANGGCNDAANSMAQNFNKLLRLEVAKAVASSMPGMRYSIASTYNFVTDLMDSHLVAGLRVVDRACCGSGKLNAAVMCAQPNTTYCSDRDDYMFWDMLHPTQATNERGVVAIFYGPQEYADPINFAQLAAATANDDDDINTAMAAGVYAAI

SEQ ID NO: 27203 - protein, 351 aa, Zea mays subsp. mays
  peptide (1)..(351): Ceres Seq. ID no. 12373659
  misc_feature (1)..(306): Pfam Name: Pfam Description:  GDSL-like Lipase/Acylhydrolase
  misc_feature (1)..(329): NCBI GI NO: 38345853 NR Description: OSJNBa0084K11.17
  misc_feature (1)..(330): NCBI GI NO: 29837765 NR Description: putative GDSL-like lipase/acylhydrolase
  misc_feature (1)..(328): NCBI GI NO: 38345537 NR Description: OSJNBa0020J04.12
  misc_feature (1)..(330): NCBI GI NO: 15235421 NR Description: Proline-rich APG - like protein
  misc_feature (1)..(306): NCBI GI NO: 13174242 NR Description: putative proline-rich protein [Oryza sativa]
  misc_feature (1)..(330): NCBI GI NO: 15240452 NR Description: GDSL-motif lipase/hydrolase-like protein
  misc_feature (1)..(306): NCBI GI NO: 30693137 NR Description: lipase family [Arabidopsis thaliana]
  misc_feature (1)..(306): NCBI GI NO: 21537293 NR Description: GDSL-motif lipase/hydrolase-like protein
  misc_feature (1)..(328): NCBI GI NO: 15227849 NR Description: putative GDSL-motif lipase/hydrolase
  misc_feature (1)..(329): NCBI GI NO: 18398991 NR Description: unknown protein; protein id: At1g33811
MFVFGDSLVDVGNNNFLPPPAPRAASPYGIDFPAGTPGAVSGRFTNGYNLADLVARRLGFKMSPPAYLSLTPLSKFDLFTCRIGANYASGGSGILNTTGNGTLTLQKQITLFSKTKARMSWGRCKLSSMVSRSLFLISAGGNDFSAFSEMGMGEQDAPAYISSMVSTYVQHIDALYKLGARRLGILDVPAIGCTPGSRVPMANGGCNDAANSMAQNFNKLLRLEVAKAVASSMPGMRYSIASTYNFVTDLMDSHLVAGLRVVDRACCGSGKLNAAVMCAQPNTTYCSDRDDYMFWDMLHPTQATNERGVVAIFYGPQEYADPINFAQLAAATANDDDDINTAMAAGVYAAI

SEQ ID NO: 27204 - protein, 290 aa, Zea mays subsp. mays
  peptide (1)..(290): Ceres Seq. ID no. 12373660
  misc_feature (1)..(245): Pfam Name: Pfam Description:  GDSL-like Lipase/Acylhydrolase
  misc_feature (1)..(268): NCBI GI NO: 38345853 NR Description: OSJNBa0084K11.17
  misc_feature (1)..(269): NCBI GI NO: 29837765 NR Description: putative GDSL-like lipase/acylhydrolase
  misc_feature (1)..(267): NCBI GI NO: 38345537 NR Description: OSJNBa0020J04.12
  misc_feature (1)..(269): NCBI GI NO: 15235421 NR Description: Proline-rich APG - like protein
  misc_feature (1)..(245): NCBI GI NO: 13174242 NR Description: putative proline-rich protein [Oryza sativa]
  misc_feature (1)..(269): NCBI GI NO: 15240452 NR Description: GDSL-motif lipase/hydrolase-like protein
  misc_feature (1)..(245): NCBI GI NO: 30693137 NR Description: lipase family [Arabidopsis thaliana]
  misc_feature (1)..(245): NCBI GI NO: 21537293 NR Description: GDSL-motif lipase/hydrolase-like protein
  misc_feature (1)..(267): NCBI GI NO: 15227849 NR Description: putative GDSL-motif lipase/hydrolase
  misc_feature (1)..(268): NCBI GI NO: 18398991 NR Description: unknown protein; protein id: At1g33811
MSPPAYLSLTPLSKFDLFTCRIGANYASGGSGILNTTGNGTLTLQKQITLFSKTKARMSWGRCKLSSMVSRSLFLISAGGNDFSAFSEMGMGEQDAPAYISSMVSTYVQHIDALYKLGARRLGILDVPAIGCTPGSRVPMANGGCNDAANSMAQNFNKLLRLEVAKAVASSMPGMRYSIASTYNFVTDLMDSHLVAGLRVVDRACCGSGKLNAAVMCAQPNTTYCSDRDDYMFWDMLHPTQATNERGVVAIFYGPQEYADPINFAQLAAATANDDDDINTAMAAGVYAAI

SEQ ID NO: 27205 - DNA, 3550 bp, Zea mays subsp. mays
  misc_feature (1)..(3550): Ceres Seq. ID no. 12404984
gcacgagaccattacctagaacatcctaatcgaaaagccacgctaccaccgcttcctttcctcttcggctgctccgcctcgcctcccagttcacagcccctcccaggctccgaatcggcggccacttctcattcctcacttccgtcctcgcgcaccaccccctccatccgttccggatggtgccttcggaatcccgtccggcgccctagcgtagctcgggctcggccaggctccgggcccgccgcgccgttccgcagtccagctccacctccagtggttactagtggaagtttagcacactgattccgtcatagtgggatccttgccaaatgaagtgtccatccaaccaacccaactaactgtactgaaatctcattgctttcagaatggtacggttagtaaattgaggttggtggtgggttggtggccatactaggggaagatcttttcttgagtttaaggaagatgcttgcctttatttgagaaggccctttttggtacgtcagcagtgttctttcctataggagtaaatgccattccgtagcatcgtgcgtgatgtaagggatggtttcgggagcttgtctaggaggggatttgaggtcaggtttctgagtcatcgcagagggaaatctcatggtgctgtccatgagctgcacgacccagtgcttgtggtacagagtagctgctgggctagcttgcctcctgaattacttcgagatgtgattgagaggttggagaccagtgaggatacatggccttctaggaaacatgtagttgcttgtgcagctgtctgcagaacatggagagagatgtgtagagagattgtcaagagcccagagttttctggaaaaatcacttttcctgtttccttgaagcagcctgggcctcgagatggaactattcagtgttttattaagagggataaatctacccaaatctacagtctgtaccttagttttagctctgccgtgcctgtcgaaaatggcaaattccttctatccgcaaaaaggaactgccgtgcaacatatacagaatatataatatcaataaattctggtgatacatctaggtgtacaagtaacaacacatacattgggaaattaaggtcaaatttccttggcacaaaatttgtaatatacgatactcatccgccatacaatggaactagtcaaacagtggcagggaaaacaagtcagagattctactccaagaagggatcaaccaaggtttcttgcaggtggtacagtattgcacaaatctcatacgagctgaatgtcttgggaactcgaggcccaaggcggatgaactgtgtaatgcactccatcccagcttcatgccttgaggctggtggcagtgtcccttgccagccggacagcattgcagcccactctgttggcggatcattcagcagtgtgtccttgtcaaagtcatcgactatggaccactctatgcatttcaccagttcccggctctctgatgccataacaggagatggcattgtgaacagaggccaggcattgaatgatgctgacgatgaagagtgcaaggacatgcctttgatcctccgcaacaaggccccaaggtggcacgagcagcttcagtgctggtgcctcaacttccggggccgggtgactgtcgcctcggtcaagaacttccagctagtcgcggcgacacagcctgccgccggagccctgaccccatcacaggcagccccgcagccagctccgcctcctccgccggaccaagagaaggtcatactgcagtttgggaaggtcggcaaggacatcttcaccatggactactgctacccgctgttagccttccaggccttcgccatctgcctgagcagcttcgacaccaagttggcctgcgaataaatcctacctacaattctggtacctaccaaataatcaaaaacactgattgtcgtggtgttcgtccaagaaccgagtttagctgagacgccattgggcaccatgtgctggtgccttgttaactcagaaacgcgtgggggctgaatctgtttcagcagcttccttgtgataatctgtagctgctgcttcgctgctgttgtatcctatgctttcatttctttccggttccgctgtagcttcttaccccccggtgacattagttcggtacccgtatctggatatttttttagccttcttcgttggattgttcaccggtgatggcatgtattaacagagatagttacatacagatgtaatgaattcatgacatctgatcactcatatgtatcacggaagcatgaggaggataaggtgatcatctttgagagaggagatttggtcttcgtgttcaacttccactggagcaatagctattttgactatcgcgttggttgtttcaagcctgggaagtacaagatcgttttagattctgacgatggccttttcggtggatttattaataaacaccccgttcaaaagtagtcatcgataccagaccatattcaagagcgccactacaaaaatactcctaaaggcttatttcaaggagaaccatccgtcctctagattgctagctacatcaaaattgcacaccatgcttgcaacttcaaacatacattcgcacctagagcttgaggaaaacaaactcttcgatcgctggaatctccccgatcttcgtcagtgtgccattgcttggttcctcatcaacaccaattgccatgacagcatgcttgcgaggagcaattcttccgacactcatgaaactgacattaacattctcctcacccaagacgcttccgactgacccaatcatacctggttgatcaacctgcctgcaaaggatgaggcttccttccaagctcacatccacctggaatgctccaacctttgttagatgaggaacaccatccttcactctgccctccacagtgatctctccagtctcagatatcgcactgggaaatttggactcgacattggcaatctgaacttgaatgtatcacggaagcatgaggaggataaggtgatcatctttgagagaggagatttggtcttcgtgttcaacttccactggagcaatagctattttgactatcgcgttggttgtttcaagcctgggaagtacaagatcgttttagattctgacgatggccttttcggtggatttagtcggcttgatcatgatgctgagtacttcactgctgactggccgcatgacaacaggccgtgttctttctcggtctatgcacccagcagaacagccgtcgtatatgcacctgcaggtgcagaggacgaatagggcacaacagcggttgttggggaagaacttcagagggatgtactgctggtggactgacaccactgccacgcgcgatgctgccagatgttgccctcgagaccacgtggcaggacgatcagctattcaggtggataggttagcttaccgatgagctctcgctttcgagtgactggaaggaaatggacctcgcacaccgcattttcactatgcaatctgaaaatgtaccgtgtggttttgtacatatggatcagtaggcattatatcattcatctctctg

SEQ ID NO: 27206 - protein, 448 aa, Zea mays subsp. mays
  peptide (1)..(448): Ceres Seq. ID no. 12404985
  misc_feature (117)..(448): Pfam Name: Pfam Description:  Tub family
  misc_feature (1)..(448): NCBI GI NO: 15223772 NR Description: Tub family protein, putative; protein id:At1g76900
  misc_feature (1)..(448): NCBI GI NO: 34908598 NR Description: putative tubby protein
  misc_feature (1)..(448): NCBI GI NO: 5777631 NR Description: CAA303719.1 protein [Oryza sativa]
  misc_feature (1)..(448): NCBI GI NO: 32480039 NR Description: OSJNBa0039K24.2
  misc_feature (1)..(448): NCBI GI NO: 15222543 NR Description: F-box containing tubby family protein
  misc_feature (1)..(448): NCBI GI NO: 38637048 NR Description: putative chain A
  misc_feature (1)..(310): NCBI GI NO: 18400968 NR Description: expressed protein; protein id: At1g43640
  misc_feature (291)..(448): NCBI GI NO: 18400968 NR Description: expressed protein; protein id: At1g43640
  misc_feature (18)..(435): NCBI GI NO: 28188613 NR Description: unknown protein [Arabidopsis thaliana]
  misc_feature (18)..(435): NCBI GI NO: 28188595 NR Description: unknown protein [Arabidopsis thaliana]
MPFRSIVRDVRDGFGSLSRRGFEVRFLSHRRGKSHGAVHELHDPVLVVQSSCWASLPPELLRDVIERLETSEDTWPSRKHVVACAAVCRTWREMCREIVKSPEFSGKITFPVSLKQPGPRDGTIQCFIKRDKSTQIYSLYLSFSSAVPVENGKFLLSAKRNCRATYTEYIISINSGDTSRCTSNNTYIGKLRSNFLGTKFVIYDTHPPYNGTSQTVAGKTSQRFYSKKGSTKVSCRWYSIAQISYELNVLGTRGPRRMNCVMHSIPASCLEAGGSVPCQPDSIAAHSVGGSFSSVSLSKSSTMDHSMHFTSSRLSDAITGDGIVNRGQALNDADDEECKDMPLILRNKAPRWHEQLQCWCLNFRGRVTVASVKNFQLVAATQPAAGALTPSQAAPQPAPPPPPDQEKVILQFGKVGKDIFTMDYCYPLLAFQAFAICLSSFDTKLACE

SEQ ID NO: 27207 - protein, 355 aa, Zea mays subsp. mays
  peptide (1)..(355): Ceres Seq. ID no. 12404986
  misc_feature (24)..(355): Pfam Name: Pfam Description:  Tub family
  misc_feature (1)..(355): NCBI GI NO: 15223772 NR Description: Tub family protein, putative; protein id:At1g76900
  misc_feature (1)..(355): NCBI GI NO: 34908598 NR Description: putative tubby protein
  misc_feature (1)..(355): NCBI GI NO: 5777631 NR Description: CAA303719.1 protein [Oryza sativa]
  misc_feature (1)..(355): NCBI GI NO: 32480039 NR Description: OSJNBa0039K24.2
  misc_feature (1)..(355): NCBI GI NO: 15222543 NR Description: F-box containing tubby family protein
  misc_feature (1)..(355): NCBI GI NO: 38637048 NR Description: putative chain A
  misc_feature (1)..(217): NCBI GI NO: 18400968 NR Description: expressed protein; protein id: At1g43640
  misc_feature (198)..(355): NCBI GI NO: 18400968 NR Description: expressed protein; protein id: At1g43640
  misc_feature (1)..(342): NCBI GI NO: 28188613 NR Description: unknown protein [Arabidopsis thaliana]
  misc_feature (1)..(342): NCBI GI NO: 28188595 NR Description: unknown protein [Arabidopsis thaliana]
MCREIVKSPEFSGKITFPVSLKQPGPRDGTIQCFIKRDKSTQIYSLYLSFSSAVPVENGKFLLSAKRNCRATYTEYIISINSGDTSRCTSNNTYIGKLRSNFLGTKFVIYDTHPPYNGTSQTVAGKTSQRFYSKKGSTKVSCRWYSIAQISYELNVLGTRGPRRMNCVMHSIPASCLEAGGSVPCQPDSIAAHSVGGSFSSVSLSKSSTMDHSMHFTSSRLSDAITGDGIVNRGQALNDADDEECKDMPLILRNKAPRWHEQLQCWCLNFRGRVTVASVKNFQLVAATQPAAGALTPSQAAPQPAPPPPPDQEKVILQFGKVGKDIFTMDYCYPLLAFQAFAICLSSFDTKLACE

SEQ ID NO: 27208 - DNA, 1398 bp, Zea mays subsp. mays
  misc_feature (1)..(1398): Ceres Seq. ID no. 12386788
ctcgatcatctcccatcacttcctagctagtcgttcttactcaacacattattcgatcttgagtggaagcaaagcaggcagacatggcggcggctactgcaccaaagacgatgccgtcgtccgttttcgccgccgcactgctgctcctagccgcggcggcgtgccaggccagcccttactaccctctggagctagggtactaccgttacacttgtccccaggccgaggctatcgtcaaggccagcatggagaaggccatcgctcagaaccctggcaatggcgccgccgtcatccgcatgctcttccatgactgcttcgtcgagggctgcgacgcttccgtgcttctcgacccgaccccgttcagcccgacgccggagaagctggccgcacccaacaacccgagcctgcgcgggttcgagctgatcgacgccatcaaggacgccctcgaggccgcgtgccccggggtcgtctcctgcgccgacatcatcgccttcgcggcgcgcgacgcgtcctgcttcctgagccagggcaaggtctccttcgacatgccgtcgggccgcctcgacggcaccttctccaacgcctccgagtcggtcaagttcctcgtcccgcccacgtccaacctcagcgacctcgcctccagcttcgccgtcaagggcatgtcgctggaggacctggtcgtcctctccggcgcgcacaccgtcggccgctcccactgctcctccttcgtctccgaccgcctcgacgtcccctccgacatcaaccctgcgctggccgccttcctcaggacccgctgcccgcccaacacgaccaccagcgacgaccccaccgtgatgcaggacgtggtcacgcccaacgccatggacatccagtactacaagaacgtgctctcgcacaccgtgctcttcacctccgacgccgcgctcctcacgtcgccggagacggccaagttggtgctggacaacgccaagatccccgggtggtgggaggacaagttcgagaaggccatggtcaagatggctagcctcgaagtcaagactgggcaccaaggacaagtcaggaagaactgcagggcgatcaatcactactagctaacagctggttgttgatcagcttgcaccactgcaatgtggaagaccttcagaaaagaaaaactgcacagtacgggtgatggatggtgaaggatcaatcggttcagttgtgttggtgtttaatttgttcatgacctgcaagagtgtggtttgttgtgtatgatatggcaactgttgttattatctttccatttgcctttgatttgttgaaaacctggagaggtttgtatctgctattattctttggtttgtgtttctatatttggattataaaataaagttgaatatataagtgttcagttctttt

SEQ ID NO: 27209 - protein, 335 aa, Zea mays subsp. mays
  peptide (1)..(335): Ceres Seq. ID no. 12386789
  misc_feature (51)..(297): Pfam Name: Pfam Description:  Peroxidase
  misc_feature (1)..(335): NCBI GI NO: 12056450 NR Description: peroxidase [Zea mays]
  misc_feature (4)..(334): NCBI GI NO: 12039355 NR Description: putative peroxidase [Oryza sativa]
  misc_feature (12)..(334): NCBI GI NO: 34896266 NR Description: putative peroxidase [Oryza sativa]
  misc_feature (1)..(333): NCBI GI NO: 34896268 NR Description: putative peroxidase [Oryza sativa]
  misc_feature (17)..(334): NCBI GI NO: 34896944 NR Description: putative peroxidase [Oryza sativa]
  misc_feature (6)..(333): NCBI GI NO: 12039346 NR Description: putative peroxidase [Oryza sativa]
  misc_feature (16)..(333): NCBI GI NO: 12039354 NR Description: putative peroxidase [Oryza sativa]
  misc_feature (16)..(333): NCBI GI NO: 12039335 NR Description: putative peroxidase [Oryza sativa]
  misc_feature (18)..(333): NCBI GI NO: 27261094 NR Description: putative peroxidase
  misc_feature (35)..(333): NCBI GI NO: 27261097 NR Description: putative peroxidase
MAAATAPKTMPSSVFAAALLLLAAAACQASPYYPLELGYYRYTCPQAEAIVKASMEKAIAQNPGNGAAVIRMLFHDCFVEGCDASVLLDPTPFSPTPEKLAAPNNPSLRGFELIDAIKDALEAACPGVVSCADIIAFAARDASCFLSQGKVSFDMPSGRLDGTFSNASESVKFLVPPTSNLSDLASSFAVKGMSLEDLVVLSGAHTVGRSHCSSFVSDRLDVPSDINPALAAFLRTRCPPNTTTSDDPTVMQDVVTPNAMDIQYYKNVLSHTVLFTSDAALLTSPETAKLVLDNAKIPGWWEDKFEKAMVKMASLEVKTGHQGQVRKNCRAINHY

SEQ ID NO: 27210 - protein, 326 aa, Zea mays subsp. mays
  peptide (1)..(326): Ceres Seq. ID no. 12386790
  misc_feature (42)..(288): Pfam Name: Pfam Description:  Peroxidase
  misc_feature (1)..(326): NCBI GI NO: 12056450 NR Description: peroxidase [Zea mays]
  misc_feature (1)..(325): NCBI GI NO: 12039355 NR Description: putative peroxidase [Oryza sativa]
  misc_feature (3)..(325): NCBI GI NO: 34896266 NR Description: putative peroxidase [Oryza sativa]
  misc_feature (1)..(324): NCBI GI NO: 34896268 NR Description: putative peroxidase [Oryza sativa]
  misc_feature (8)..(325): NCBI GI NO: 34896944 NR Description: putative peroxidase [Oryza sativa]
  misc_feature (1)..(324): NCBI GI NO: 12039346 NR Description: putative peroxidase [Oryza sativa]
  misc_feature (7)..(324): NCBI GI NO: 12039354 NR Description: putative peroxidase [Oryza sativa]
  misc_feature (7)..(324): NCBI GI NO: 12039335 NR Description: putative peroxidase [Oryza sativa]
  misc_feature (9)..(324): NCBI GI NO: 27261094 NR Description: putative peroxidase
  misc_feature (26)..(324): NCBI GI NO: 27261097 NR Description: putative peroxidase
MPSSVFAAALLLLAAAACQASPYYPLELGYYRYTCPQAEAIVKASMEKAIAQNPGNGAAVIRMLFHDCFVEGCDASVLLDPTPFSPTPEKLAAPNNPSLRGFELIDAIKDALEAACPGVVSCADIIAFAARDASCFLSQGKVSFDMPSGRLDGTFSNASESVKFLVPPTSNLSDLASSFAVKGMSLEDLVVLSGAHTVGRSHCSSFVSDRLDVPSDINPALAAFLRTRCPPNTTTSDDPTVMQDVVTPNAMDIQYYKNVLSHTVLFTSDAALLTSPETAKLVLDNAKIPGWWEDKFEKAMVKMASLEVKTGHQGQVRKNCRAINHY

SEQ ID NO: 27211 - protein, 281 aa, Zea mays subsp. mays
  peptide (1)..(281): Ceres Seq. ID no. 12386791
  misc_feature (1)..(243): Pfam Name: Pfam Description:  Peroxidase
  misc_feature (1)..(281): NCBI GI NO: 12056450 NR Description: peroxidase [Zea mays]
  misc_feature (1)..(280): NCBI GI NO: 12039355 NR Description: putative peroxidase [Oryza sativa]
  misc_feature (1)..(280): NCBI GI NO: 34896266 NR Description: putative peroxidase [Oryza sativa]
  misc_feature (1)..(279): NCBI GI NO: 34896268 NR Description: putative peroxidase [Oryza sativa]
  misc_feature (1)..(280): NCBI GI NO: 34896944 NR Description: putative peroxidase [Oryza sativa]
  misc_feature (1)..(279): NCBI GI NO: 12039346 NR Description: putative peroxidase [Oryza sativa]
  misc_feature (1)..(279): NCBI GI NO: 12039354 NR Description: putative peroxidase [Oryza sativa]
  misc_feature (1)..(279): NCBI GI NO: 12039335 NR Description: putative peroxidase [Oryza sativa]
  misc_feature (1)..(279): NCBI GI NO: 27261094 NR Description: putative peroxidase
  misc_feature (1)..(279): NCBI GI NO: 27261097 NR Description: putative peroxidase
MEKAIAQNPGNGAAVIRMLFHDCFVEGCDASVLLDPTPFSPTPEKLAAPNNPSLRGFELIDAIKDALEAACPGVVSCADIIAFAARDASCFLSQGKVSFDMPSGRLDGTFSNASESVKFLVPPTSNLSDLASSFAVKGMSLEDLVVLSGAHTVGRSHCSSFVSDRLDVPSDINPALAAFLRTRCPPNTTTSDDPTVMQDVVTPNAMDIQYYKNVLSHTVLFTSDAALLTSPETAKLVLDNAKIPGWWEDKFEKAMVKMASLEVKTGHQGQVRKNCRAINHY

SEQ ID NO: 27212 - DNA, 1324 bp, Zea mays subsp. mays
  misc_feature (1)..(1324): Ceres Seq. ID no. 13492565
aacaagaaagcgaccaccgctgtgaatcagcagagctgcagtgagagcaagtgagaggatcagaggaggcatccgtgaccaaagatcgagtagccaagaagaagagagatgaacgccgacttcggcgcgccccaaggagctcgcgggaggcctgcagcagcggcgggccctctaccagccccgcctcccgccatgcctccagggaccgacggtaagggcggagtacggtgacgcgaccacaaccatagatcccacctgtgcccaagccgtcgcgcaggccttcccgcacacctttggccagccgctcgtcagcttcgtcgcgccggccgccggcgccggcgccgttgaggagcgccacccgatcagggtgggcgtggtgttctctgggaggcagtcgccgggagggcacaacgtcgtctggggcctccatgacgcacttaaagcctacaatcctcagagcttgctctacggattcgtcggtggcacggagggactgtttgcaaacaagacgttggagatcacagacgatgttcttgcttcctataagaaccaaggtggtttcgatttgctcggtaggagtatcgatcagatccgcactactaagcaagtgaatgctgcaatgacaacatgccacagtctgaacttggatgggttggtcatcattggaggtgtgacctccaattcagatgctgcacagcttgcggagacccttattcagaataactgtaagaccaaggttgttggtgtgccagtttcattgaatggtgacctcaagaaccagtttgttgaaacaacagttggatttgatacagtatgtaaggttaattcacagcttgtaagcaatgtttgtcttgatgcgatctcagctggaaagtactattattttgttcgtctgatgggacgaaaagcatctcatgttgcctttgaatgtgcacttcaatcacacccaaacatgctcatcttaggcgaggaggtagcattgtcaaaactcacactgatggaaattataagcaagatttgtgatggagtacaagcaagggcaaaattagggaaatatcatggtgtgcttgttattcccgaaggacttatagaaagcattccagaaatgtatgctcttattcaggaaatcaatatccttcacaacagtaatgttcctgtggctgagatgtcatcacaactgtctccgtgggcagctgctctgttccagttcttgccacccttcatcaggagagagctgctgctccaccaagaatcagataactctgcgcagctgtcccaaattgacacggagcaactgctggcccatctagtagaaacagaaatg

SEQ ID NO: 27213 - protein, 235 aa, Zea mays subsp. mays
  peptide (1)..(235): Ceres Seq. ID no. 13492566
  misc_feature (1)..(196): Pfam Name: Pfam Description:  Phosphofructokinase
  misc_feature (1)..(234): NCBI GI NO: 29647436 NR Description: putative pyrophosphate--fructose 6-phosphate 1-phosphotransferase alpha subunit
  misc_feature (1)..(234): NCBI GI NO: 29367525 NR Description: fructose-6-phosphate 1-phosphotransferase
  misc_feature (1)..(234): NCBI GI NO: 3790102 NR Description: pyrophosphate-dependent phosphofructokinase alpha subunit
  misc_feature (1)..(234): NCBI GI NO: 2499488 NR Description: Pyrophosphate --fructose 6-phosphate 1-phosphotransferase alpha subunit
  misc_feature (1)..(234): NCBI GI NO: 129881 NR Description: Pyrophosphate --fructose 6-phosphate 1-phosphotransferase alpha subunit
  misc_feature (1)..(234): NCBI GI NO: 15223082 NR Description: pyrophosphate-dependent phosphofructokinase alpha subunit -related
  misc_feature (1)..(234): NCBI GI NO: 15218074 NR Description: pyrophosphate-dependent phosphofructokinase alpha subunit -related
  misc_feature (1)..(234): NCBI GI NO: 2499489 NR Description: Pyrophosphate --fructose 6-phosphate 1-phosphotransferase beta subunit
  misc_feature (1)..(234): NCBI GI NO: 3790100 NR Description: pyrophosphate-dependent phosphofructokinase beta subunit
  misc_feature (1)..(234): NCBI GI NO: 2507174 NR Description: PYROPHOSPHATE --FRUCTOSE 6-PHOSPHATE 1-PHOSPHOTRANSFERASE BETA SUBUNIT
MTTCHSLNLDGLVIIGGVTSNSDAAQLAETLIQNNCKTKVVGVPVSLNGDLKNQFVETTVGFDTVCKVNSQLVSNVCLDAISAGKYYYFVRLMGRKASHVAFECALQSHPNMLILGEEVALSKLTLMEIISKICDGVQARAKLGKYHGVLVIPEGLIESIPEMYALIQEINILHNSNVPVAEMSSQLSPWAAALFQFLPPFIRRELLLHQESDNSAQLSQIDTEQLLAHLVETEM

SEQ ID NO: 27214 - protein, 143 aa, Zea mays subsp. mays
  peptide (1)..(143): Ceres Seq. ID no. 13492567
  misc_feature (1)..(104): Pfam Name: Pfam Description:  Phosphofructokinase
  misc_feature (1)..(142): NCBI GI NO: 29647436 NR Description: putative pyrophosphate--fructose 6-phosphate 1-phosphotransferase alpha subunit
  misc_feature (1)..(142): NCBI GI NO: 29367525 NR Description: fructose-6-phosphate 1-phosphotransferase
  misc_feature (1)..(142): NCBI GI NO: 3790102 NR Description: pyrophosphate-dependent phosphofructokinase alpha subunit
  misc_feature (1)..(142): NCBI GI NO: 2499488 NR Description: Pyrophosphate --fructose 6-phosphate 1-phosphotransferase alpha subunit
  misc_feature (1)..(142): NCBI GI NO: 129881 NR Description: Pyrophosphate --fructose 6-phosphate 1-phosphotransferase alpha subunit
  misc_feature (1)..(142): NCBI GI NO: 15223082 NR Description: pyrophosphate-dependent phosphofructokinase alpha subunit -related
  misc_feature (1)..(142): NCBI GI NO: 15218074 NR Description: pyrophosphate-dependent phosphofructokinase alpha subunit -related
  misc_feature (1)..(142): NCBI GI NO: 2499489 NR Description: Pyrophosphate --fructose 6-phosphate 1-phosphotransferase beta subunit
  misc_feature (1)..(142): NCBI GI NO: 3790100 NR Description: pyrophosphate-dependent phosphofructokinase beta subunit
  misc_feature (1)..(142): NCBI GI NO: 2507174 NR Description: PYROPHOSPHATE --FRUCTOSE 6-PHOSPHATE 1-PHOSPHOTRANSFERASE BETA SUBUNIT
MGRKASHVAFECALQSHPNMLILGEEVALSKLTLMEIISKICDGVQARAKLGKYHGVLVIPEGLIESIPEMYALIQEINILHNSNVPVAEMSSQLSPWAAALFQFLPPFIRRELLLHQESDNSAQLSQIDTEQLLAHLVETEM

SEQ ID NO: 27215 - protein, 124 aa, Zea mays subsp. mays
  peptide (1)..(124): Ceres Seq. ID no. 13492568
  misc_feature (1)..(85): Pfam Name: Pfam Description:  Phosphofructokinase
  misc_feature (1)..(123): NCBI GI NO: 29647436 NR Description: putative pyrophosphate--fructose 6-phosphate 1-phosphotransferase alpha subunit
  misc_feature (1)..(123): NCBI GI NO: 29367525 NR Description: fructose-6-phosphate 1-phosphotransferase
  misc_feature (1)..(123): NCBI GI NO: 3790102 NR Description: pyrophosphate-dependent phosphofructokinase alpha subunit
  misc_feature (1)..(123): NCBI GI NO: 2499488 NR Description: Pyrophosphate --fructose 6-phosphate 1-phosphotransferase alpha subunit
  misc_feature (1)..(123): NCBI GI NO: 129881 NR Description: Pyrophosphate --fructose 6-phosphate 1-phosphotransferase alpha subunit
  misc_feature (1)..(123): NCBI GI NO: 15223082 NR Description: pyrophosphate-dependent phosphofructokinase alpha subunit -related
  misc_feature (1)..(123): NCBI GI NO: 15218074 NR Description: pyrophosphate-dependent phosphofructokinase alpha subunit -related
  misc_feature (1)..(123): NCBI GI NO: 2499489 NR Description: Pyrophosphate --fructose 6-phosphate 1-phosphotransferase beta subunit
  misc_feature (1)..(123): NCBI GI NO: 3790100 NR Description: pyrophosphate-dependent phosphofructokinase beta subunit
  misc_feature (1)..(123): NCBI GI NO: 2507174 NR Description: PYROPHOSPHATE --FRUCTOSE 6-PHOSPHATE 1-PHOSPHOTRANSFERASE BETA SUBUNIT
MLILGEEVALSKLTLMEIISKICDGVQARAKLGKYHGVLVIPEGLIESIPEMYALIQEINILHNSNVPVAEMSSQLSPWAAALFQFLPPFIRRELLLHQESDNSAQLSQIDTEQLLAHLVETEM

SEQ ID NO: 27216 - DNA, 1553 bp, Zea mays subsp. mays
  misc_feature (1)..(1553): Ceres Seq. ID no. 12350501
aaaaaaacttcccctgtcacgagagtacgagaccacgccttccgtgggatcaatcggctagggtttcggagatgttcggccgccgccgaagaagagcgacaacacccggtactacgagatcctgggggtttccaaggacgcgtcacaggatgacctcaagaaggcctaccgcaaggccgccatcaagaaccaccccgacaagggcggcgaccccgagaagttcaaggagctagctcaggcttatgaggtcctcagcgaccctgaaaagagagagatctatgaccagtatggcgaggatgccctcaaggagggaatgggaggcggtggtgggatgcatgatccctttgacatattccagtcattctttggtggtggaagcccttttggaggtggcagcagtaggggcagaaggcaacgacggggagatgatgtggttcatcctctgaaggtttctctggaggatttgtacaatggcacatcaaagaagctctctctgtcccgcaatgtcctctgctccaagtgcaatggtaagggttccaagtctggagcttcgtcgaggtgtgctggttgtcaaggttctggcttcaaggtccaaatccggcagttgggacctggaatgattcagcaaatgcagcatccttgcaatgagtgcaagggttctggagagaccatcagcgataaggatagatgcccacaatgcaaaggtgataaagttgtgccggagaagaaagttcttgaagtggtagttgagaaaggtatgcagaacgggcagaagatcacattccctggcgaagctgatgaagcgcctgatactgccactggagatatcatctttgttctccagcagaaggagcatcccaagttcaagagaaagggcgatgacctcttctacgagcacacactgaccttgactgaatctctgtgtggcttccagtttgttctgactcacttggataacaggcagctgctgatcaaatcgaaccctggcgaagttgtgaagcctgattctttcaaggcaatcaacgatgaaggcatgcccatgtatcagaggcccttcatgaagggcaagctgtacatccacttctcggtggagttcccggactcgttgagcccggagcagtgcaaggccttggaggctgttctcccgcccaagccagtatcacagtacactgacatggagctggacgagtgcgaggagacaatgtcgtacgacgtgaacatcgaagaggagatgcggaggcggcaacagcagcaccaggaggcctacgacgaggatgatgatgtgccaggcggtgggcagagggtgcagtgcgcccagcagtaggcagcttgcggtaagtctacccgcttgtattggcctgatgatacttcggttacacgagtgcagttatcggtctgttagttcaagttctgcgtttggggtgttagatccaccagaattagatttgttcggcaagctacgctcgaatacatctcaatggtgacaccttaatggtgctctgaaaacgtttgctagcttctcatgaagttgacaactcacggcttgtttgtgt

SEQ ID NO: 27217 - protein, 336 aa, Zea mays subsp. mays
  peptide (1)..(336): Ceres Seq. ID no. 12350502
  misc_feature (153)..(277): Pfam Name: Pfam Description:  DnaJ C terminal region
  misc_feature (1)..(336): NCBI GI NO: 5802244 NR Description: seed maturation protein PM37 [Glycine max]
  misc_feature (1)..(336): NCBI GI NO: 4008159 NR Description: DnaJ homolog [Salix gilgiana]
  misc_feature (1)..(336): NCBI GI NO: 7441930 NR Description: dnaJ protein homolog - potato
  misc_feature (1)..(336): NCBI GI NO: 1169382 NR Description: DnaJ protein homolog 2
  misc_feature (1)..(336): NCBI GI NO: 461944 NR Description: DnaJ protein homolog (DNAJ-1)
  misc_feature (1)..(336): NCBI GI NO: 6782421 NR Description: DnaJ-like protein [Lycopersicon esculentum]
  misc_feature (1)..(336): NCBI GI NO: 10945669 NR Description: J1P [Daucus carota]
  misc_feature (1)..(336): NCBI GI NO: 29367357 NR Description: DNAJ-like protein
  misc_feature (1)..(336): NCBI GI NO: 1169384 NR Description: DNAJ PROTEIN HOMOLOG ANJ1
  misc_feature (1)..(336): NCBI GI NO: 4210948 NR Description: DnaJ protein [Hevea brasiliensis]
MGGGGGMHDPFDIFQSFFGGGSPFGGGSSRGRRQRRGDDVVHPLKVSLEDLYNGTSKKLSLSRNVLCSKCNGKGSKSGASSRCAGCQGSGFKVQIRQLGPGMIQQMQHPCNECKGSGETISDKDRCPQCKGDKVVPEKKVLEVVVEKGMQNGQKITFPGEADEAPDTATGDIIFVLQQKEHPKFKRKGDDLFYEHTLTLTESLCGFQFVLTHLDNRQLLIKSNPGEVVKPDSFKAINDEGMPMYQRPFMKGKLYIHFSVEFPDSLSPEQCKALEAVLPPKPVSQYTDMELDECEETMSYDVNIEEEMRRRQQQHQEAYDEDDDVPGGGQRVQCAQQ

SEQ ID NO: 27218 - protein, 330 aa, Zea mays subsp. mays
  peptide (1)..(330): Ceres Seq. ID no. 12350503
  misc_feature (147)..(271): Pfam Name: Pfam Description:  DnaJ C terminal region
  misc_feature (1)..(330): NCBI GI NO: 5802244 NR Description: seed maturation protein PM37 [Glycine max]
  misc_feature (1)..(330): NCBI GI NO: 4008159 NR Description: DnaJ homolog [Salix gilgiana]
  misc_feature (1)..(330): NCBI GI NO: 7441930 NR Description: dnaJ protein homolog - potato
  misc_feature (1)..(330): NCBI GI NO: 1169382 NR Description: DnaJ protein homolog 2
  misc_feature (1)..(330): NCBI GI NO: 461944 NR Description: DnaJ protein homolog (DNAJ-1)
  misc_feature (1)..(330): NCBI GI NO: 6782421 NR Description: DnaJ-like protein [Lycopersicon esculentum]
  misc_feature (1)..(330): NCBI GI NO: 10945669 NR Description: J1P [Daucus carota]
  misc_feature (1)..(330): NCBI GI NO: 29367357 NR Description: DNAJ-like protein
  misc_feature (1)..(330): NCBI GI NO: 1169384 NR Description: DNAJ PROTEIN HOMOLOG ANJ1
  misc_feature (1)..(330): NCBI GI NO: 4210948 NR Description: DnaJ protein [Hevea brasiliensis]
MHDPFDIFQSFFGGGSPFGGGSSRGRRQRRGDDVVHPLKVSLEDLYNGTSKKLSLSRNVLCSKCNGKGSKSGASSRCAGCQGSGFKVQIRQLGPGMIQQMQHPCNECKGSGETISDKDRCPQCKGDKVVPEKKVLEVVVEKGMQNGQKITFPGEADEAPDTATGDIIFVLQQKEHPKFKRKGDDLFYEHTLTLTESLCGFQFVLTHLDNRQLLIKSNPGEVVKPDSFKAINDEGMPMYQRPFMKGKLYIHFSVEFPDSLSPEQCKALEAVLPPKPVSQYTDMELDECEETMSYDVNIEEEMRRRQQQHQEAYDEDDDVPGGGQRVQCAQQ

SEQ ID NO: 27219 - protein, 235 aa, Zea mays subsp. mays
  peptide (1)..(235): Ceres Seq. ID no. 12350504
  misc_feature (52)..(176): Pfam Name: Pfam Description:  DnaJ C terminal region
  misc_feature (1)..(235): NCBI GI NO: 5802244 NR Description: seed maturation protein PM37 [Glycine max]
  misc_feature (1)..(235): NCBI GI NO: 4008159 NR Description: DnaJ homolog [Salix gilgiana]
  misc_feature (1)..(235): NCBI GI NO: 7441930 NR Description: dnaJ protein homolog - potato
  misc_feature (1)..(235): NCBI GI NO: 1169382 NR Description: DnaJ protein homolog 2
  misc_feature (1)..(235): NCBI GI NO: 461944 NR Description: DnaJ protein homolog (DNAJ-1)
  misc_feature (1)..(235): NCBI GI NO: 6782421 NR Description: DnaJ-like protein [Lycopersicon esculentum]
  misc_feature (1)..(235): NCBI GI NO: 10945669 NR Description: J1P [Daucus carota]
  misc_feature (1)..(235): NCBI GI NO: 29367357 NR Description: DNAJ-like protein
  misc_feature (1)..(235): NCBI GI NO: 1169384 NR Description: DNAJ PROTEIN HOMOLOG ANJ1
  misc_feature (1)..(235): NCBI GI NO: 4210948 NR Description: DnaJ protein [Hevea brasiliensis]
MIQQMQHPCNECKGSGETISDKDRCPQCKGDKVVPEKKVLEVVVEKGMQNGQKITFPGEADEAPDTATGDIIFVLQQKEHPKFKRKGDDLFYEHTLTLTESLCGFQFVLTHLDNRQLLIKSNPGEVVKPDSFKAINDEGMPMYQRPFMKGKLYIHFSVEFPDSLSPEQCKALEAVLPPKPVSQYTDMELDECEETMSYDVNIEEEMRRRQQQHQEAYDEDDDVPGGGQRVQCAQQ

SEQ ID NO: 27220 - DNA, 1663 bp, Zea mays subsp. mays
  misc_feature (1)..(1663): Ceres Seq. ID no. 12556784
atcgctacccagaaccctagccccctccaaaaacccttgtggcatcgtcatctccattgtccactcgctgccccgcccgagcccccgcttgtttccgcggcctcgccatttgcgtggttgaagaagcgaaagatgctcggcgcctctaggcgatccctcagtgccgccgcccgcagccgcgtggctgccggcgtagcctccgccgtcaccgccgacgcctcagtgccggcccgccccataagtgtagccatcctttttgctttctttattgatggcggttagccatgttaggtgagcaatggagcccgtggggttcctcagcagcagaataggttgctctcagtgcttgtggcacccaagattgcaggaatgagcaatgttgtggccctcaagctgatggatggtgcccttattggtagacgctatgaatcgagtgcagcagcagttgattctacggaccagctagctgagaagcacgagtaccaggctgaggtcaacaggctcatggatttgattgtgcacagcttgtatagtaacaaggaagttttccttcgagaactggtcagcaatgctagtgatgcacttgataagttgcgttatctgagtgtcacggaccctgagcttctgaaggatggtccccaacttgacattcgcattcaatcagacaaggataatggagtaataacaattactgattctgggattggtatgacgaaacaagagcttattgattctcttgggactattgaaagcagtggaactgccaagttccttaaagcattgaaggagagtcaagaagcgggcatggacaacaacttgattggccaatttggtgttggtttctattccacatttcttgtttcagagaaggttgttgtgtcaacaaagagcccaaaatctgacaaacaatatgtttgggaaggacaagcagattctggttcttataccattagagaggaaaaagacccagagaagctaattcctaggggaactcgccttactctctatcttaagcatgatgataagggctttgctcaccctgagaggattcaaaaacttttaaagaattattctcagtttgtttcctttcccatttacacatggcaagagaaaggcttcacaaaagaggtcgaggttgatgaggatccagcggaagccaaaaaaggggatgatgatatcaaaactgagcctaagaaaaagaccaaaaccgttgttgagaagtattgggattgggagctttcaaatgagacacaacctatttggcttcgaaaccctaaagaggtttcaactgaggagtacaatgaattttacaagaaaaccttcaatgagtacttgaatcctttggcctcctcacacttcactacagagggtgaggtagaatttaggtcaattctttatgttcctgctacaaggaaggatgatataactgataataggaagaccaagaatatcagactatatgttaaacgtgtattcatatcggatgactttgatggagaattgttcccaagatatttgagctttgtgaagggtgttgttgactcaaatgaccttccgttgaatgtttctcgtgagattcttcaagaaagtcgaattgttcgtataatgagaaagaggctagtgcggaaagccttcgatatgatacttggcatttcttgcagtg

SEQ ID NO: 27221 - protein, 431 aa, Zea mays subsp. mays
  peptide (1)..(431): Ceres Seq. ID no. 12556785
  misc_feature (221)..(430): Pfam Name: Pfam Description:  Hsp90 protein
  misc_feature (1)..(430): NCBI GI NO: 15231505 NR Description: putative heat-shock protein; protein id:At3g07770
  misc_feature (1)..(429): NCBI GI NO: 1076758 NR Description: heat-shock protein, 82K, precursor - rye
  misc_feature (20)..(429): NCBI GI NO: 15228059 NR Description: putative heat shock protein; protein id:At2g04030
  misc_feature (20)..(429): NCBI GI NO: 30678090 NR Description: heat shock protein, putative
  misc_feature (20)..(429): NCBI GI NO: 20453106 NR Description: At2g04030/F3C11.14 [Arabidopsis thaliana]
  misc_feature (1)..(429): NCBI GI NO: 1906830 NR Description: heat shock protein [Arabidopsis thaliana]
  misc_feature (22)..(425): NCBI GI NO: 17542208 NR Description: Endoplasmin (87.1 kD) [Caenorhabditis elegans]
  misc_feature (22)..(425): NCBI GI NO: 39593714 NR Description: Hypothetical protein CBG06014
  misc_feature (33)..(424): NCBI GI NO: 15237214 NR Description: heat-shock protein; protein id: At5g52640
  misc_feature (33)..(424): NCBI GI NO: 26454635 NR Description: Heat shock protein 81-1
MSNVVALKLMDGALIGRRYESSAAAVDSTDQLAEKHEYQAEVNRLMDLIVHSLYSNKEVFLRELVSNASDALDKLRYLSVTDPELLKDGPQLDIRIQSDKDNGVITITDSGIGMTKQELIDSLGTIESSGTAKFLKALKESQEAGMDNNLIGQFGVGFYSTFLVSEKVVVSTKSPKSDKQYVWEGQADSGSYTIREEKDPEKLIPRGTRLTLYLKHDDKGFAHPERIQKLLKNYSQFVSFPIYTWQEKGFTKEVEVDEDPAEAKKGDDDIKTEPKKKTKTVVEKYWDWELSNETQPIWLRNPKEVSTEEYNEFYKKTFNEYLNPLASSHFTTEGEVEFRSILYVPATRKDDITDNRKTKNIRLYVKRVFISDDFDGELFPRYLSFVKGVVDSNDLPLNVSREILQESRIVRIMRKRLVRKAFDMILGISCS

SEQ ID NO: 27222 - protein, 422 aa, Zea mays subsp. mays
  peptide (1)..(422): Ceres Seq. ID no. 12556786
  misc_feature (212)..(421): Pfam Name: Pfam Description:  Hsp90 protein
  misc_feature (1)..(421): NCBI GI NO: 15231505 NR Description: putative heat-shock protein; protein id:At3g07770
  misc_feature (1)..(420): NCBI GI NO: 1076758 NR Description: heat-shock protein, 82K, precursor - rye
  misc_feature (11)..(420): NCBI GI NO: 15228059 NR Description: putative heat shock protein; protein id:At2g04030
  misc_feature (11)..(420): NCBI GI NO: 30678090 NR Description: heat shock protein, putative
  misc_feature (11)..(420): NCBI GI NO: 20453106 NR Description: At2g04030/F3C11.14 [Arabidopsis thaliana]
  misc_feature (1)..(420): NCBI GI NO: 1906830 NR Description: heat shock protein [Arabidopsis thaliana]
  misc_feature (13)..(416): NCBI GI NO: 17542208 NR Description: Endoplasmin (87.1 kD) [Caenorhabditis elegans]
  misc_feature (13)..(416): NCBI GI NO: 39593714 NR Description: Hypothetical protein CBG06014
  misc_feature (24)..(415): NCBI GI NO: 15237214 NR Description: heat-shock protein; protein id: At5g52640
  misc_feature (24)..(415): NCBI GI NO: 26454635 NR Description: Heat shock protein 81-1
MDGALIGRRYESSAAAVDSTDQLAEKHEYQAEVNRLMDLIVHSLYSNKEVFLRELVSNASDALDKLRYLSVTDPELLKDGPQLDIRIQSDKDNGVITITDSGIGMTKQELIDSLGTIESSGTAKFLKALKESQEAGMDNNLIGQFGVGFYSTFLVSEKVVVSTKSPKSDKQYVWEGQADSGSYTIREEKDPEKLIPRGTRLTLYLKHDDKGFAHPERIQKLLKNYSQFVSFPIYTWQEKGFTKEVEVDEDPAEAKKGDDDIKTEPKKKTKTVVEKYWDWELSNETQPIWLRNPKEVSTEEYNEFYKKTFNEYLNPLASSHFTTEGEVEFRSILYVPATRKDDITDNRKTKNIRLYVKRVFISDDFDGELFPRYLSFVKGVVDSNDLPLNVSREILQESRIVRIMRKRLVRKAFDMILGISCS

SEQ ID NO: 27223 - protein, 386 aa, Zea mays subsp. mays
  peptide (1)..(386): Ceres Seq. ID no. 12556787
  misc_feature (176)..(385): Pfam Name: Pfam Description:  Hsp90 protein
  misc_feature (1)..(385): NCBI GI NO: 15231505 NR Description: putative heat-shock protein; protein id:At3g07770
  misc_feature (1)..(384): NCBI GI NO: 1076758 NR Description: heat-shock protein, 82K, precursor - rye
  misc_feature (1)..(384): NCBI GI NO: 15228059 NR Description: putative heat shock protein; protein id:At2g04030
  misc_feature (1)..(384): NCBI GI NO: 30678090 NR Description: heat shock protein, putative
  misc_feature (1)..(384): NCBI GI NO: 20453106 NR Description: At2g04030/F3C11.14 [Arabidopsis thaliana]
  misc_feature (1)..(384): NCBI GI NO: 1906830 NR Description: heat shock protein [Arabidopsis thaliana]
  misc_feature (1)..(380): NCBI GI NO: 17542208 NR Description: Endoplasmin (87.1 kD) [Caenorhabditis elegans]
  misc_feature (1)..(380): NCBI GI NO: 39593714 NR Description: Hypothetical protein CBG06014
  misc_feature (1)..(379): NCBI GI NO: 15237214 NR Description: heat-shock protein; protein id: At5g52640
  misc_feature (1)..(379): NCBI GI NO: 26454635 NR Description: Heat shock protein 81-1
MDLIVHSLYSNKEVFLRELVSNASDALDKLRYLSVTDPELLKDGPQLDIRIQSDKDNGVITITDSGIGMTKQELIDSLGTIESSGTAKFLKALKESQEAGMDNNLIGQFGVGFYSTFLVSEKVVVSTKSPKSDKQYVWEGQADSGSYTIREEKDPEKLIPRGTRLTLYLKHDDKGFAHPERIQKLLKNYSQFVSFPIYTWQEKGFTKEVEVDEDPAEAKKGDDDIKTEPKKKTKTVVEKYWDWELSNETQPIWLRNPKEVSTEEYNEFYKKTFNEYLNPLASSHFTTEGEVEFRSILYVPATRKDDITDNRKTKNIRLYVKRVFISDDFDGELFPRYLSFVKGVVDSNDLPLNVSREILQESRIVRIMRKRLVRKAFDMILGISCS

SEQ ID NO: 27224 - DNA, 1609 bp, Zea mays subsp. mays
  misc_feature (1)..(1609): Ceres Seq. ID no. 12383197
gcacgagaccattacctagaacatcctaatcgaaaaaaaaactgccaaacactgcacactcgggagtcaggactgggccgtttcagtgtcacttccgccgccttctccctcaatcaagagcgcccgtcccttcgcccgcgcgccccgccatggccgcgccgtgcggccgcggcggcggcacgctgacgctggtcctcgtggctctctccgcggcgttcctcacctacaacgtgctcatctccttccactcctccctccagcccctcccttcctccttccccaccgccaccgcctcccgccgcttcggcgccgcggggtctgccaggcggagggcgttccacaccgcggtgaccgcgtcagggtccgcgtacaacacgtggcagtgccgcgtcatgtaccactggttcaaggaggcgcgccgggcgccgggcggcgacgagatgggcgggttcaccaggatcctgcactccgggaaacccgacgagttcgtcgatgagatccccacattcgtcgccgacccactccccgatggggatcagggatacatcgttctcaataggccatgggcatttgttcagtggctccagaaagcagacataaaggaagactatattttgatggcagagccagatcacataattgtcaagcctatcccaaacttgtcgagagatggtcaggcagcagcttttcctttcttttacattgagcctaaaaaatatgagaatgtgttgcgtaagttcttccctgaagacaaggggtcaatcactaagatcgatcctataggaaactctcctgtcattattgagaaggagtctcttggaaggattgcaccgacttggatgaatgtttcattagcaatgaaaaaagatcctgacgcagataaatcttttggctgggttcttgaaatgtatgcctatgccgtggcatctgctctccatggagtgggcaacatcttacgcaaggactttatgattcagccaccttgggacttggaagttggtgattcttttattattcattatacttatgggtgtgattatgacatgacgggtaagctgacttatggcaaaattggtgaatggagatttgacaagagatcatacacggacaaacctccacctagaaatttgccgttaccaccacatggtgtagctcaaagtgtggtgacacttgtgaaaatggtcaatgaagcaacagccaacataccaaactgggactcctatgccgctgctttttaacctgttataaatttggctcacaattttgtttgccagatatttccattccagctgactttgatacatgataattgcctaacatggaagatgagtggatgatacagtggaatgcataccaggttttacacaaggctgccggttccttacctttctgattgaatcctgataatatatggtgcaatgccatccctttccccccctaattttgttaaacacatgcacatcagcacatggcacaatatgtcaaaacacactcacctttggtgaaagctgcaatgtagatgactgagagatgtgatgttcttatctggatctgaatgtgcttattagaagaagaaaaaaaagagtcaggcgctgctctgacaaacgct

SEQ ID NO: 27225 - protein, 362 aa, Zea mays subsp. mays
  peptide (1)..(362): Ceres Seq. ID no. 12383198
  misc_feature (1)..(361): NCBI GI NO: 24413996 NR Description: hypothetical protein~similar to Arabidopsisthaliana chromosome 5
  misc_feature (9)..(357): NCBI GI NO: 22327055 NR Description: Expressed protein; protein id: At5g25265
  misc_feature (6)..(357): NCBI GI NO: 15240642 NR Description: putative protein; protein id: At5g13500
  misc_feature (174)..(357): NCBI GI NO: 30682704 NR Description: expressed protein [Arabidopsis thaliana]
  misc_feature (15)..(132): NCBI GI NO: 30682704 NR Description: expressed protein [Arabidopsis thaliana]
  misc_feature (174)..(339): NCBI GI NO: 25371351 NR Description: hypothetical protein At2g25260
  misc_feature (15)..(132): NCBI GI NO: 25371351 NR Description: hypothetical protein At2g25260
  misc_feature (50)..(156): NCBI GI NO: 34903224 NR Description: unnamed protein product
MAAPCGRGGGTLTLVLVALSAAFLTYNVLISFHSSLQPLPSSFPTATASRRFGAAGSARRRAFHTAVTASGSAYNTWQCRVMYHWFKEARRAPGGDEMGGFTRILHSGKPDEFVDEIPTFVADPLPDGDQGYIVLNRPWAFVQWLQKADIKEDYILMAEPDHIIVKPIPNLSRDGQAAAFPFFYIEPKKYENVLRKFFPEDKGSITKIDPIGNSPVIIEKESLGRIAPTWMNVSLAMKKDPDADKSFGWVLEMYAYAVASALHGVGNILRKDFMIQPPWDLEVGDSFIIHYTYGCDYDMTGKLTYGKIGEWRFDKRSYTDKPPPRNLPLPPHGVAQSVVTLVKMVNEATANIPNWDSYAAAF

SEQ ID NO: 27226 - protein, 281 aa, Zea mays subsp. mays
  peptide (1)..(281): Ceres Seq. ID no. 12383199
  misc_feature (1)..(280): NCBI GI NO: 24413996 NR Description: hypothetical protein~similar to Arabidopsisthaliana chromosome 5
  misc_feature (1)..(276): NCBI GI NO: 22327055 NR Description: Expressed protein; protein id: At5g25265
  misc_feature (1)..(276): NCBI GI NO: 15240642 NR Description: putative protein; protein id: At5g13500
  misc_feature (93)..(276): NCBI GI NO: 30682704 NR Description: expressed protein [Arabidopsis thaliana]
  misc_feature (1)..(51): NCBI GI NO: 30682704 NR Description: expressed protein [Arabidopsis thaliana]
  misc_feature (93)..(258): NCBI GI NO: 25371351 NR Description: hypothetical protein At2g25260
  misc_feature (1)..(51): NCBI GI NO: 25371351 NR Description: hypothetical protein At2g25260
  misc_feature (1)..(75): NCBI GI NO: 34903224 NR Description: unnamed protein product
MYHWFKEARRAPGGDEMGGFTRILHSGKPDEFVDEIPTFVADPLPDGDQGYIVLNRPWAFVQWLQKADIKEDYILMAEPDHIIVKPIPNLSRDGQAAAFPFFYIEPKKYENVLRKFFPEDKGSITKIDPIGNSPVIIEKESLGRIAPTWMNVSLAMKKDPDADKSFGWVLEMYAYAVASALHGVGNILRKDFMIQPPWDLEVGDSFIIHYTYGCDYDMTGKLTYGKIGEWRFDKRSYTDKPPPRNLPLPPHGVAQSVVTLVKMVNEATANIPNWDSYAAAF

SEQ ID NO: 27227 - protein, 265 aa, Zea mays subsp. mays
  peptide (1)..(265): Ceres Seq. ID no. 12383200
  misc_feature (1)..(264): NCBI GI NO: 24413996 NR Description: hypothetical protein~similar to Arabidopsisthaliana chromosome 5
  misc_feature (1)..(260): NCBI GI NO: 22327055 NR Description: Expressed protein; protein id: At5g25265
  misc_feature (1)..(260): NCBI GI NO: 15240642 NR Description: putative protein; protein id: At5g13500
  misc_feature (77)..(260): NCBI GI NO: 30682704 NR Description: expressed protein [Arabidopsis thaliana]
  misc_feature (1)..(35): NCBI GI NO: 30682704 NR Description: expressed protein [Arabidopsis thaliana]
  misc_feature (77)..(242): NCBI GI NO: 25371351 NR Description: hypothetical protein At2g25260
  misc_feature (1)..(35): NCBI GI NO: 25371351 NR Description: hypothetical protein At2g25260
  misc_feature (1)..(59): NCBI GI NO: 34903224 NR Description: unnamed protein product
MGGFTRILHSGKPDEFVDEIPTFVADPLPDGDQGYIVLNRPWAFVQWLQKADIKEDYILMAEPDHIIVKPIPNLSRDGQAAAFPFFYIEPKKYENVLRKFFPEDKGSITKIDPIGNSPVIIEKESLGRIAPTWMNVSLAMKKDPDADKSFGWVLEMYAYAVASALHGVGNILRKDFMIQPPWDLEVGDSFIIHYTYGCDYDMTGKLTYGKIGEWRFDKRSYTDKPPPRNLPLPPHGVAQSVVTLVKMVNEATANIPNWDSYAAAF

SEQ ID NO: 27228 - DNA, 1193 bp, Zea mays subsp. mays
  misc_feature (1)..(1193): Ceres Seq. ID no. 13492090
aactaatcgaaaaaaagttggctcacagaacacagcgcccgcccggacgcaaggggcacgagggagaagcgaggaacggcggcggcggcatcatggcggcgcggaacatccttcgcggtgcggcatgcggccaccgcttcctcgtgcccgtcccctcaggcgctcttgctggttctggaagccggagcatcggcgccgtcgctcagggccttcgtcattacgcagcagacgaagcagtgggaaacttggaactgcatgcacccaaggcaaaacgtcggtcatatatcccaacgaaaaatggaacagccatgatgcttccgctccatattcattacgaagatgtactacgtcaggatctgttgctcaaacagaatcatgccaatatcatgcaagttccagggttgtttgaggtcaaattagcaccaaaagccggctctgatctcaagatcccaattgggaaaatggccatggaggttttgagtggtcagagattcaaagaggcaaaaattgaccctttcgccaaagcaagaaagtcttctcgaaccaatccatttattggggccgacaaggacggtagcactgtcttcgcgcaaccaaccgttcttcgagggcatgcaatgtacaactttttggtgaggatgctgacagtgatgtccatgttaaattctcgggccgacattcgggagaacactgtgaagttcttcatggaaacggagttctgtgagttctctccagaattggaagaccatttcgagatatttgagcacatccgaggtttcaatgtgactatcgttacttcagccaatacaaaagatgagacctcactgctgtggagtggcttcatgctgaatgacgagggagagaccaagtaaggtagaactgttgatctttgtttctgcttaatctccctgatattgtagttgctgcccaactggaccttcagttggctgttgatgtcaaaaatgattttggaaatttggtgcttcgtgctctaggagtgcgcaatgtcgcagccttctgttttgtagactgaatgagatgacgtgattgtttttcatcttgacgcgtggagctcatgtttgataactacgtctagtaccatgtatgaacataataatcttggtctaataagcattgttttgcttattcctgtggttcctgctatagtaacatggaatgctcgtttctgtttg

SEQ ID NO: 27229 - protein, 289 aa, Zea mays subsp. mays
  peptide (1)..(289): Ceres Seq. ID no. 13492091
  misc_feature (127)..(182): Pfam Name: Pfam Description:  Ribosomal protein L5
  misc_feature (31)..(289): NCBI GI NO: 30351950 NR Description: mitochondrial ribosomal protein L5 [Zea mays]
  misc_feature (104)..(289): NCBI GI NO: 5688943 NR Description: ribosomal protein L5
  misc_feature (103)..(289): NCBI GI NO: 27803142 NR Description: ribosomal protein L5 [Triticum aestivum]
  misc_feature (104)..(288): NCBI GI NO: 730588 NR Description: MITOCHONDRIAL 60S RIBOSOMAL PROTEIN L5
  misc_feature (104)..(289): NCBI GI NO: 37591117 NR Description: ribosomal protein L5 [Brassica napus]
  misc_feature (104)..(289): NCBI GI NO: 1173079 NR Description: MITOCHONDRIAL 60S RIBOSOMAL PROTEIN L5
  misc_feature (104)..(289): NCBI GI NO: 9838430 NR Description: ribosomal protein L5 [Beta vulgaris]
  misc_feature (104)..(289): NCBI GI NO: 4164412 NR Description: ribosomal protein L5 [Pisum sativum]
  misc_feature (104)..(288): NCBI GI NO: 421897 NR Description: ribosomal protein L5
  misc_feature (104)..(289): NCBI GI NO: 13449308 NR Description: ribosomal protein L5 [Arabidopsis thaliana]
LIEKKLAHRTQRPPGRKGHEGEARNGGGGIMAARNILRGAACGHRFLVPVPSGALAGSGSRSIGAVAQGLRHYAADEAVGNLELHAPKAKRRSYIPTKNGTAMMLPLHIHYEDVLRQDLLLKQNHANIMQVPGLFEVKLAPKAGSDLKIPIGKMAMEVLSGQRFKEAKIDPFAKARKSSRTNPFIGADKDGSTVFAQPTVLRGHAMYNFLVRMLTVMSMLNSRADIRENTVKFFMETEFCEFSPELEDHFEIFEHIRGFNVTIVTSANTKDETSLLWSGFMLNDEGETK

SEQ ID NO: 27230 - protein, 259 aa, Zea mays subsp. mays
  peptide (1)..(259): Ceres Seq. ID no. 13492092
  misc_feature (97)..(152): Pfam Name: Pfam Description:  Ribosomal protein L5
  misc_feature (1)..(259): NCBI GI NO: 30351950 NR Description: mitochondrial ribosomal protein L5 [Zea mays]
  misc_feature (74)..(259): NCBI GI NO: 5688943 NR Description: ribosomal protein L5
  misc_feature (73)..(259): NCBI GI NO: 27803142 NR Description: ribosomal protein L5 [Triticum aestivum]
  misc_feature (74)..(258): NCBI GI NO: 730588 NR Description: MITOCHONDRIAL 60S RIBOSOMAL PROTEIN L5
  misc_feature (74)..(259): NCBI GI NO: 37591117 NR Description: ribosomal protein L5 [Brassica napus]
  misc_feature (74)..(259): NCBI GI NO: 1173079 NR Description: MITOCHONDRIAL 60S RIBOSOMAL PROTEIN L5
  misc_feature (74)..(259): NCBI GI NO: 9838430 NR Description: ribosomal protein L5 [Beta vulgaris]
  misc_feature (74)..(259): NCBI GI NO: 4164412 NR Description: ribosomal protein L5 [Pisum sativum]
  misc_feature (74)..(258): NCBI GI NO: 421897 NR Description: ribosomal protein L5
  misc_feature (74)..(259): NCBI GI NO: 13449308 NR Description: ribosomal protein L5 [Arabidopsis thaliana]
MAARNILRGAACGHRFLVPVPSGALAGSGSRSIGAVAQGLRHYAADEAVGNLELHAPKAKRRSYIPTKNGTAMMLPLHIHYEDVLRQDLLLKQNHANIMQVPGLFEVKLAPKAGSDLKIPIGKMAMEVLSGQRFKEAKIDPFAKARKSSRTNPFIGADKDGSTVFAQPTVLRGHAMYNFLVRMLTVMSMLNSRADIRENTVKFFMETEFCEFSPELEDHFEIFEHIRGFNVTIVTSANTKDETSLLWSGFMLNDEGETK

SEQ ID NO: 27231 - protein, 187 aa, Zea mays subsp. mays
  peptide (1)..(187): Ceres Seq. ID no. 13492093
  misc_feature (25)..(80): Pfam Name: Pfam Description:  Ribosomal protein L5
  misc_feature (1)..(187): NCBI GI NO: 30351950 NR Description: mitochondrial ribosomal protein L5 [Zea mays]
  misc_feature (2)..(187): NCBI GI NO: 5688943 NR Description: ribosomal protein L5
  misc_feature (1)..(187): NCBI GI NO: 27803142 NR Description: ribosomal protein L5 [Triticum aestivum]
  misc_feature (2)..(186): NCBI GI NO: 730588 NR Description: MITOCHONDRIAL 60S RIBOSOMAL PROTEIN L5
  misc_feature (2)..(187): NCBI GI NO: 37591117 NR Description: ribosomal protein L5 [Brassica napus]
  misc_feature (2)..(187): NCBI GI NO: 1173079 NR Description: MITOCHONDRIAL 60S RIBOSOMAL PROTEIN L5
  misc_feature (2)..(187): NCBI GI NO: 9838430 NR Description: ribosomal protein L5 [Beta vulgaris]
  misc_feature (2)..(187): NCBI GI NO: 4164412 NR Description: ribosomal protein L5 [Pisum sativum]
  misc_feature (2)..(186): NCBI GI NO: 421897 NR Description: ribosomal protein L5
  misc_feature (2)..(187): NCBI GI NO: 13449308 NR Description: ribosomal protein L5 [Arabidopsis thaliana]
MMLPLHIHYEDVLRQDLLLKQNHANIMQVPGLFEVKLAPKAGSDLKIPIGKMAMEVLSGQRFKEAKIDPFAKARKSSRTNPFIGADKDGSTVFAQPTVLRGHAMYNFLVRMLTVMSMLNSRADIRENTVKFFMETEFCEFSPELEDHFEIFEHIRGFNVTIVTSANTKDETSLLWSGFMLNDEGETK

SEQ ID NO: 27232 - DNA, 2053 bp, Zea mays subsp. mays
  misc_feature (1)..(2053): Ceres Seq. ID no. 13577863
  misc_feature (1648)..(1648): n is a, c, t, g, unknown, or other
  misc_feature (638)..(638): n is a, c, t, g, unknown, or other
  misc_feature (518)..(518): n is a, c, t, g, unknown, or other
  misc_feature (132)..(132): n is a, c, t, g, unknown, or other
actagaacaccttggtggcctccgcgtctcgccgcctccccggactccgcatccagccccggcactcgcactcccaaagcagcggacactagtagggtttaaactttccccccgatccgcctcgcctccggnctgtcgcctgccgccagaccaacgcccccacacccagccggagacgacgatggtggggctcggctcgatggcgggctatgggatccagtcgatgctcaaggaaggccaccgccacctctccgggctcgaggaggccgtgctcaagaacatcgacgcctgccgcgagctctccgccatcacgcgcacatccctgggccccaacggaatgaacaagatggttatcaatcacttggacaagctgtttgtcacaaacgatgctgccaccatcgtgaatgagcttgaggttcagcacccggctgctaaaatcctggtactggctgccaaggctcaacaggaggagattggggatggagccaatctcaccatatcgtttgctggtgaactgnttgagaaggctgaggagctcatcaggatgggcttgcatccgagtgagatcatcattggctacaccaaagccatcaacaagacaattgaaattttagaggatcttgttgagaaaggctcanagaacatggacgtaagaaacaaggaggatgttgtgttgaggatgagatctgctgtcgcaagcaagcagtttggccaggaggatatgctgtgccctcttgtggctgatgcctgcattcaagtttgccccaaaaatcctgcaaactttaatgttgacaatgttagagtggctaagctacttggaggtggtttgcacaattcttctgtggtccgtgggatggttctgaaaaatgatgctgttggtagcatcaaaagggcggagaaggcaaagattgtcgtatttgctggtggtgtcgacacctcggcaactgaaacaaagggaaccgtgttgatccattccgctgagcagctagaaaattatgctaagaccgaggaagctaaggtggaggagcttatcaaagctgtcgctgactctggtgccaaggttattgtcagtggagctgcagtggggtgacatggcacttcatttctgtgaacgttataagctgatggttctgaaaatcagctcgaagtttgaactaagaaggttctgccgtactactggggctgttgcaattttgaaacttagccaacccaatgcggacgaactaggatacgcagattctgtttctgtagaagaaattggtggtactcgggttactgtcgtcaagaacgaagatggtggaaattcagtggctactgttgtcctgagaggcagtactgacagtatactagatgatcttgaaagagctgttgatgatggcgtcaatacatacaggtcaatgtgcagggacagtaggataattcctggtgctgctgcaacagaagttgagctggcaaagagattgaaggagttctctttgaaggaaacagggttggaccagtatgccattgcgaaatttgctgaaagctttgaaatggttccaagaaccctggcagaaaatgctggacttagcgcaatggagataatatcctctctttatgctgagcatgctagtggcaatgcgaaagttggcattgatctggaggaagncgcctgcaaggacatctcgactttaaaaatatgggacctctatgtcacaaagttttttgccctaaaatactctgccgatgctgcttgcacggtgctgcgggttgaccagatcattatggcaaagccggcaggaggtccaagaagagatgcccagcctggtggcgggatggacgaggattagtttgattatagttgttttctttgtatcacgtatgtgaggtttcagagcagagatcatactttatcttggcttttggttctgtagaaggtttgggtgcctggagttcacttttggaaggtctgcacggttgcgcggatatcacataggcaatttgtatgttttttcctggtgtattgcggtgcggatgtatcaaatgattcattacaggggccgttccgtcagtt

SEQ ID NO: 27233 - protein, 362 aa, Zea mays subsp. mays
  peptide (1)..(362): Ceres Seq. ID no. 13577864
  misc_feature (100)..(362): Pfam Name: Pfam Description:  TCP-1/cpn60 chaperonin family
  misc_feature (61)..(362): NCBI GI NO: 18396719 NR Description: chaperonin, putative [Arabidopsis thaliana]
  misc_feature (61)..(362): NCBI GI NO: 6223641 NR Description: putative T-complex protein 1, theta subunit
  misc_feature (71)..(361): NCBI GI NO: 27924345 NR Description: Similar to chaperonin containing TCP1, subunit 8
  misc_feature (72)..(362): NCBI GI NO: 17066726 NR Description: CCT chaperonin theta subunit
  misc_feature (71)..(361): NCBI GI NO: 29791676 NR Description: Similar to chaperonin containing TCP1, subunit 8
  misc_feature (71)..(361): NCBI GI NO: 37362194 NR Description: chaperonin containing TCP1, subunit 8 (theta)
  misc_feature (71)..(361): NCBI GI NO: 9988062 NR Description: T-complex protein 1, theta subunit
  misc_feature (71)..(361): NCBI GI NO: 6005727 NR Description: chaperonin containing TCP1, subunit 8
  misc_feature (71)..(361): NCBI GI NO: 1136741 NR Description: KIAA0002 [Homo sapiens]
  misc_feature (71)..(361): NCBI GI NO: 23478707 NR Description: T-complex protein 1 [Plasmodium yoelii yoelii]
  misc_feature (44)..(44): Xaa is any aa, unknown or other
  misc_feature (173)..(173): Xaa is any aa, unknown or other
  misc_feature (213)..(213): Xaa is any aa, unknown or other
LEHLGGLRVSPPPRTPHPAPALALPKQRTLVGFKLSPRSASPPXCRLPPDQRPHTQPETTMVGLGSMAGYGIQSMLKEGHRHLSGLEEAVLKNIDACRELSAITRTSLGPNGMNKMVINHLDKLFVTNDAATIVNELEVQHPAAKILVLAAKAQQEEIGDGANLTISFAGELXEKAEELIRMGLHPSEIIIGYTKAINKTIEILEDLVEKGSXNMDVRNKEDVVLRMRSAVASKQFGQEDMLCPLVADACIQVCPKNPANFNVDNVRVAKLLGGGLHNSSVVRGMVLKNDAVGSIKRAEKAKIVVFAGGVDTSATETKGTVLIHSAEQLENYAKTEEAKVEELIKAVADSGAKVIVSGAAVG

SEQ ID NO: 27234 - protein, 302 aa, Zea mays subsp. mays
  peptide (1)..(302): Ceres Seq. ID no. 13577865
  misc_feature (40)..(302): Pfam Name: Pfam Description:  TCP-1/cpn60 chaperonin family
  misc_feature (1)..(302): NCBI GI NO: 18396719 NR Description: chaperonin, putative [Arabidopsis thaliana]
  misc_feature (1)..(302): NCBI GI NO: 6223641 NR Description: putative T-complex protein 1, theta subunit
  misc_feature (11)..(301): NCBI GI NO: 27924345 NR Description: Similar to chaperonin containing TCP1, subunit 8
  misc_feature (12)..(302): NCBI GI NO: 17066726 NR Description: CCT chaperonin theta subunit
  misc_feature (11)..(301): NCBI GI NO: 29791676 NR Description: Similar to chaperonin containing TCP1, subunit 8
  misc_feature (11)..(301): NCBI GI NO: 37362194 NR Description: chaperonin containing TCP1, subunit 8 (theta)
  misc_feature (11)..(301): NCBI GI NO: 9988062 NR Description: T-complex protein 1, theta subunit
  misc_feature (11)..(301): NCBI GI NO: 6005727 NR Description: chaperonin containing TCP1, subunit 8
  misc_feature (11)..(301): NCBI GI NO: 1136741 NR Description: KIAA0002 [Homo sapiens]
  misc_feature (11)..(301): NCBI GI NO: 23478707 NR Description: T-complex protein 1 [Plasmodium yoelii yoelii]
  misc_feature (113)..(113): Xaa is any aa, unknown or other
  misc_feature (153)..(153): Xaa is any aa, unknown or other
MVGLGSMAGYGIQSMLKEGHRHLSGLEEAVLKNIDACRELSAITRTSLGPNGMNKMVINHLDKLFVTNDAATIVNELEVQHPAAKILVLAAKAQQEEIGDGANLTISFAGELXEKAEELIRMGLHPSEIIIGYTKAINKTIEILEDLVEKGSXNMDVRNKEDVVLRMRSAVASKQFGQEDMLCPLVADACIQVCPKNPANFNVDNVRVAKLLGGGLHNSSVVRGMVLKNDAVGSIKRAEKAKIVVFAGGVDTSATETKGTVLIHSAEQLENYAKTEEAKVEELIKAVADSGAKVIVSGAAVG

SEQ ID NO: 27235 - protein, 296 aa, Zea mays subsp. mays
  peptide (1)..(296): Ceres Seq. ID no. 13577866
  misc_feature (34)..(296): Pfam Name: Pfam Description:  TCP-1/cpn60 chaperonin family
  misc_feature (1)..(296): NCBI GI NO: 18396719 NR Description: chaperonin, putative [Arabidopsis thaliana]
  misc_feature (1)..(296): NCBI GI NO: 6223641 NR Description: putative T-complex protein 1, theta subunit
  misc_feature (5)..(295): NCBI GI NO: 27924345 NR Description: Similar to chaperonin containing TCP1, subunit 8
  misc_feature (6)..(296): NCBI GI NO: 17066726 NR Description: CCT chaperonin theta subunit
  misc_feature (5)..(295): NCBI GI NO: 29791676 NR Description: Similar to chaperonin containing TCP1, subunit 8
  misc_feature (5)..(295): NCBI GI NO: 37362194 NR Description: chaperonin containing TCP1, subunit 8 (theta)
  misc_feature (5)..(295): NCBI GI NO: 9988062 NR Description: T-complex protein 1, theta subunit
  misc_feature (5)..(295): NCBI GI NO: 6005727 NR Description: chaperonin containing TCP1, subunit 8
  misc_feature (5)..(295): NCBI GI NO: 1136741 NR Description: KIAA0002 [Homo sapiens]
  misc_feature (5)..(295): NCBI GI NO: 23478707 NR Description: T-complex protein 1 [Plasmodium yoelii yoelii]
  misc_feature (107)..(107): Xaa is any aa, unknown or other
  misc_feature (147)..(147): Xaa is any aa, unknown or other
MAGYGIQSMLKEGHRHLSGLEEAVLKNIDACRELSAITRTSLGPNGMNKMVINHLDKLFVTNDAATIVNELEVQHPAAKILVLAAKAQQEEIGDGANLTISFAGELXEKAEELIRMGLHPSEIIIGYTKAINKTIEILEDLVEKGSXNMDVRNKEDVVLRMRSAVASKQFGQEDMLCPLVADACIQVCPKNPANFNVDNVRVAKLLGGGLHNSSVVRGMVLKNDAVGSIKRAEKAKIVVFAGGVDTSATETKGTVLIHSAEQLENYAKTEEAKVEELIKAVADSGAKVIVSGAAVG

SEQ ID NO: 27236 - DNA, 1667 bp, Zea mays subsp. mays
  misc_feature (1)..(1667): Ceres Seq. ID no. 12408225
acaccaatcctcatcacctccgagattttcatcgcctgccgcgcaatctcgggatcctagccgtccgcacatcgccgcggccttcctccgcgccacgaatggtgttctctggccgctgtcttttcccgaggacctaacccaaggcggtaggtaccagctaaaagtctaaaggcgaccaccggaccgggcggcaatgacgaccgccgcgagggagaggcgcctgccgccgacgctgcccctggccacgcttatcggtcgcgagctccgtgcggggggctccgagcgcccggccctgcgctacggccacgccggcttcgccaagcgcggcgaggactacttcctcgtcaagcccgactgcgtccgcgtccccggggaccccgcatcggcgttctcagttttcgccgtgttcgacggccacaacggcgtgtcggcggcggtctatagcaaagagcatctgctcgagcacgtcatgagcgcgctgccgccggacatcgggcgcgacgactggctgcaggcgctgccgcgcgctctcgtcgccggctttgtcaaggccgacattgatttccagcgcaagggggaggtgtcaggaaccacggcgacactggtggtcatcgatgggttcacggtcacagtggcgtcggtgggagactcgcgctgcatcctggacacgcagggcggcgagttgcagctgctaaccgtggaccaccgcctggaggagaatgcagaggagcgggagcgcgtcacggccagcggtggggaagtaggccggctcaatctcttcggtggtcaggaggttggtcctctccggtgctggcctggtggcttgtgcctttcaagatccattggggacatggatgttggggagtacattgtgcccattccacatgtcaagcaagtcaagctatcaaacgctggaggaaggctgataatagcatccgatggcatatgggatgcattatccaatgaagcagctgcaaaagcatgcagaggattgcctgcagaactggcagcgaagcttgtcgttaagcaagctctgaaaacaagcgggctaaaggatgacaccacctgtgttgtagttgacattatcccatccgatcatttgacatcaccacaattgtctccaaagaaaaatcataacaagttgaagtcactttttcgtagaaggtcgcatagttctgttggaaagctcgggggcaagtctgcctccattggttctgtggaggagttatttgaagaaggctctgcaatgttagaagaaaggttgggcaggaatttgtctttgaaagcagtttcagcaccttttcgctgtgcaatctgccaagtggaccaagagcccttcgaagatttgatgagagataatggaggtggttactgctcttccccatgcgctccatggggtggtccatatctctgtttggactgtcggaaaaagaaagatgcaatggaaggtaaaagatctagctgctccacagcatgcaggtgaaacagtccttgcctcaagcagaaaagaaccgatgagagaggataataagttgctggacccaagtataattgtttgctgaaactaactgtattgccagcccggtaaaagacatatttggctggtagtaagacctaactagtctgttacctgcgcacaatccgaatggaaaagtttgttgtcgtcg

SEQ ID NO: 27237 - protein, 429 aa, Zea mays subsp. mays
  peptide (1)..(429): Ceres Seq. ID no. 12408226
  misc_feature (1)..(429): NCBI GI NO: 34394411 NR Description: protein phosphatase 2C-like
  misc_feature (1)..(356): NCBI GI NO: 34898168 NR Description: protein phosphatase 2C-like
  misc_feature (1)..(423): NCBI GI NO: 15217454 NR Description: putative protein phosphatase 2C
  misc_feature (14)..(423): NCBI GI NO: 15221404 NR Description: putative protein phosphatase; protein id:At1g68410
  misc_feature (1)..(353): NCBI GI NO: 16930415 NR Description: At1g09160/T12M4_13 [Arabidopsis thaliana]
  misc_feature (31)..(423): NCBI GI NO: 34914644 NR Description: OSJNBa0054L14.21
  misc_feature (13)..(423): NCBI GI NO: 18401703 NR Description: expressed protein; protein id: At1g47380.1
  misc_feature (13)..(423): NCBI GI NO: 15292869 NR Description: unknown protein [Arabidopsis thaliana]
  misc_feature (14)..(421): NCBI GI NO: 14029015 NR Description: Unknown protein [Oryza sativa]
  misc_feature (26)..(429): NCBI GI NO: 38344839 NR Description: OSJNBa0064H22.20
MTTAARERRLPPTLPLATLIGRELRAGGSERPALRYGHAGFAKRGEDYFLVKPDCVRVPGDPASAFSVFAVFDGHNGVSAAVYSKEHLLEHVMSALPPDIGRDDWLQALPRALVAGFVKADIDFQRKGEVSGTTATLVVIDGFTVTVASVGDSRCILDTQGGELQLLTVDHRLEENAEERERVTASGGEVGRLNLFGGQEVGPLRCWPGGLCLSRSIGDMDVGEYIVPIPHVKQVKLSNAGGRLIIASDGIWDALSNEAAAKACRGLPAELAAKLVVKQALKTSGLKDDTTCVVVDIIPSDHLTSPQLSPKKNHNKLKSLFRRRSHSSVGKLGGKSASIGSVEELFEEGSAMLEERLGRNLSLKAVSAPFRCAICQVDQEPFEDLMRDNGGGYCSSPCAPWGGPYLCLDCRKKKDAMEGKRSSCSTACR

SEQ ID NO: 27238 - protein, 337 aa, Zea mays subsp. mays
  peptide (1)..(337): Ceres Seq. ID no. 12408227
  misc_feature (1)..(337): NCBI GI NO: 34394411 NR Description: protein phosphatase 2C-like
  misc_feature (1)..(264): NCBI GI NO: 34898168 NR Description: protein phosphatase 2C-like
  misc_feature (1)..(331): NCBI GI NO: 15217454 NR Description: putative protein phosphatase 2C
  misc_feature (1)..(331): NCBI GI NO: 15221404 NR Description: putative protein phosphatase; protein id:At1g68410
  misc_feature (1)..(261): NCBI GI NO: 16930415 NR Description: At1g09160/T12M4_13 [Arabidopsis thaliana]
  misc_feature (1)..(331): NCBI GI NO: 34914644 NR Description: OSJNBa0054L14.21
  misc_feature (1)..(331): NCBI GI NO: 18401703 NR Description: expressed protein; protein id: At1g47380.1
  misc_feature (1)..(331): NCBI GI NO: 15292869 NR Description: unknown protein [Arabidopsis thaliana]
  misc_feature (1)..(329): NCBI GI NO: 14029015 NR Description: Unknown protein [Oryza sativa]
  misc_feature (1)..(337): NCBI GI NO: 38344839 NR Description: OSJNBa0064H22.20
MSALPPDIGRDDWLQALPRALVAGFVKADIDFQRKGEVSGTTATLVVIDGFTVTVASVGDSRCILDTQGGELQLLTVDHRLEENAEERERVTASGGEVGRLNLFGGQEVGPLRCWPGGLCLSRSIGDMDVGEYIVPIPHVKQVKLSNAGGRLIIASDGIWDALSNEAAAKACRGLPAELAAKLVVKQALKTSGLKDDTTCVVVDIIPSDHLTSPQLSPKKNHNKLKSLFRRRSHSSVGKLGGKSASIGSVEELFEEGSAMLEERLGRNLSLKAVSAPFRCAICQVDQEPFEDLMRDNGGGYCSSPCAPWGGPYLCLDCRKKKDAMEGKRSSCSTACR

SEQ ID NO: 27239 - DNA, 1376 bp, Zea mays subsp. mays
  misc_feature (1)..(1376): Ceres Seq. ID no. 13491083
atggaaaggctgggtggagtctcgccttcgcactcttgtattaaagattgagcgttattcacacgagatgatccttgcacacccatatcccaaagatttctcagacaaatccaggcccttacattgcttttacttcatgggtctttggagaaaacaaaccacccaagctcaagaagctgagcaatttgatatcaggggaattgtaaatgagtttaggaatactatttgtgcatatcaacattggaaagaaggaatggacattgaagtgtcccatgtaaaaagaaaagaaatccctttgtttgtttttcctggcggagtgcgtccttctcgtacttctagaacaacgcacaagaacagccgtgccattccaacacgtgatgtttcagctgatgatcaagtgggaaacctattgggcgttgccagttgtagtgatgctcaacatgtaccatgtaaaggcagctatatgaaacaaccagaaccagattttgctggaggctttcagttgccaggaagtatttctctgttgccccctagcttacccaataaagtagttctgaatgggtctgctaattttcatgcagaatctattgagagtgaacatccagaacactatcaggaaagtaagtttgtggctgtgcagaataccgtgtgccttgtagtcaagcaacctaacagtttgctcccaaattcaaacaacaattcacaattgtatggatctgattcctctcttaacagttcaaaaagggaatgtgcaggcagtgctgcaaacaacttgctgaagttatccccagctattccagccacacctgatgaacttgatgagctgatatcctatcaaactaatcagaaagatgtaaatgctgaaaataacttggagatcggttctgaaaataacttggaacaaatatgcagtctgaggccccaagaatctaataataatctgaagcgtaaagccaatcaagagctcgagccacttgagcttgccgtcccatccactggtgctgcgccgcaatcgacaggaactgccccaagaaaaccactcaggttgaggttaacgactttggggaaaccgaagccagctgaaggaacttcctgaatggaattgcccaggagccaacatacctagagcttgtttttccttgtattgaagcaaggatatgtggaagcgctcggcacatagcctgctttggcactgcgagttgaaacgaaatggaaaacggaggccgcctgacgtaaatgagtgcgattgtaataaattgtatgtagttcatagctgggttggtatcagagttcaccatttcgtttttgctgtagcgaatttcgtttttttaaccaaagtttgactcttatattttttgaatttggaaccaaaatcc

SEQ ID NO: 27240 - protein, 364 aa, Zea mays subsp. mays
  peptide (1)..(364): Ceres Seq. ID no. 13491084
  misc_feature (1)..(112): Pfam Name: A Pfam Description: Poly
  misc_feature (1)..(128): NCBI GI NO: 15220913 NR Description: nuclear poly(A) polymerase -related
  misc_feature (1)..(128): NCBI GI NO: 25348464 NR Description: F2H15.20 protein - Arabidopsis thaliana
  misc_feature (1)..(118): NCBI GI NO: 7488023 NR Description: polynucleotide adenylyltransferase homologT16I18
  misc_feature (1)..(118): NCBI GI NO: 30689510 NR Description: poly(A) polymerase -related [Arabidopsis thaliana]
  misc_feature (1)..(118): NCBI GI NO: 30689513 NR Description: poly(A) polymerase -related [Arabidopsis thaliana]
  misc_feature (1)..(118): NCBI GI NO: 32527646 NR Description: poly(A) polymerase [Arabidopsis thaliana]
  misc_feature (1)..(136): NCBI GI NO: 30682917 NR Description: poly(A) polymerase -related [Arabidopsis thaliana]
  misc_feature (1)..(136): NCBI GI NO: 18400958 NR Description: poly(A) polymerase -related [Arabidopsis thaliana]
WKGWVESRLRTLVLKIERYSHEMILAHPYPKDFSDKSRPLHCFYFMGLWRKQTTQAQEAEQFDIRGIVNEFRNTICAYQHWKEGMDIEVSHVKRKEIPLFVFPGGVRPSRTSRTTHKNSRAIPTRDVSADDQVGNLLGVASCSDAQHVPCKGSYMKQPEPDFAGGFQLPGSISLLPPSLPNKVVLNGSANFHAESIESEHPEHYQESKFVAVQNTVCLVVKQPNSLLPNSNNNSQLYGSDSSLNSSKRECAGSAANNLLKLSPAIPATPDELDELISYQTNQKDVNAENNLEIGSENNLEQICSLRPQESNNNLKRKANQELEPLELAVPSTGAAPQSTGTAPRKPLRLRLTTLGKPKPAEGTS

SEQ ID NO: 27241 - protein, 342 aa, Zea mays subsp. mays
  peptide (1)..(342): Ceres Seq. ID no. 13491085
  misc_feature (1)..(90): Pfam Name: A Pfam Description: Poly
  misc_feature (1)..(106): NCBI GI NO: 15220913 NR Description: nuclear poly(A) polymerase -related
  misc_feature (1)..(106): NCBI GI NO: 25348464 NR Description: F2H15.20 protein - Arabidopsis thaliana
  misc_feature (1)..(96): NCBI GI NO: 7488023 NR Description: polynucleotide adenylyltransferase homologT16I18
  misc_feature (1)..(96): NCBI GI NO: 30689510 NR Description: poly(A) polymerase -related [Arabidopsis thaliana]
  misc_feature (1)..(96): NCBI GI NO: 30689513 NR Description: poly(A) polymerase -related [Arabidopsis thaliana]
  misc_feature (1)..(96): NCBI GI NO: 32527646 NR Description: poly(A) polymerase [Arabidopsis thaliana]
  misc_feature (1)..(114): NCBI GI NO: 30682917 NR Description: poly(A) polymerase -related [Arabidopsis thaliana]
  misc_feature (1)..(114): NCBI GI NO: 18400958 NR Description: poly(A) polymerase -related [Arabidopsis thaliana]
MILAHPYPKDFSDKSRPLHCFYFMGLWRKQTTQAQEAEQFDIRGIVNEFRNTICAYQHWKEGMDIEVSHVKRKEIPLFVFPGGVRPSRTSRTTHKNSRAIPTRDVSADDQVGNLLGVASCSDAQHVPCKGSYMKQPEPDFAGGFQLPGSISLLPPSLPNKVVLNGSANFHAESIESEHPEHYQESKFVAVQNTVCLVVKQPNSLLPNSNNNSQLYGSDSSLNSSKRECAGSAANNLLKLSPAIPATPDELDELISYQTNQKDVNAENNLEIGSENNLEQICSLRPQESNNNLKRKANQELEPLELAVPSTGAAPQSTGTAPRKPLRLRLTTLGKPKPAEGTS

SEQ ID NO: 27242 - protein, 319 aa, Zea mays subsp. mays
  peptide (1)..(319): Ceres Seq. ID no. 13491086
  misc_feature (1)..(67): Pfam Name: A Pfam Description: Poly
  misc_feature (1)..(83): NCBI GI NO: 15220913 NR Description: nuclear poly(A) polymerase -related
  misc_feature (1)..(83): NCBI GI NO: 25348464 NR Description: F2H15.20 protein - Arabidopsis thaliana
  misc_feature (1)..(73): NCBI GI NO: 7488023 NR Description: polynucleotide adenylyltransferase homologT16I18
  misc_feature (1)..(73): NCBI GI NO: 30689510 NR Description: poly(A) polymerase -related [Arabidopsis thaliana]
  misc_feature (1)..(73): NCBI GI NO: 30689513 NR Description: poly(A) polymerase -related [Arabidopsis thaliana]
  misc_feature (1)..(73): NCBI GI NO: 32527646 NR Description: poly(A) polymerase [Arabidopsis thaliana]
  misc_feature (1)..(91): NCBI GI NO: 30682917 NR Description: poly(A) polymerase -related [Arabidopsis thaliana]
  misc_feature (1)..(91): NCBI GI NO: 18400958 NR Description: poly(A) polymerase -related [Arabidopsis thaliana]
MGLWRKQTTQAQEAEQFDIRGIVNEFRNTICAYQHWKEGMDIEVSHVKRKEIPLFVFPGGVRPSRTSRTTHKNSRAIPTRDVSADDQVGNLLGVASCSDAQHVPCKGSYMKQPEPDFAGGFQLPGSISLLPPSLPNKVVLNGSANFHAESIESEHPEHYQESKFVAVQNTVCLVVKQPNSLLPNSNNNSQLYGSDSSLNSSKRECAGSAANNLLKLSPAIPATPDELDELISYQTNQKDVNAENNLEIGSENNLEQICSLRPQESNNNLKRKANQELEPLELAVPSTGAAPQSTGTAPRKPLRLRLTTLGKPKPAEGTS

SEQ ID NO: 27243 - DNA, 1807 bp, Zea mays subsp. mays
  misc_feature (1)..(1807): Ceres Seq. ID no. 12352361
gcgaagaggggcagagggcagcaagcagccgttcccccaaaaaaggccagagctcagcagagccccgcaggccgcacccaccagaaaccccagtcgatcggcggcggcgatgtcgctgtcctcggtgaagatcggcgaggaggtttggctcacatgcctctcccacgccctcactaccgagaccgaggaggtcatgggcctcctcctcggcgacatcgagctttccagcaagggcgccaccgcccttatatggggagcgtctccgcagatgaggtgcgagcggaagaaggaccgcgtcgaggtcaacccggatcttctcgccgccgcatccgcgcaagccgacaaaatgacggccaccatcaagaagactacgagggtgatcggatggtaccactcgcacccacatatcactgttctgccgtcccatgtagatgttcgtacccaagcgatgtttcagttgctggatacaggctttgtgggccttatattttcttgttttagtgaagatgctcaaaaggttggaaaaatccaagtgactgcctttcagtcagagggtggacaacagcatgcccttcctcttgccattgctccagttattgaccttgattcatcccttagttcatcagataatgcactcacttcacattctgcattggttgaaggcatggaacaggacacaggggattccagggcctcaaagcataacaaggcctggaaaagatctttggatttctactctcatcctgacacaaatcattccacgaattatcaacccaatgaaaacactctcgctctgtacaatcctgataacacacaagaagcgcctgttgatccatacgattcagatatgactcaaagcctccaggaggctttgcaccggtcaactatggacataagtggtgcagagtatagagggaaggaggtgccactttttgtgctcccgacaaggtatctcctcaagctggacaccacgatgacctcgtactgtgatatgcaacgagtcctgtttgaagaggagcaatcagcatataatcaagctatgcaacaaaatatttgtgatgggaaaattcaccctcttacatccattcactgtacgtctacatacaactcctctctatgcaaactaatggagtattgtttgagtccagctgttattacgcttcaggatcgcctgaaggaaaatgaacttcggctatctatgttaaaagaggagtgtaagcaacttgaggctgatacccaaggcatgagaaatggttctcctcgtcgcctcatgaatcacggagctggtggcagcggttcacctatggctcagagcaggcatcctttctccagccaagggagccctagaagcccgagcggcggcagccggaggagggcttgatgatgatcttgctccgcctgatgcgttgatgaactgtccgttgtggcttaaccagatgcttcctgaaaacccagatatttgacggacgaagtgcccagacaacagacactgtacctgtacatacccattgccgttcagcgctgtgctattgtggaactccaacggtctcattgtgtttttttgtagtattgggggcgttccttatcctgttgccggagctgtgccattatcctttccctggttcatggttggcatgagcttttatagcctgtacactgtagactctgtactagaggttttccagaaaggctgaactgccgctgctgggatgtgttgttccgggcatatgcaaagatgaaggctttctttgcttttgtaattgaaaaaaaaaccgacttcggtagcaatacattttcttgaaatgcc

SEQ ID NO: 27244 - protein, 459 aa, Zea mays subsp. mays
  peptide (1)..(459): Ceres Seq. ID no. 12352362
  misc_feature (37)..(157): Pfam Name: Pfam Description:  Mov34/MPN/PAD-1 family
  misc_feature (37)..(429): NCBI GI NO: 20147355 NR Description: At1g80210/F18B13_28 [Arabidopsis thaliana]
  misc_feature (37)..(433): NCBI GI NO: 19715647 NR Description: AT3g06820/F3E22_4 [Arabidopsis thaliana]
  misc_feature (44)..(433): NCBI GI NO: 30680023 NR Description: expressed protein [Arabidopsis thaliana]
  misc_feature (44)..(351): NCBI GI NO: 7549631 NR Description: unknown protein [Arabidopsis thaliana]
  misc_feature (380)..(433): NCBI GI NO: 7549631 NR Description: unknown protein [Arabidopsis thaliana]
  misc_feature (145)..(350): NCBI GI NO: 25406643 NR Description: hypothetical protein F18B13.28
  misc_feature (380)..(429): NCBI GI NO: 25406643 NR Description: hypothetical protein F18B13.28
  misc_feature (44)..(73): NCBI GI NO: 25406643 NR Description: hypothetical protein F18B13.28
  misc_feature (44)..(350): NCBI GI NO: 15220090 NR Description: hypothetical protein; protein id: At1g80210.1
  misc_feature (380)..(429): NCBI GI NO: 15220090 NR Description: hypothetical protein; protein id: At1g80210.1
RRGAEGSKQPFPQKRPELSRAPQAAPTRNPSRSAAAMSLSSVKIGEEVWLTCLSHALTTETEEVMGLLLGDIELSSKGATALIWGASPQMRCERKKDRVEVNPDLLAAASAQADKMTATIKKTTRVIGWYHSHPHITVLPSHVDVRTQAMFQLLDTGFVGLIFSCFSEDAQKVGKIQVTAFQSEGGQQHALPLAIAPVIDLDSSLSSSDNALTSHSALVEGMEQDTGDSRASKHNKAWKRSLDFYSHPDTNHSTNYQPNENTLALYNPDNTQEAPVDPYDSDMTQSLQEALHRSTMDISGAEYRGKEVPLFVLPTRYLLKLDTTMTSYCDMQRVLFEEEQSAYNQAMQQNICDGKIHPLTSIHCTSTYNSSLCKLMEYCLSPAVITLQDRLKENELRLSMLKEECKQLEADTQGMRNGSPRRLMNHGAGGSGSPMAQSRHPFSSQGSPRSPSGGSRRRA

SEQ ID NO: 27245 - protein, 423 aa, Zea mays subsp. mays
  peptide (1)..(423): Ceres Seq. ID no. 12352363
  misc_feature (1)..(121): Pfam Name: Pfam Description:  Mov34/MPN/PAD-1 family
  misc_feature (1)..(393): NCBI GI NO: 20147355 NR Description: At1g80210/F18B13_28 [Arabidopsis thaliana]
  misc_feature (1)..(397): NCBI GI NO: 19715647 NR Description: AT3g06820/F3E22_4 [Arabidopsis thaliana]
  misc_feature (8)..(397): NCBI GI NO: 30680023 NR Description: expressed protein [Arabidopsis thaliana]
  misc_feature (8)..(315): NCBI GI NO: 7549631 NR Description: unknown protein [Arabidopsis thaliana]
  misc_feature (344)..(397): NCBI GI NO: 7549631 NR Description: unknown protein [Arabidopsis thaliana]
  misc_feature (109)..(314): NCBI GI NO: 25406643 NR Description: hypothetical protein F18B13.28
  misc_feature (344)..(393): NCBI GI NO: 25406643 NR Description: hypothetical protein F18B13.28
  misc_feature (8)..(37): NCBI GI NO: 25406643 NR Description: hypothetical protein F18B13.28
  misc_feature (8)..(314): NCBI GI NO: 15220090 NR Description: hypothetical protein; protein id: At1g80210.1
  misc_feature (344)..(393): NCBI GI NO: 15220090 NR Description: hypothetical protein; protein id: At1g80210.1
MSLSSVKIGEEVWLTCLSHALTTETEEVMGLLLGDIELSSKGATALIWGASPQMRCERKKDRVEVNPDLLAAASAQADKMTATIKKTTRVIGWYHSHPHITVLPSHVDVRTQAMFQLLDTGFVGLIFSCFSEDAQKVGKIQVTAFQSEGGQQHALPLAIAPVIDLDSSLSSSDNALTSHSALVEGMEQDTGDSRASKHNKAWKRSLDFYSHPDTNHSTNYQPNENTLALYNPDNTQEAPVDPYDSDMTQSLQEALHRSTMDISGAEYRGKEVPLFVLPTRYLLKLDTTMTSYCDMQRVLFEEEQSAYNQAMQQNICDGKIHPLTSIHCTSTYNSSLCKLMEYCLSPAVITLQDRLKENELRLSMLKEECKQLEADTQGMRNGSPRRLMNHGAGGSGSPMAQSRHPFSSQGSPRSPSGGSRRRA

SEQ ID NO: 27246 - protein, 395 aa, Zea mays subsp. mays
  peptide (1)..(395): Ceres Seq. ID no. 12352364
  misc_feature (1)..(93): Pfam Name: Pfam Description:  Mov34/MPN/PAD-1 family
  misc_feature (1)..(365): NCBI GI NO: 20147355 NR Description: At1g80210/F18B13_28 [Arabidopsis thaliana]
  misc_feature (1)..(369): NCBI GI NO: 19715647 NR Description: AT3g06820/F3E22_4 [Arabidopsis thaliana]
  misc_feature (1)..(369): NCBI GI NO: 30680023 NR Description: expressed protein [Arabidopsis thaliana]
  misc_feature (1)..(287): NCBI GI NO: 7549631 NR Description: unknown protein [Arabidopsis thaliana]
  misc_feature (316)..(369): NCBI GI NO: 7549631 NR Description: unknown protein [Arabidopsis thaliana]
  misc_feature (81)..(286): NCBI GI NO: 25406643 NR Description: hypothetical protein F18B13.28
  misc_feature (316)..(365): NCBI GI NO: 25406643 NR Description: hypothetical protein F18B13.28
  misc_feature (1)..(286): NCBI GI NO: 15220090 NR Description: hypothetical protein; protein id: At1g80210.1
  misc_feature (316)..(365): NCBI GI NO: 15220090 NR Description: hypothetical protein; protein id: At1g80210.1
  misc_feature (27)..(137): NCBI GI NO: 12848275 NR Description: unnamed protein product [Mus musculus]
MGLLLGDIELSSKGATALIWGASPQMRCERKKDRVEVNPDLLAAASAQADKMTATIKKTTRVIGWYHSHPHITVLPSHVDVRTQAMFQLLDTGFVGLIFSCFSEDAQKVGKIQVTAFQSEGGQQHALPLAIAPVIDLDSSLSSSDNALTSHSALVEGMEQDTGDSRASKHNKAWKRSLDFYSHPDTNHSTNYQPNENTLALYNPDNTQEAPVDPYDSDMTQSLQEALHRSTMDISGAEYRGKEVPLFVLPTRYLLKLDTTMTSYCDMQRVLFEEEQSAYNQAMQQNICDGKIHPLTSIHCTSTYNSSLCKLMEYCLSPAVITLQDRLKENELRLSMLKEECKQLEADTQGMRNGSPRRLMNHGAGGSGSPMAQSRHPFSSQGSPRSPSGGSRRRA

SEQ ID NO: 27247 - DNA, 1070 bp, Zea mays subsp. mays
  misc_feature (1)..(1070): Ceres Seq. ID no. 12409467
aaataaaacacagcctcacgatccccgcactgcccggtgccccgcgagctgctcctctacacacgccagcgagaaccagcccaccccacctgctcgatcggcgcaccgtcccgcaggccgcagggccgtcgtcagccatgatccagctcctgttctcgctgctggccgcggaggcggcgctggtgctggcgctgctcttccccacgcccgtgcgccgcctggctctgctcgccatcgatcgcgccaagagggggcgcggacccgtcatggccaagaccatcgcgggcaccatgctcctcgtactagtctctgctttctacagcgtcgctaagatccgccgccgcgagggggagctcggacagctcacgcccaccgaccaggtgctcgccagtcgccacctcctcgaggcgtcgctcatgggatactctctgtttcttggattaattattgaccgattacatcactatattagagagttgagaatgttgaggaaagacatggaggctgtaacagagcagggccggacactagaagcagcaaaatccggaagcactgacgagattcaaggataccagaaagaggttgcgagtttgaaggaacaagtgcaagagctccagaaccaatcacaaaagaaaacagagcgactaaaaaccgccgaagcaaattctgtagctttacagaaacaatcggaaggtttactcgctgaatatgaccgtctcattgcggagaacagggatttgagggaccaactgcagtcaattgacctccgcctgtcccattctggcggaaagaagaactcgtaaagcaagttctgcaattttgaagagcatgattttctgtagattttcttccaataggttaactgtactcggttttctctattatcataatcgcccatgtaattcagtagatggatttgcctatgtaattcagtagatgcgtgcgtgtatgtatgagtggaccatttaatgctttatggactgggtggcatggactcagacccggcatttggccatagtttatggcctaacgtcttggttcagtgagatcaaataagaacctgcatcttc

SEQ ID NO: 27248 - protein, 266 aa, Zea mays subsp. mays
  peptide (1)..(266): Ceres Seq. ID no. 12409468
  misc_feature (49)..(237): Pfam Name: Pfam Description:  B-cell receptor-associated protein 31-like
  misc_feature (46)..(264): NCBI GI NO: 21553655 NR Description: unknown [Arabidopsis thaliana]
  misc_feature (46)..(264): NCBI GI NO: 9759015 NR Description: gene_id:K16E1.4~unknown protein
  misc_feature (46)..(264): NCBI GI NO: 18422225 NR Description: expressed protein; protein id: At5g42570
  misc_feature (46)..(266): NCBI GI NO: 22655198 NR Description: unknown protein [Arabidopsis thaliana]
  misc_feature (46)..(250): NCBI GI NO: 34897474 NR Description: unknown protein
  misc_feature (46)..(250): NCBI GI NO: 15239667 NR Description: putative protein; protein id: At5g48660.1
  misc_feature (46)..(250): NCBI GI NO: 15231412 NR Description: unknown protein; protein id: At3g07190.1
  misc_feature (46)..(196): NCBI GI NO: 30682503 NR Description: expressed protein [Arabidopsis thaliana]
  misc_feature (46)..(175): NCBI GI NO: 18402620 NR Description: expressed protein; protein id: At3g20450
IKHSLTIPALPGAPRAAPLHTPARTSPPHLLDRRTVPQAAGPSSAMIQLLFSLLAAEAALVLALLFPTPVRRLALLAIDRAKRGRGPVMAKTIAGTMLLVLVSAFYSVAKIRRREGELGQLTPTDQVLASRHLLEASLMGYSLFLGLIIDRLHHYIRELRMLRKDMEAVTEQGRTLEAAKSGSTDEIQGYQKEVASLKEQVQELQNQSQKKTERLKTAEANSVALQKQSEGLLAEYDRLIAENRDLRDQLQSIDLRLSHSGGKKNS

SEQ ID NO: 27249 - protein, 221 aa, Zea mays subsp. mays
  peptide (1)..(221): Ceres Seq. ID no. 12409469
  misc_feature (4)..(192): Pfam Name: Pfam Description:  B-cell receptor-associated protein 31-like
  misc_feature (1)..(219): NCBI GI NO: 21553655 NR Description: unknown [Arabidopsis thaliana]
  misc_feature (1)..(219): NCBI GI NO: 9759015 NR Description: gene_id:K16E1.4~unknown protein
  misc_feature (1)..(219): NCBI GI NO: 18422225 NR Description: expressed protein; protein id: At5g42570
  misc_feature (1)..(221): NCBI GI NO: 22655198 NR Description: unknown protein [Arabidopsis thaliana]
  misc_feature (1)..(205): NCBI GI NO: 34897474 NR Description: unknown protein
  misc_feature (1)..(205): NCBI GI NO: 15239667 NR Description: putative protein; protein id: At5g48660.1
  misc_feature (1)..(205): NCBI GI NO: 15231412 NR Description: unknown protein; protein id: At3g07190.1
  misc_feature (1)..(151): NCBI GI NO: 30682503 NR Description: expressed protein [Arabidopsis thaliana]
  misc_feature (1)..(130): NCBI GI NO: 18402620 NR Description: expressed protein; protein id: At3g20450
MIQLLFSLLAAEAALVLALLFPTPVRRLALLAIDRAKRGRGPVMAKTIAGTMLLVLVSAFYSVAKIRRREGELGQLTPTDQVLASRHLLEASLMGYSLFLGLIIDRLHHYIRELRMLRKDMEAVTEQGRTLEAAKSGSTDEIQGYQKEVASLKEQVQELQNQSQKKTERLKTAEANSVALQKQSEGLLAEYDRLIAENRDLRDQLQSIDLRLSHSGGKKNS

SEQ ID NO: 27250 - protein, 178 aa, Zea mays subsp. mays
  peptide (1)..(178): Ceres Seq. ID no. 12409470
  misc_feature (1)..(149): Pfam Name: Pfam Description:  B-cell receptor-associated protein 31-like
  misc_feature (1)..(176): NCBI GI NO: 21553655 NR Description: unknown [Arabidopsis thaliana]
  misc_feature (1)..(176): NCBI GI NO: 9759015 NR Description: gene_id:K16E1.4~unknown protein
  misc_feature (1)..(176): NCBI GI NO: 18422225 NR Description: expressed protein; protein id: At5g42570
  misc_feature (1)..(178): NCBI GI NO: 22655198 NR Description: unknown protein [Arabidopsis thaliana]
  misc_feature (1)..(162): NCBI GI NO: 34897474 NR Description: unknown protein
  misc_feature (1)..(162): NCBI GI NO: 15239667 NR Description: putative protein; protein id: At5g48660.1
  misc_feature (1)..(162): NCBI GI NO: 15231412 NR Description: unknown protein; protein id: At3g07190.1
  misc_feature (1)..(108): NCBI GI NO: 30682503 NR Description: expressed protein [Arabidopsis thaliana]
  misc_feature (1)..(87): NCBI GI NO: 18402620 NR Description: expressed protein; protein id: At3g20450
MAKTIAGTMLLVLVSAFYSVAKIRRREGELGQLTPTDQVLASRHLLEASLMGYSLFLGLIIDRLHHYIRELRMLRKDMEAVTEQGRTLEAAKSGSTDEIQGYQKEVASLKEQVQELQNQSQKKTERLKTAEANSVALQKQSEGLLAEYDRLIAENRDLRDQLQSIDLRLSHSGGKKNS

SEQ ID NO: 27251 - DNA, 1545 bp, Zea mays subsp. mays
  misc_feature (1)..(1545): Ceres Seq. ID no. 12343144
agccttccaatctctaggagaaacgtcttgccctccactccaacatcgacacgactactcgtccgactagaaccaaacttttcaatccatcgttcgcagttcagttcacacttcacaggcgagcgcgaccatggatacccaagcacgtccggttccccgcgtcaagctcggcacccagggattcgaggtgtccaagctggggttcgggtgcatggggctgacgggcgcatacaactccccgctggacgacgaggccggcatcgccgtcatcgcgcacgctttcagccgcggagtcaccttgttcgacacctccgacgtatacgggcccctcaccaacgaaatcctcctcggcaaggcgctgaagcagctgccgcgggagcaggtgcaggtggccaccaagttcgggatacggcgtgacgagagcggcacgcggaccgtgtgcggccggccggagtacgttcgtgcctgctgcgaggccagcctgcgccgcctcggcatcgactgcatcgacctctactaccagcaccgcattgacaccacaattcccatcgaggagacgactggcgagctcaagaagctggtggaggagggtaaggtcaagtacatcggattgtcagaggcgagcccggacaccatcaggcgtgcacatgctgtgcacccgatcaccgcggtgcagatggagtggtctctctggtctcgcgacattgagcccgaaattgtgccgctctgcagagaattgggcattggaattgtaccatacagtcctcttggccgtgggttttttggtggaagaggagtgaaagagcaagtgtctgctgaatctaatctgcatgggatcccaaggtttgctccagaaaatttggagaagaacaagcaaatttatttgcgaatggaagaactggccaataagcaccagtgcagccctgctcagctagctttagcatgggttttgcatcaaggcgatgatgtggttcctataccagggacaaccaaaatcaagaatctagattccaacattgactccttgaaggtgaaactgacagacgaagatctgaaagaaatgggcagccagatacgggaagaagatgtggctggtgggagacaattcacctcatatgcacataccacctggaagtacgctgatacgccaaagaagcagagctaaaaaatacttgaaagcaacaatgatgatgcgattggtatggccctctccctgcagatgccctcaggaacattgtcgatgtccctttgtgaacagcctcttctagtaaataaataatgtatggagaagaacaatgaagggcccagtcttgttggaagtacgaataatgtacagttacaggaatgtgtgctaccatatatttcgtcgcatcagtttgagttgtggttgtgtgaacctaccatatatttcctcgcaaaagaataatgtatagttacagtaatgtgtgctatctcaatcagcatgcaggcaggaaaaacatggcaccatatgtagtacagtacatgaattctcgcttgtaatccacatttagacctgaaaatgcg

SEQ ID NO: 27252 - protein, 344 aa, Zea mays subsp. mays
  peptide (1)..(344): Ceres Seq. ID no. 12343145
  misc_feature (8)..(344): NCBI GI NO: 37534402 NR Description: putative polyprotein
  misc_feature (202)..(342): NCBI GI NO: 34912706 NR Description: putative auxin-induced protein
  misc_feature (20)..(143): NCBI GI NO: 34912706 NR Description: putative auxin-induced protein
  misc_feature (1)..(344): NCBI GI NO: 38344997 NR Description: OSJNBa0008A08.11
  misc_feature (8)..(344): NCBI GI NO: 15219786 NR Description: auxin-induced protein, putative
  misc_feature (4)..(340): NCBI GI NO: 18406861 NR Description: auxin-induced protein, putative
  misc_feature (4)..(340): NCBI GI NO: 6562980 NR Description: auxin-induced atb2 [Arabidopsis thaliana]
  misc_feature (4)..(344): NCBI GI NO: 30102704 NR Description: At1g60680 [Arabidopsis thaliana]
  misc_feature (4)..(344): NCBI GI NO: 25316216 NR Description: hypothetical protein F8A5.24
  misc_feature (4)..(344): NCBI GI NO: 30696459 NR Description: aldo/keto reductase family [Arabidopsis thaliana]
MDTQARPVPRVKLGTQGFEVSKLGFGCMGLTGAYNSPLDDEAGIAVIAHAFSRGVTLFDTSDVYGPLTNEILLGKALKQLPREQVQVATKFGIRRDESGTRTVCGRPEYVRACCEASLRRLGIDCIDLYYQHRIDTTIPIEETTGELKKLVEEGKVKYIGLSEASPDTIRRAHAVHPITAVQMEWSLWSRDIEPEIVPLCRELGIGIVPYSPLGRGFFGGRGVKEQVSAESNLHGIPRFAPENLEKNKQIYLRMEELANKHQCSPAQLALAWVLHQGDDVVPIPGTTKIKNLDSNIDSLKVKLTDEDLKEMGSQIREEDVAGGRQFTSYAHTTWKYADTPKKQS

SEQ ID NO: 27253 - protein, 317 aa, Zea mays subsp. mays
  peptide (1)..(317): Ceres Seq. ID no. 12343146
  misc_feature (1)..(317): NCBI GI NO: 37534402 NR Description: putative polyprotein
  misc_feature (175)..(315): NCBI GI NO: 34912706 NR Description: putative auxin-induced protein
  misc_feature (1)..(116): NCBI GI NO: 34912706 NR Description: putative auxin-induced protein
  misc_feature (1)..(317): NCBI GI NO: 38344997 NR Description: OSJNBa0008A08.11
  misc_feature (1)..(317): NCBI GI NO: 15219786 NR Description: auxin-induced protein, putative
  misc_feature (1)..(313): NCBI GI NO: 18406861 NR Description: auxin-induced protein, putative
  misc_feature (1)..(313): NCBI GI NO: 6562980 NR Description: auxin-induced atb2 [Arabidopsis thaliana]
  misc_feature (1)..(317): NCBI GI NO: 30102704 NR Description: At1g60680 [Arabidopsis thaliana]
  misc_feature (1)..(317): NCBI GI NO: 25316216 NR Description: hypothetical protein F8A5.24
  misc_feature (1)..(317): NCBI GI NO: 30696459 NR Description: aldo/keto reductase family [Arabidopsis thaliana]
MGLTGAYNSPLDDEAGIAVIAHAFSRGVTLFDTSDVYGPLTNEILLGKALKQLPREQVQVATKFGIRRDESGTRTVCGRPEYVRACCEASLRRLGIDCIDLYYQHRIDTTIPIEETTGELKKLVEEGKVKYIGLSEASPDTIRRAHAVHPITAVQMEWSLWSRDIEPEIVPLCRELGIGIVPYSPLGRGFFGGRGVKEQVSAESNLHGIPRFAPENLEKNKQIYLRMEELANKHQCSPAQLALAWVLHQGDDVVPIPGTTKIKNLDSNIDSLKVKLTDEDLKEMGSQIREEDVAGGRQFTSYAHTTWKYADTPKKQS

SEQ ID NO: 27254 - DNA, 1867 bp, Zea mays subsp. mays
  misc_feature (1)..(1867): Ceres Seq. ID no. 12595058
aatcccccgccgcgttcccccgcacgctttgacccataaagtcgatccatctccgagcaccaagttgaacacgcgatcccattcccattctcttgctcaatacaacctccggcttcagcaagccgcagcgccaagcctagaagcggagcgcggaacacacgaggccaggaagaggaggtgctgccgtccccgcgccgccgctgtgggagtgcggggaatggggcggcacggcgtggaccagatcggcgctgtggcagcgttcgtctgggtcaccctccttcccttgctgcttgtgtgcgtcgtgtggccgggcgcccaggccggccatacaagcgagtaccggcgccaactcggctccgccatcgacatgccactcgacgccgatgtcttccgccctccctcgggctacaatgcgcccgagcaggttcacatcacacaaggcaatcatgatggcacagccatgataatctcatgggtgacaacaagtgagcctggctcgagtactgtgatctacgggacttcagaggataacctcaactatactgcaaatgggaagcatactcagtatactttctacaactacacctcaggatacattcatcattgcacaataaaaaagttggagtttgacacactattactatgctgttgggattggacaaactgtgaggaagttttggtttttgacccctccaaaaagcggcccagatgttccatatacactcggtctcataggtgatcttggtcagagctttgattccaatgttacgctcacccattatgagtccaatgcaaaagcacagggagttctttttgttggggacttgtcatatgcagataactacccatatcatgataatgtgagatgggatacgtgggcaagatttgtagaaaggagcgtcgcgtaccagccttggatctggactgctggaaatcatgagatagatttcgctcctgaacttggtgaaacaaagccattcaagccattcagccataggtaccccacaccctacaaggcttctggtagcacggcaccttattggtattccatcaaaagggcctctgcctacattattgtcttggcatcgtactcagcatacggcaaatacactcctcagtacaagtggcttgaagctgaatttcccaaggtcaacaggagtgaaacgccatggttggttgtcctcatgcatgctccatggtacaatagctataactatcactacatggaaggtgaaaccatgagggtgatgtatgagccatggttcgtgaagtacaaagttgacgttgtgtttgcaggacatgtccacgcctacgaacgcacacacaggatatcgaatgtcgcatacaatgttgtgaatggcctgtgcactccaatccctgatcaatcggccccagtttacatcaccatcggtgatggagggaaccaggaaggattggctaccaacatgtcgcagccgcagccgagctactcggccttcagggaggcgagcttcgggcacgccatcctggacatcaagaaccggacacaccgcgtactacacgtggcaccgcaacccaggacgggagcgcggtggccgccgactccatgtggtttaccaatcggtactgggaaccgacggacgattcggccgacgatttccagtgaggacgagagctgcagctgggttggttattcgttgcggttcctcacgaccaataagcatcgccctgaatacacgaagcctccgaagctccgatgcaggcctctgccacttcttatagctctccttggtcgttgcccgtcttctcttggagagagaaaaaaacgtgtgaagagtaaaacggagtgtctctactctgattgtgtaaagaactcacgttcacagcg

SEQ ID NO: 27255 - protein, 245 aa, Zea mays subsp. mays
  peptide (1)..(245): Ceres Seq. ID no. 12595059
  misc_feature (78)..(211): NCBI GI NO: 34910020 NR Description: putative purple acid phosphatase
  misc_feature (92)..(211): NCBI GI NO: 11262827 NR Description: acid phosphatase (EC 3.1.3.2) purple 1, precursor
  misc_feature (73)..(211): NCBI GI NO: 27597229 NR Description: purple acid phosphatase [Nicotiana tabacum]
  misc_feature (92)..(211): NCBI GI NO: 11262828 NR Description: acid phosphatase (EC 3.1.3.2) purple 2, precursor
  misc_feature (95)..(211): NCBI GI NO: 15227205 NR Description: putative purple acid phosphatase precursor
  misc_feature (108)..(211): NCBI GI NO: 11262830 NR Description: acid phosphatase (EC 3
  misc_feature (92)..(211): NCBI GI NO: 25752260 NR Description: acid phosphatase (EC 3.1.3.2) purple, precursor
  misc_feature (84)..(210): NCBI GI NO: 7209894 NR Description: purple acid phosphatase [Spirodela punctata]
  misc_feature (77)..(211): NCBI GI NO: 27597239 NR Description: purple acid phosphatase [Nicotiana tabacum]
  misc_feature (122)..(211): NCBI GI NO: 4210712 NR Description: purple acid phosphatase [Ipomoea batatas]
IPRRVPPHALTHKVDPSPSTKLNTRSHSHSLAQYNLRLQQAAAPSLEAERGTHEARKRRCCRPRAAAVGVRGMGRHGVDQIGAVAAFVWVTLLPLLLVCVVWPGAQAGHTSEYRRQLGSAIDMPLDADVFRPPSGYNAPEQVHITQGNHDGTAMIISWVTTSEPGSSTVIYGTSEDNLNYTANGKHTQYTFYNYTSGYIHHCTIKKLEFDTLLLCCWDWTNCEEVLVFDPSKKRPRCSIYTRSHR

SEQ ID NO: 27256 - protein, 227 aa, Zea mays subsp. mays
  peptide (1)..(227): Ceres Seq. ID no. 12595060
  misc_feature (1)..(115): NCBI GI NO: 34910020 NR Description: putative purple acid phosphatase
  misc_feature (1)..(115): NCBI GI NO: 11262827 NR Description: acid phosphatase (EC 3.1.3.2) purple 1, precursor
  misc_feature (1)..(115): NCBI GI NO: 27597229 NR Description: purple acid phosphatase [Nicotiana tabacum]
  misc_feature (1)..(115): NCBI GI NO: 11262828 NR Description: acid phosphatase (EC 3.1.3.2) purple 2, precursor
  misc_feature (1)..(115): NCBI GI NO: 15227205 NR Description: putative purple acid phosphatase precursor
  misc_feature (1)..(115): NCBI GI NO: 11262830 NR Description: acid phosphatase (EC 3
  misc_feature (1)..(115): NCBI GI NO: 25752260 NR Description: acid phosphatase (EC 3.1.3.2) purple, precursor
  misc_feature (1)..(115): NCBI GI NO: 7209894 NR Description: purple acid phosphatase [Spirodela punctata]
  misc_feature (1)..(115): NCBI GI NO: 27597239 NR Description: purple acid phosphatase [Nicotiana tabacum]
  misc_feature (1)..(115): NCBI GI NO: 4210712 NR Description: purple acid phosphatase [Ipomoea batatas]
MHAPWYNSYNYHYMEGETMRVMYEPWFVKYKVDVVFAGHVHAYERTHRISNVAYNVVNGLCTPIPDQSAPVYITIGDGGNQEGLATNMSQPQPSYSAFREASFGHAILDIKNRTHRVLHVAPQPRTGARWPPTPCGLPIGTGNRRTIRPTISSEDESCSWVGYSLRFLTTNKHRPEYTKPPKLRCRPLPLLIALLGRCPSSLGERKKRVKSKTECLYSDCVKNSRSQ

SEQ ID NO: 27257 - protein, 214 aa, Zea mays subsp. mays
  peptide (1)..(214): Ceres Seq. ID no. 12595061
  misc_feature (1)..(102): NCBI GI NO: 34910020 NR Description: putative purple acid phosphatase
  misc_feature (1)..(102): NCBI GI NO: 11262827 NR Description: acid phosphatase (EC 3.1.3.2) purple 1, precursor
  misc_feature (1)..(102): NCBI GI NO: 27597229 NR Description: purple acid phosphatase [Nicotiana tabacum]
  misc_feature (1)..(102): NCBI GI NO: 11262828 NR Description: acid phosphatase (EC 3.1.3.2) purple 2, precursor
  misc_feature (1)..(102): NCBI GI NO: 15227205 NR Description: putative purple acid phosphatase precursor
  misc_feature (1)..(102): NCBI GI NO: 11262830 NR Description: acid phosphatase (EC 3
  misc_feature (1)..(102): NCBI GI NO: 25752260 NR Description: acid phosphatase (EC 3.1.3.2) purple, precursor
  misc_feature (1)..(102): NCBI GI NO: 7209894 NR Description: purple acid phosphatase [Spirodela punctata]
  misc_feature (1)..(102): NCBI GI NO: 27597239 NR Description: purple acid phosphatase [Nicotiana tabacum]
  misc_feature (1)..(102): NCBI GI NO: 4210712 NR Description: purple acid phosphatase [Ipomoea batatas]
MEGETMRVMYEPWFVKYKVDVVFAGHVHAYERTHRISNVAYNVVNGLCTPIPDQSAPVYITIGDGGNQEGLATNMSQPQPSYSAFREASFGHAILDIKNRTHRVLHVAPQPRTGARWPPTPCGLPIGTGNRRTIRPTISSEDESCSWVGYSLRFLTTNKHRPEYTKPPKLRCRPLPLLIALLGRCPSSLGERKKRVKSKTECLYSDCVKNSRSQ

SEQ ID NO: 27258 - protein, 173 aa, Zea mays subsp. mays
  peptide (1)..(173): Ceres Seq. ID no. 12595062
  misc_feature (6)..(139): NCBI GI NO: 34910020 NR Description: putative purple acid phosphatase
  misc_feature (20)..(139): NCBI GI NO: 11262827 NR Description: acid phosphatase (EC 3.1.3.2) purple 1, precursor
  misc_feature (1)..(139): NCBI GI NO: 27597229 NR Description: purple acid phosphatase [Nicotiana tabacum]
  misc_feature (20)..(139): NCBI GI NO: 11262828 NR Description: acid phosphatase (EC 3.1.3.2) purple 2, precursor
  misc_feature (23)..(139): NCBI GI NO: 15227205 NR Description: putative purple acid phosphatase precursor
  misc_feature (36)..(139): NCBI GI NO: 11262830 NR Description: acid phosphatase (EC 3
  misc_feature (20)..(139): NCBI GI NO: 25752260 NR Description: acid phosphatase (EC 3.1.3.2) purple, precursor
  misc_feature (12)..(138): NCBI GI NO: 7209894 NR Description: purple acid phosphatase [Spirodela punctata]
  misc_feature (5)..(139): NCBI GI NO: 27597239 NR Description: purple acid phosphatase [Nicotiana tabacum]
  misc_feature (50)..(139): NCBI GI NO: 4210712 NR Description: purple acid phosphatase [Ipomoea batatas]
MGRHGVDQIGAVAAFVWVTLLPLLLVCVVWPGAQAGHTSEYRRQLGSAIDMPLDADVFRPPSGYNAPEQVHITQGNHDGTAMIISWVTTSEPGSSTVIYGTSEDNLNYTANGKHTQYTFYNYTSGYIHHCTIKKLEFDTLLLCCWDWTNCEEVLVFDPSKKRPRCSIYTRSHR

SEQ ID NO: 27259 - DNA, 1811 bp, Zea mays subsp. mays
  misc_feature (1)..(1811): Ceres Seq. ID no. 12406923
ctcttctagtcgcctctacccagttacttgcatcgccccgtcaagcacgccgccggcacgcggccctcggtctccccgccgcgccctctgcctccgcccgaacaaagccgtctcgccgtcgcgttgccttccttaccgtccaccgcgggcagccgtcctagtactcggttggtcctcccctgctgcccttctacggtggaggagcggagatcctgccgttttccggctgatttcttctaattgcggggcaagttccgtggatagtcaatactgcttgtgctgttgagctaatattaagttcctgctgggagaacttctgcagttcctatggcaaagcctctcaatggcagtggccgtagcatgccaagatcgaatgagggaatgcggctcatattttcggcagttgtaggtgtcatgctgggttacctgtttgggatctccttccctacagtcaacataaccaagcttcacttcccttcgagtatcatctcttatatcgaagataggaactctggcatcacaacccagacattgttgaaccatgcttgggcatctgcaaacaatcataaaaagaatagttctgaatctaacactgatgaaattcccgagatttatgttcctacaaacccaaaaggtgctgagagacttccaccaggcattgtagtgtctgaaacagatctttatccccgaagactatggggtgatcctagtgaggaccttactagcgagccgaggtatcttgttacttttactgttggtattgggcaaaaggcaaatattgatgcagcggtcagaaagttttcagacaaattcaccattatgttgttccattatgatggtcggactacagagtgggatgaatttgagtggtctaaaagagcaatccatgtgagtgccaggaagcagacaaaatggtggtatgcaaaacgatttttgcatcccgatgttgttgccagatatgattacattttcatctgggatgaggatctaggtgtagagcatttcaacgcagagaagtacattgagcttgttagaaagcatgggttggaaatctctcagcctggtttgcaacctgatagaggactaacatggcaaatgactaaacggcgtggtgaccaggaagttcacaaagtaactgaggagagaccaggctggtgcactgatccacatctaccaccatgtgcagcatttgttgagattatggcaacagtgttctccagaaatgcatggcgctgtgtatggcatatgattcagaatgacttggtccatggatggggtcttgactttgctcttagaaaatgtgtggagccggctcatgagaaaattggagttgttgatgctcaatggattgttcatcaatcagttccttcacttggcaaccagggcaagtcagataatggaagaccaccatgggaaggggtaagagcacgctgcagaaaagaatgggggatatttcagacaaggctggctgatgcggagaaggcttattacttggagcgaggcatcacacccccgaactcaacatcagtttagatgaacacatgctcctcagatgccacggcaaggtttctgttgggggaacctgctgcaaactggcatgttcatcgaagctgctgcagcccagggcaaatccatatatttgtacattagaggtcccacgaatcgccatgattaatctttagtgtcgctcacctggttttaatgtcatttcttttgttagtgatactagctgcgatgtaagtaggaggatacagcagagaccgtgatgatacccatttgtgtattaatgacctgatgcaatatggatgttg

SEQ ID NO: 27260 - protein, 401 aa, Zea mays subsp. mays
  peptide (1)..(401): Ceres Seq. ID no. 12406924
  misc_feature (94)..(387): Pfam Name: DUF707 Pfam Description: Protein of unknown function
  misc_feature (9)..(397): NCBI GI NO: 34906848 NR Description: P0470A12.1
  misc_feature (10)..(401): NCBI GI NO: 14719314 NR Description: putative protein [Oryza sativa]
  misc_feature (45)..(401): NCBI GI NO: 34905994 NR Description: P0518C01.8
  misc_feature (14)..(400): NCBI GI NO: 18408876 NR Description: F12A21
  misc_feature (12)..(388): NCBI GI NO: 22331371 NR Description: unknown protein; protein id: At3g27470
  misc_feature (14)..(387): NCBI GI NO: 18390845 NR Description: storage protein, putative; protein id: At1g08040
  misc_feature (94)..(387): NCBI GI NO: 25407018 NR Description: protein T6D22.12 [imported] - Arabidopsis thaliana
  misc_feature (7)..(48): NCBI GI NO: 25407018 NR Description: protein T6D22.12 [imported] - Arabidopsis thaliana
  misc_feature (1)..(390): NCBI GI NO: 22329525 NR Description: unknown protein; protein id: At1g13000
  misc_feature (92)..(292): NCBI GI NO: 7939519 NR Description: gb|AAD31054
MAKPLNGSGRSMPRSNEGMRLIFSAVVGVMLGYLFGISFPTVNITKLHFPSSIISYIEDRNSGITTQTLLNHAWASANNHKKNSSESNTDEIPEIYVPTNPKGAERLPPGIVVSETDLYPRRLWGDPSEDLTSEPRYLVTFTVGIGQKANIDAAVRKFSDKFTIMLFHYDGRTTEWDEFEWSKRAIHVSARKQTKWWYAKRFLHPDVVARYDYIFIWDEDLGVEHFNAEKYIELVRKHGLEISQPGLQPDRGLTWQMTKRRGDQEVHKVTEERPGWCTDPHLPPCAAFVEIMATVFSRNAWRCVWHMIQNDLVHGWGLDFALRKCVEPAHEKIGVVDAQWIVHQSVPSLGNQGKSDNGRPPWEGVRARCRKEWGIFQTRLADAEKAYYLERGITPPNSTSV

SEQ ID NO: 27261 - protein, 390 aa, Zea mays subsp. mays
  peptide (1)..(390): Ceres Seq. ID no. 12406925
  misc_feature (83)..(376): Pfam Name: DUF707 Pfam Description: Protein of unknown function
  misc_feature (1)..(386): NCBI GI NO: 34906848 NR Description: P0470A12.1
  misc_feature (1)..(390): NCBI GI NO: 14719314 NR Description: putative protein [Oryza sativa]
  misc_feature (34)..(390): NCBI GI NO: 34905994 NR Description: P0518C01.8
  misc_feature (3)..(389): NCBI GI NO: 18408876 NR Description: F12A21
  misc_feature (1)..(377): NCBI GI NO: 22331371 NR Description: unknown protein; protein id: At3g27470
  misc_feature (3)..(376): NCBI GI NO: 18390845 NR Description: storage protein, putative; protein id: At1g08040
  misc_feature (83)..(376): NCBI GI NO: 25407018 NR Description: protein T6D22.12 [imported] - Arabidopsis thaliana
  misc_feature (1)..(37): NCBI GI NO: 25407018 NR Description: protein T6D22.12 [imported] - Arabidopsis thaliana
  misc_feature (1)..(379): NCBI GI NO: 22329525 NR Description: unknown protein; protein id: At1g13000
  misc_feature (81)..(281): NCBI GI NO: 7939519 NR Description: gb|AAD31054
MPRSNEGMRLIFSAVVGVMLGYLFGISFPTVNITKLHFPSSIISYIEDRNSGITTQTLLNHAWASANNHKKNSSESNTDEIPEIYVPTNPKGAERLPPGIVVSETDLYPRRLWGDPSEDLTSEPRYLVTFTVGIGQKANIDAAVRKFSDKFTIMLFHYDGRTTEWDEFEWSKRAIHVSARKQTKWWYAKRFLHPDVVARYDYIFIWDEDLGVEHFNAEKYIELVRKHGLEISQPGLQPDRGLTWQMTKRRGDQEVHKVTEERPGWCTDPHLPPCAAFVEIMATVFSRNAWRCVWHMIQNDLVHGWGLDFALRKCVEPAHEKIGVVDAQWIVHQSVPSLGNQGKSDNGRPPWEGVRARCRKEWGIFQTRLADAEKAYYLERGITPPNSTSV

SEQ ID NO: 27262 - protein, 383 aa, Zea mays subsp. mays
  peptide (1)..(383): Ceres Seq. ID no. 12406926
  misc_feature (76)..(369): Pfam Name: DUF707 Pfam Description: Protein of unknown function
  misc_feature (1)..(379): NCBI GI NO: 34906848 NR Description: P0470A12.1
  misc_feature (1)..(383): NCBI GI NO: 14719314 NR Description: putative protein [Oryza sativa]
  misc_feature (27)..(383): NCBI GI NO: 34905994 NR Description: P0518C01.8
  misc_feature (1)..(382): NCBI GI NO: 18408876 NR Description: F12A21
  misc_feature (1)..(370): NCBI GI NO: 22331371 NR Description: unknown protein; protein id: At3g27470
  misc_feature (1)..(369): NCBI GI NO: 18390845 NR Description: storage protein, putative; protein id: At1g08040
  misc_feature (76)..(369): NCBI GI NO: 25407018 NR Description: protein T6D22.12 [imported] - Arabidopsis thaliana
  misc_feature (1)..(30): NCBI GI NO: 25407018 NR Description: protein T6D22.12 [imported] - Arabidopsis thaliana
  misc_feature (1)..(372): NCBI GI NO: 22329525 NR Description: unknown protein; protein id: At1g13000
  misc_feature (74)..(274): NCBI GI NO: 7939519 NR Description: gb|AAD31054
MRLIFSAVVGVMLGYLFGISFPTVNITKLHFPSSIISYIEDRNSGITTQTLLNHAWASANNHKKNSSESNTDEIPEIYVPTNPKGAERLPPGIVVSETDLYPRRLWGDPSEDLTSEPRYLVTFTVGIGQKANIDAAVRKFSDKFTIMLFHYDGRTTEWDEFEWSKRAIHVSARKQTKWWYAKRFLHPDVVARYDYIFIWDEDLGVEHFNAEKYIELVRKHGLEISQPGLQPDRGLTWQMTKRRGDQEVHKVTEERPGWCTDPHLPPCAAFVEIMATVFSRNAWRCVWHMIQNDLVHGWGLDFALRKCVEPAHEKIGVVDAQWIVHQSVPSLGNQGKSDNGRPPWEGVRARCRKEWGIFQTRLADAEKAYYLERGITPPNSTSV

SEQ ID NO: 27263 - DNA, 1057 bp, Zea mays subsp. mays
  misc_feature (1)..(1057): Ceres Seq. ID no. 13493461
ggtgccccccacccccacccccacccccaccccgtgtgtgcgcggaaatgtcgccgacgaagtcatcgtgcctcgcggacgccggcgcggagccgttccgggtgttcgtgggctacgactcccgcgaggacgtggcgtaccgcgtgtgccggcgctcccttctgcgccgctcgtccatcccgctggagatcaccccgatcgtgcagcaggagctccgcgaggcggggctgtactggcgggagcgcggcccgacggagagcaccgagttctccttcacccgcttcctgacgccctacctggcggggtaccgcgggtgggcgctgttcgtggactgcgacttcctgttcgtggccgacgtagccgggctggtggcgctggcgcgcgccgacccgcggcgcgcggtgctgtgcgtgcaccacgactacacgcccacggaggccaccaagatggacggcgccgtgcagacggcgtaccctcgcaagaactggtcctccatggtgctcttcaactgcggccaccccaagaaccgcgccgcgctcacgccggaggccgtcagcacgcgcagccggtgcgtacctgcaccgcttcatgtggctcgacgaccgacgagatcggcgaggtgccgttcgtgtggaacttcctcgtggggcacaaccgcgtcgaccccgccgacgaggctggcacggcgccgcgcgctatacactacacgtccggcgggccgtggttcgataggtacaaggactgcgaattcgccgacctctgggtccaggagcgcgacgcctacgaggtcgacaaggacgtggatgatggatccatgcccatacgagaggcacctgcaatggtgtcggtggatgcacgcgattgagacggtcgaccatctccctgctgcccacgcgcgcggtcgtgtgctgtttgttgtttacgttgtgtgctgtctcctgtgcgcgcgcgcgctaccagtgtagtaccagtaccacatgtccatgtccatgcatgtactgtctgtcacgttggtgcgttatcgatggtagaataaagaggcgaccgttgcatgccc

SEQ ID NO: 27264 - protein, 320 aa, Zea mays subsp. mays
  peptide (1)..(320): Ceres Seq. ID no. 13493462
  misc_feature (29)..(188): NCBI GI NO: 34903402 NR Description: hypothetical protein~similar to Oryza sativachromosome 10
  misc_feature (30)..(188): NCBI GI NO: 37536068 NR Description: unknown protein
  misc_feature (30)..(188): NCBI GI NO: 15217806 NR Description: expressed protein [Arabidopsis thaliana]
  misc_feature (34)..(169): NCBI GI NO: 16264294 NR Description: conserved hypothetical protein
  misc_feature (30)..(186): NCBI GI NO: 33864181 NR Description: conserved hypothetical protein
  misc_feature (31)..(188): NCBI GI NO: 33864719 NR Description: conserved hypothetical protein
CPPPPPPPPPRVCAEMSPTKSSCLADAGAEPFRVFVGYDSREDVAYRVCRRSLLRRSSIPLEITPIVQQELREAGLYWRERGPTESTEFSFTRFLTPYLAGYRGWALFVDCDFLFVADVAGLVALARADPRRAVLCVHHDYTPTEATKMDGAVQTAYPRKNWSSMVLFNCGHPKNRAALTPEAVSTRSRCVPAPLHVARRPTRSARCRSCGTSSWGTTASTPPTRLARRRALYTTRPAGRGSIGTRTANSPTSGSRSATPTRSTRTWMMDPCPYERHLQWCRWMHAIETVDHLPAAHARGRVLFVVYVVCCLLCARALPV

SEQ ID NO: 27265 - protein, 305 aa, Zea mays subsp. mays
  peptide (1)..(305): Ceres Seq. ID no. 13493463
  misc_feature (14)..(173): NCBI GI NO: 34903402 NR Description: hypothetical protein~similar to Oryza sativachromosome 10
  misc_feature (15)..(173): NCBI GI NO: 37536068 NR Description: unknown protein
  misc_feature (15)..(173): NCBI GI NO: 15217806 NR Description: expressed protein [Arabidopsis thaliana]
  misc_feature (19)..(154): NCBI GI NO: 16264294 NR Description: conserved hypothetical protein
  misc_feature (15)..(171): NCBI GI NO: 33864181 NR Description: conserved hypothetical protein
  misc_feature (16)..(173): NCBI GI NO: 33864719 NR Description: conserved hypothetical protein
MSPTKSSCLADAGAEPFRVFVGYDSREDVAYRVCRRSLLRRSSIPLEITPIVQQELREAGLYWRERGPTESTEFSFTRFLTPYLAGYRGWALFVDCDFLFVADVAGLVALARADPRRAVLCVHHDYTPTEATKMDGAVQTAYPRKNWSSMVLFNCGHPKNRAALTPEAVSTRSRCVPAPLHVARRPTRSARCRSCGTSSWGTTASTPPTRLARRRALYTTRPAGRGSIGTRTANSPTSGSRSATPTRSTRTWMMDPCPYERHLQWCRWMHAIETVDHLPAAHARGRVLFVVYVVCCLLCARALPV

SEQ ID NO: 27266 - protein, 287 aa, Zea mays subsp. mays
  peptide (1)..(287): Ceres Seq. ID no. 13493464
  misc_feature (203)..(269): NCBI GI NO: 34903402 NR Description: hypothetical protein~similar to Oryza sativachromosome 10
  misc_feature (202)..(266): NCBI GI NO: 37536068 NR Description: unknown protein
  misc_feature (202)..(269): NCBI GI NO: 15217806 NR Description: expressed protein [Arabidopsis thaliana]
  misc_feature (202)..(259): NCBI GI NO: 16264294 NR Description: conserved hypothetical protein
  misc_feature (203)..(259): NCBI GI NO: 33864181 NR Description: conserved hypothetical protein
VPPTPTPTPTPCVRGNVADEVIVPRGRRRGAVPGVRGLRLPRGRGVPRVPALPSAPLVHPAGDHPDRAAGAPRGGAVLAGARPDGEHRVLLHPLPDALPGGVPRVGAVRGLRLPVRGRRSRAGGAGARRPAARGAVRAPRLHAHGGHQDGRRRADGVPSQELVLHGALQLRPPQEPRRAHAGGRQHAQPVRTCTASCGSTTDEIGEVPFVWNFLVGHNRVDPADEAGTAPRAIHYTSGGPWFDRYKDCEFADLWVQERDAYEVDKDVDDGSMPIREAPAMVSVDARD

SEQ ID NO: 27267 - DNA, 1804 bp, Zea mays subsp. mays
  misc_feature (1)..(1804): Ceres Seq. ID no. 12405615
ggaaccgtcaggccgtgaagagcctgcggttcgatctgctgcaagagctcctcgtcgatctcttcttctctgcgaggtttcggtctgagttaccacattgctggagtggaggtatggcgtattctggacaaaggcatgctggtgttgggagctcctcgaggccagcgaatggattcaagggggcagccaactcggtggagttcctgggtagggagatgctgggaatgcgactgagggatgccaagcccgacacagatgatgaaagggagatgtggtcaagttcagatgtgactgatagttctagtaatgaagctggtcatgtaatagcgactactgttcacgggcgcaacggcctgcctaaacagtctgtcacatacatcgctgaacatgtggttggaactggttcttttggggttgtgtatcaggcaaaatgccgagaaacaggggaaattgttgccataaaaaaggttcttcaagataagcgttataagaacagagagctgcaaatcatgcatatgcttgaccatcctaacatcatcggtcttaagcattacttcttttcaacaactgaaagggatgagctttatctcaaccttgttcttgagtttgttccagagacagtaaacaggattgcaaggcagtacaatcgaatgaatcagcggatgcccctcatttatgtcaaactgtacacgtatcagatatgccgagcgcttgcttatatacataactgcattggcatctgccaccgtgatatcaaaccgcagaatgttcttgttaacccacatacacaccaactcaaaatttgcgatttcggaagtgctaaagtattggtcagaggagagccaaacatctcctacatatgctcaaggtattatcgagcaccagagctcatatttggtgcaacggaatatactactgctattgatttgtggtcaacaggctgtgtcatggcagagctgcttctaggacagcctctgtttcctggagaaagtggagtcgaccaactagttgagatcatcaaggttttgggtactccaacaagggaagagatcaagtgcatgaacccaaactacacggagttcaagttcccacaaattaaagctcatccgtggcacaaggtttttcaaagaaggcttccacctgaagcagtggaccttgttagcaggtttctacaatactcaccaaatctacggtgcactgctttggaggcctgtatgcaccctttcttcgatgagctgagagacccaaacactcgtctacccaatggtcggcctctgccgcctctcttcaacttcagatctcaagagctaaaaggcgttcccccagaagtcatcgatcgccttgtcccagagcactcaagaaggcagagtttgttcatggcgctaaggacctagtttttgccgttctttttgcccccctttttcccaccgtttgccaccttgagggaagcttgtaaagctatagcttctcctttcccctcgtccttacttgcccccccccctctctctttcttccgagctttgtgtggatgagagatccttgagatacactgctagagctgtgagttccaggatgtgaggttcgagtgtgtgtgatgtgcagttgtcgcctttgaggtcggagatttcagttgcagtgttgtgagaggcttgtgaagcttttttgtctacttttcagtgcttctctggcttgaagttttccttcaattcttgtgaactggcttcaagatttggcttcgtgaaccctgtgtgcgtgtaaaagtactggttggatgctgctgcaccaattctggaaaaaaaagctt

SEQ ID NO: 27268 - protein, 463 aa, Zea mays subsp. mays
  peptide (1)..(463): Ceres Seq. ID no. 12405616
  misc_feature (125)..(409): Pfam Name: Pfam Description:  Protein kinase domain
  misc_feature (38)..(463): NCBI GI NO: 24637171 NR Description: GSK-3-like protein MsK4 [Medicago sativa]
  misc_feature (38)..(463): NCBI GI NO: 15218288 NR Description: shaggy-like protien kinase, kappa
  misc_feature (43)..(463): NCBI GI NO: 15217795 NR Description: protein kinase, putative; protein id: At1g57870.1
  misc_feature (92)..(463): NCBI GI NO: 25287630 NR Description: hypothetical protein
  misc_feature (87)..(463): NCBI GI NO: 1504063 NR Description: shaggy-like kinase kappa [Arabidopsis thaliana]
  misc_feature (46)..(458): NCBI GI NO: 1709128 NR Description: Glycogen synthase kinase-3 homolog MsK-2
  misc_feature (54)..(458): NCBI GI NO: 481018 NR Description: protein kinase MSK-3 (EC 2.7.1.-)
  misc_feature (54)..(458): NCBI GI NO: 11182434 NR Description: GLYCOGEN SYNTHASE KINASE-3 HOMOLOG MSK-3
  misc_feature (63)..(454): NCBI GI NO: 7434282 NR Description: shaggy protein kinase (EC 2
  misc_feature (63)..(454): NCBI GI NO: 7434277 NR Description: shaggy protein kinase (EC 2.7.1.-) 91
NRQAVKSLRFDLLQELLVDLFFSARFRSELPHCWSGGMAYSGQRHAGVGSSSRPANGFKGAANSVEFLGREMLGMRLRDAKPDTDDEREMWSSSDVTDSSSNEAGHVIATTVHGRNGLPKQSVTYIAEHVVGTGSFGVVYQAKCRETGEIVAIKKVLQDKRYKNRELQIMHMLDHPNIIGLKHYFFSTTERDELYLNLVLEFVPETVNRIARQYNRMNQRMPLIYVKLYTYQICRALAYIHNCIGICHRDIKPQNVLVNPHTHQLKICDFGSAKVLVRGEPNISYICSRYYRAPELIFGATEYTTAIDLWSTGCVMAELLLGQPLFPGESGVDQLVEIIKVLGTPTREEIKCMNPNYTEFKFPQIKAHPWHKVFQRRLPPEAVDLVSRFLQYSPNLRCTALEACMHPFFDELRDPNTRLPNGRPLPPLFNFRSQELKGVPPEVIDRLVPEHSRRQSLFMALRT

SEQ ID NO: 27269 - protein, 426 aa, Zea mays subsp. mays
  peptide (1)..(426): Ceres Seq. ID no. 12405617
  misc_feature (88)..(372): Pfam Name: Pfam Description:  Protein kinase domain
  misc_feature (1)..(426): NCBI GI NO: 24637171 NR Description: GSK-3-like protein MsK4 [Medicago sativa]
  misc_feature (1)..(426): NCBI GI NO: 15218288 NR Description: shaggy-like protien kinase, kappa
  misc_feature (6)..(426): NCBI GI NO: 15217795 NR Description: protein kinase, putative; protein id: At1g57870.1
  misc_feature (55)..(426): NCBI GI NO: 25287630 NR Description: hypothetical protein
  misc_feature (50)..(426): NCBI GI NO: 1504063 NR Description: shaggy-like kinase kappa [Arabidopsis thaliana]
  misc_feature (9)..(421): NCBI GI NO: 1709128 NR Description: Glycogen synthase kinase-3 homolog MsK-2
  misc_feature (17)..(421): NCBI GI NO: 481018 NR Description: protein kinase MSK-3 (EC 2.7.1.-)
  misc_feature (17)..(421): NCBI GI NO: 11182434 NR Description: GLYCOGEN SYNTHASE KINASE-3 HOMOLOG MSK-3
  misc_feature (26)..(417): NCBI GI NO: 7434282 NR Description: shaggy protein kinase (EC 2
  misc_feature (26)..(417): NCBI GI NO: 7434277 NR Description: shaggy protein kinase (EC 2.7.1.-) 91
MAYSGQRHAGVGSSSRPANGFKGAANSVEFLGREMLGMRLRDAKPDTDDEREMWSSSDVTDSSSNEAGHVIATTVHGRNGLPKQSVTYIAEHVVGTGSFGVVYQAKCRETGEIVAIKKVLQDKRYKNRELQIMHMLDHPNIIGLKHYFFSTTERDELYLNLVLEFVPETVNRIARQYNRMNQRMPLIYVKLYTYQICRALAYIHNCIGICHRDIKPQNVLVNPHTHQLKICDFGSAKVLVRGEPNISYICSRYYRAPELIFGATEYTTAIDLWSTGCVMAELLLGQPLFPGESGVDQLVEIIKVLGTPTREEIKCMNPNYTEFKFPQIKAHPWHKVFQRRLPPEAVDLVSRFLQYSPNLRCTALEACMHPFFDELRDPNTRLPNGRPLPPLFNFRSQELKGVPPEVIDRLVPEHSRRQSLFMALRT

SEQ ID NO: 27270 - protein, 392 aa, Zea mays subsp. mays
  peptide (1)..(392): Ceres Seq. ID no. 12405618
  misc_feature (54)..(338): Pfam Name: Pfam Description:  Protein kinase domain
  misc_feature (1)..(392): NCBI GI NO: 24637171 NR Description: GSK-3-like protein MsK4 [Medicago sativa]
  misc_feature (1)..(392): NCBI GI NO: 15218288 NR Description: shaggy-like protien kinase, kappa
  misc_feature (1)..(392): NCBI GI NO: 15217795 NR Description: protein kinase, putative; protein id: At1g57870.1
  misc_feature (21)..(392): NCBI GI NO: 25287630 NR Description: hypothetical protein
  misc_feature (16)..(392): NCBI GI NO: 1504063 NR Description: shaggy-like kinase kappa [Arabidopsis thaliana]
  misc_feature (1)..(387): NCBI GI NO: 1709128 NR Description: Glycogen synthase kinase-3 homolog MsK-2
  misc_feature (1)..(387): NCBI GI NO: 481018 NR Description: protein kinase MSK-3 (EC 2.7.1.-)
  misc_feature (1)..(387): NCBI GI NO: 11182434 NR Description: GLYCOGEN SYNTHASE KINASE-3 HOMOLOG MSK-3
  misc_feature (1)..(383): NCBI GI NO: 7434282 NR Description: shaggy protein kinase (EC 2
  misc_feature (1)..(383): NCBI GI NO: 7434277 NR Description: shaggy protein kinase (EC 2.7.1.-) 91
MLGMRLRDAKPDTDDEREMWSSSDVTDSSSNEAGHVIATTVHGRNGLPKQSVTYIAEHVVGTGSFGVVYQAKCRETGEIVAIKKVLQDKRYKNRELQIMHMLDHPNIIGLKHYFFSTTERDELYLNLVLEFVPETVNRIARQYNRMNQRMPLIYVKLYTYQICRALAYIHNCIGICHRDIKPQNVLVNPHTHQLKICDFGSAKVLVRGEPNISYICSRYYRAPELIFGATEYTTAIDLWSTGCVMAELLLGQPLFPGESGVDQLVEIIKVLGTPTREEIKCMNPNYTEFKFPQIKAHPWHKVFQRRLPPEAVDLVSRFLQYSPNLRCTALEACMHPFFDELRDPNTRLPNGRPLPPLFNFRSQELKGVPPEVIDRLVPEHSRRQSLFMALRT

SEQ ID NO: 27271 - DNA, 1449 bp, Zea mays subsp. mays
  misc_feature (1)..(1449): Ceres Seq. ID no. 13498734
agagcgaagagagcgaaatccagagcacacggcgtcgcatttggaacgctcctgctcgtcgcacgtacgaagcccacgcgtccgcgcacgtgccagagccgagcccccgcgccggcgccccgccggagaggatgacgcggcggtgctcgcactgcagcaacaacggccacaactcgcgtacctgccccgtccgctccgccggcggcggcagcggcggcggcggggtgaggctgttcggcgtgcggctcacgacggcgccggcgccggcggtgatgaagaagagcgccagcatgagctgcattgtgtcctcgctcggcggcggtttcggcggctcgtcgccgccggtggaaggagtgggtgctggcagaggaggggaagacagtgggaccggctacgtgtccgatgatcccgcgcacgcatcctgctcgacgaatggccgcgccgagcgcaagaaaggtacaccttggactgaagaagagcatagaatgtttctgatgggtctgcagaagcttggtaagggagactggcgcgggatatccagaaactttgttgtttccaggaccccgactcaagttgcaagccatgctcaaaagtactttgttagacagacaaactcatcgagacggaagaggcggtcaagcttatttgacatggtcccagaaatgccaatggatgagtccccagctgctgtggaacaatttactctccaaaatactcaagatgaagatacaagttcaaatcacgtgccaaccttacatcttggacaacggaaggaaacagagtttgctaagcagctacaaacttttcagccagggcaccatgagaaatctgaatacgcagaaccttcattgctgctaccagatttggagatgaaccccagtgtaccattcaagaccataactgatccaacaggaccagcattctacccatcattggtccctgttccactaactctttggcctccaagtgtttcccacgtggaggaagcagccagaacccatgaaatcctaaaaccaactcctttgaatggtaagggggtggttaaggcagatgatgttgttggtatgtctaagctcagcatcgacgaagctagctctggctccatggaacccactgctctttcccttgagcttattggatccacagatacaaggcaatcagcttttcatgtgagtccaccgatgaatagacctgaactaagcaagagaaacagcagtccaattcatgcagtttgaggaagcatgaaacatgcccgctgggtcaagtcttacaaattatactgatggtctcaatacctcagaacgtgaccatgtactttgtaacgactttttagttatcctgtttccagcttatgttccttgccatcgacaaatgtagagagatacatgtgtcaatggaagtagcatgccattagtttcaaaaaaaaaaaaaaaaaaaaaaaaataaaaa

SEQ ID NO: 27272 - protein, 410 aa, Zea mays subsp. mays
  peptide (1)..(410): Ceres Seq. ID no. 13498735
  misc_feature (152)..(199): Pfam Name: Pfam Description:  Myb-like DNA-binding domain
  misc_feature (44)..(263): NCBI GI NO: 34906364 NR Description: unnamed protein product
  misc_feature (251)..(410): NCBI GI NO: 34906364 NR Description: unnamed protein product
  misc_feature (67)..(410): NCBI GI NO: 15228185 NR Description: myb family transcription factor
  misc_feature (44)..(97): NCBI GI NO: 15228185 NR Description: myb family transcription factor
  misc_feature (44)..(410): NCBI GI NO: 2062176 NR Description: Myb-related transcription activator
  misc_feature (44)..(410): NCBI GI NO: 15238083 NR Description: Myb-related transcription activator-like
  misc_feature (44)..(392): NCBI GI NO: 7705206 NR Description: MybSt1 [Solanum tuberosum]
  misc_feature (44)..(392): NCBI GI NO: 1076660 NR Description: D13F(MYBST1) protein - potato
  misc_feature (44)..(287): NCBI GI NO: 37536856 NR Description: putative Myb-related protein
  misc_feature (44)..(287): NCBI GI NO: 24850307 NR Description: transcription factor MYBS3
SEESEIQSTRRRIWNAPARRTYEAHASAHVPEPSPRAGAPPERMTRRCSHCSNNGHNSRTCPVRSAGGGSGGGGVRLFGVRLTTAPAPAVMKKSASMSCIVSSLGGGFGGSSPPVEGVGAGRGGEDSGTGYVSDDPAHASCSTNGRAERKKGTPWTEEEHRMFLMGLQKLGKGDWRGISRNFVVSRTPTQVASHAQKYFVRQTNSSRRKRRSSLFDMVPEMPMDESPAAVEQFTLQNTQDEDTSSNHVPTLHLGQRKETEFAKQLQTFQPGHHEKSEYAEPSLLLPDLEMNPSVPFKTITDPTGPAFYPSLVPVPLTLWPPSVSHVEEAARTHEILKPTPLNGKGVVKADDVVGMSKLSIDEASSGSMEPTALSLELIGSTDTRQSAFHVSPPMNRPELSKRNSSPIHAV

SEQ ID NO: 27273 - protein, 367 aa, Zea mays subsp. mays
  peptide (1)..(367): Ceres Seq. ID no. 13498736
  misc_feature (109)..(156): Pfam Name: Pfam Description:  Myb-like DNA-binding domain
  misc_feature (1)..(220): NCBI GI NO: 34906364 NR Description: unnamed protein product
  misc_feature (208)..(367): NCBI GI NO: 34906364 NR Description: unnamed protein product
  misc_feature (24)..(367): NCBI GI NO: 15228185 NR Description: myb family transcription factor
  misc_feature (1)..(54): NCBI GI NO: 15228185 NR Description: myb family transcription factor
  misc_feature (1)..(367): NCBI GI NO: 2062176 NR Description: Myb-related transcription activator
  misc_feature (1)..(367): NCBI GI NO: 15238083 NR Description: Myb-related transcription activator-like
  misc_feature (1)..(349): NCBI GI NO: 7705206 NR Description: MybSt1 [Solanum tuberosum]
  misc_feature (1)..(349): NCBI GI NO: 1076660 NR Description: D13F(MYBST1) protein - potato
  misc_feature (1)..(244): NCBI GI NO: 37536856 NR Description: putative Myb-related protein
  misc_feature (1)..(244): NCBI GI NO: 24850307 NR Description: transcription factor MYBS3
MTRRCSHCSNNGHNSRTCPVRSAGGGSGGGGVRLFGVRLTTAPAPAVMKKSASMSCIVSSLGGGFGGSSPPVEGVGAGRGGEDSGTGYVSDDPAHASCSTNGRAERKKGTPWTEEEHRMFLMGLQKLGKGDWRGISRNFVVSRTPTQVASHAQKYFVRQTNSSRRKRRSSLFDMVPEMPMDESPAAVEQFTLQNTQDEDTSSNHVPTLHLGQRKETEFAKQLQTFQPGHHEKSEYAEPSLLLPDLEMNPSVPFKTITDPTGPAFYPSLVPVPLTLWPPSVSHVEEAARTHEILKPTPLNGKGVVKADDVVGMSKLSIDEASSGSMEPTALSLELIGSTDTRQSAFHVSPPMNRPELSKRNSSPIHAV

SEQ ID NO: 27274 - protein, 320 aa, Zea mays subsp. mays
  peptide (1)..(320): Ceres Seq. ID no. 13498737
  misc_feature (62)..(109): Pfam Name: Pfam Description:  Myb-like DNA-binding domain
  misc_feature (1)..(173): NCBI GI NO: 34906364 NR Description: unnamed protein product
  misc_feature (161)..(320): NCBI GI NO: 34906364 NR Description: unnamed protein product
  misc_feature (1)..(320): NCBI GI NO: 15228185 NR Description: myb family transcription factor
  misc_feature (1)..(320): NCBI GI NO: 2062176 NR Description: Myb-related transcription activator
  misc_feature (1)..(320): NCBI GI NO: 15238083 NR Description: Myb-related transcription activator-like
  misc_feature (1)..(302): NCBI GI NO: 7705206 NR Description: MybSt1 [Solanum tuberosum]
  misc_feature (1)..(302): NCBI GI NO: 1076660 NR Description: D13F(MYBST1) protein - potato
  misc_feature (1)..(197): NCBI GI NO: 37536856 NR Description: putative Myb-related protein
  misc_feature (1)..(197): NCBI GI NO: 24850307 NR Description: transcription factor MYBS3
  misc_feature (1)..(127): NCBI GI NO: 34906444 NR Description: P0671B11.14
MKKSASMSCIVSSLGGGFGGSSPPVEGVGAGRGGEDSGTGYVSDDPAHASCSTNGRAERKKGTPWTEEEHRMFLMGLQKLGKGDWRGISRNFVVSRTPTQVASHAQKYFVRQTNSSRRKRRSSLFDMVPEMPMDESPAAVEQFTLQNTQDEDTSSNHVPTLHLGQRKETEFAKQLQTFQPGHHEKSEYAEPSLLLPDLEMNPSVPFKTITDPTGPAFYPSLVPVPLTLWPPSVSHVEEAARTHEILKPTPLNGKGVVKADDVVGMSKLSIDEASSGSMEPTALSLELIGSTDTRQSAFHVSPPMNRPELSKRNSSPIHAV

SEQ ID NO: 27275 - DNA, 1760 bp, Zea mays subsp. mays
  misc_feature (1)..(1760): Ceres Seq. ID no. 12350346
cccaaatcccaccacccttttccccttccaaccatcgggatctctccggcccgccatggaggtgttctactacctcgtgttcggcgcgctcgccgccatcgtggcggcgctggagctcgccaagtccggcaaggaccgcgtcgccacctccccggccttcaactcatttaagaacaactacatcctcgtttactccctcatgatgtctggggactggctgcaggggccctacgtgtactacctctacagccagtacggcttcgacaagggcgacattggccgcctcttcatcgccggcttcggttcctccatgctcttcggcaccatcgtcggatccctcgcggataagcaggggcggaagagggcgtgtgtcacgtactgcatcacctacatcctcagctgcatcaccaagcactctccccagtacaaagttcttatgattgggcgcgtccttggtggcattgccacttcgctgctcttctcagcgtttgagtcgtggctcgtggcagagcacaacaagaaaggatttgatccacaatggttgtcgataacattctccaaggctatatttcttggcaatggtctagtggccattgttgctggcctatttgcaaattttcttgctgataacatgggttttggtcctgtggctccatttgatgccgctgcttgcttcctagcaataggaatggcaattatcttatcatcatggggtgagaactacggagattcgtctgacagcaaggacttgataacccagttcaagggtgcagctaaagccattgcttcagacgagaagattgcattgcttggagccatacagtcattgtttgagggatcaatgtatactttcgttttcctgtggactcctgctctgagcccaaaggatgaggaaattcctcacggcttcatatttgctaccttcatgctttcctcgatgctgggtagctcaattgcttctcgtttgttagctaggaagctgaaggttgaaggttatatgcaaatcgtgttttcagtatcagcctttactcttttcctccctgttgtcaccaatttcctagtacctccctccggggagaaaggcggcagcatttcgttaggaggctgcttacagcttcttggtttctgtacctttgagtcatgtgttggtatattttggccatcaatcatgaagatgagatctcaatatattcccgaggaggcaagaagcacaatcatgaatttcttccgtataccgctcaacctgtttgtttgcgtggtactatacaatgtgaatgcattcccaataactgtcatgttcggcatgtgctccattttccttctcatggcagcagtcttgcagaggcgcttaatggctgtctctgatcttcacagatcgacaaaggctgtaatgatgactgcggaagatgagcctctaaacccttagagaacatcataaaagtgaatcggaagtttaaatggccccaatcctcgacttattcccatggggttgctgaataagattgatatctaaaagttgtaacgactgtaacagaacacggtttttactgtgttataggattggtgctagtgcagtttccggttgtcatggtagagaacatgatgtggctcctgactattgtgccacacacggcagagtagatctcggcatagcctccccacgatttccccatgtttttcttctcgtgttttctgataggattgatatttgtattcaagtgaagtatcatatggaaacccgcatcgtccattttggatgc

SEQ ID NO: 27276 - protein, 474 aa, Zea mays subsp. mays
  peptide (1)..(474): Ceres Seq. ID no. 12350347
  misc_feature (22)..(375): Pfam Name: DUF791 Pfam Description: Protein of unknown function
  misc_feature (19)..(474): NCBI GI NO: 37536124 NR Description: putative transporter
  misc_feature (19)..(474): NCBI GI NO: 34902182 NR Description: Putative transporter
  misc_feature (19)..(474): NCBI GI NO: 15217708 NR Description: unknown protein; protein id: At1g64650.1
  misc_feature (19)..(473): NCBI GI NO: 18417054 NR Description: putative protein; protein id: At4g27720
  misc_feature (19)..(470): NCBI GI NO: 6633826 NR Description: F1N19.22 [Arabidopsis thaliana]
  misc_feature (19)..(474): NCBI GI NO: 30693172 NR Description: expressed protein [Arabidopsis thaliana]
  misc_feature (162)..(474): NCBI GI NO: 11292198 NR Description: hypothetical protein F2K15
  misc_feature (19)..(173): NCBI GI NO: 11292198 NR Description: hypothetical protein F2K15
  misc_feature (19)..(349): NCBI GI NO: 7487513 NR Description: hypothetical protein T29A15
  misc_feature (380)..(423): NCBI GI NO: 7487513 NR Description: hypothetical protein T29A15
PNPTTLFPFQPSGSLRPAMEVFYYLVFGALAAIVAALELAKSGKDRVATSPAFNSFKNNYILVYSLMMSGDWLQGPYVYYLYSQYGFDKGDIGRLFIAGFGSSMLFGTIVGSLADKQGRKRACVTYCITYILSCITKHSPQYKVLMIGRVLGGIATSLLFSAFESWLVAEHNKKGFDPQWLSITFSKAIFLGNGLVAIVAGLFANFLADNMGFGPVAPFDAAACFLAIGMAIILSSWGENYGDSSDSKDLITQFKGAAKAIASDEKIALLGAIQSLFEGSMYTFVFLWTPALSPKDEEIPHGFIFATFMLSSMLGSSIASRLLARKLKVEGYMQIVFSVSAFTLFLPVVTNFLVPPSGEKGGSISLGGCLQLLGFCTFESCVGIFWPSIMKMRSQYIPEEARSTIMNFFRIPLNLFVCVVLYNVNAFPITVMFGMCSIFLLMAAVLQRRLMAVSDLHRSTKAVMMTAEDEPLNP

SEQ ID NO: 27277 - protein, 456 aa, Zea mays subsp. mays
  peptide (1)..(456): Ceres Seq. ID no. 12350348
  misc_feature (4)..(357): Pfam Name: DUF791 Pfam Description: Protein of unknown function
  misc_feature (1)..(456): NCBI GI NO: 37536124 NR Description: putative transporter
  misc_feature (1)..(456): NCBI GI NO: 34902182 NR Description: Putative transporter
  misc_feature (1)..(456): NCBI GI NO: 15217708 NR Description: unknown protein; protein id: At1g64650.1
  misc_feature (1)..(455): NCBI GI NO: 18417054 NR Description: putative protein; protein id: At4g27720
  misc_feature (1)..(452): NCBI GI NO: 6633826 NR Description: F1N19.22 [Arabidopsis thaliana]
  misc_feature (1)..(456): NCBI GI NO: 30693172 NR Description: expressed protein [Arabidopsis thaliana]
  misc_feature (144)..(456): NCBI GI NO: 11292198 NR Description: hypothetical protein F2K15
  misc_feature (1)..(155): NCBI GI NO: 11292198 NR Description: hypothetical protein F2K15
  misc_feature (1)..(331): NCBI GI NO: 7487513 NR Description: hypothetical protein T29A15
  misc_feature (362)..(405): NCBI GI NO: 7487513 NR Description: hypothetical protein T29A15
MEVFYYLVFGALAAIVAALELAKSGKDRVATSPAFNSFKNNYILVYSLMMSGDWLQGPYVYYLYSQYGFDKGDIGRLFIAGFGSSMLFGTIVGSLADKQGRKRACVTYCITYILSCITKHSPQYKVLMIGRVLGGIATSLLFSAFESWLVAEHNKKGFDPQWLSITFSKAIFLGNGLVAIVAGLFANFLADNMGFGPVAPFDAAACFLAIGMAIILSSWGENYGDSSDSKDLITQFKGAAKAIASDEKIALLGAIQSLFEGSMYTFVFLWTPALSPKDEEIPHGFIFATFMLSSMLGSSIASRLLARKLKVEGYMQIVFSVSAFTLFLPVVTNFLVPPSGEKGGSISLGGCLQLLGFCTFESCVGIFWPSIMKMRSQYIPEEARSTIMNFFRIPLNLFVCVVLYNVNAFPITVMFGMCSIFLLMAAVLQRRLMAVSDLHRSTKAVMMTAEDEPLNP

SEQ ID NO: 27278 - protein, 408 aa, Zea mays subsp. mays
  peptide (1)..(408): Ceres Seq. ID no. 12350349
  misc_feature (1)..(309): Pfam Name: DUF791 Pfam Description: Protein of unknown function
  misc_feature (1)..(408): NCBI GI NO: 37536124 NR Description: putative transporter
  misc_feature (1)..(408): NCBI GI NO: 34902182 NR Description: Putative transporter
  misc_feature (1)..(408): NCBI GI NO: 15217708 NR Description: unknown protein; protein id: At1g64650.1
  misc_feature (1)..(407): NCBI GI NO: 18417054 NR Description: putative protein; protein id: At4g27720
  misc_feature (1)..(404): NCBI GI NO: 6633826 NR Description: F1N19.22 [Arabidopsis thaliana]
  misc_feature (1)..(408): NCBI GI NO: 30693172 NR Description: expressed protein [Arabidopsis thaliana]
  misc_feature (96)..(408): NCBI GI NO: 11292198 NR Description: hypothetical protein F2K15
  misc_feature (1)..(107): NCBI GI NO: 11292198 NR Description: hypothetical protein F2K15
  misc_feature (1)..(283): NCBI GI NO: 7487513 NR Description: hypothetical protein T29A15
  misc_feature (314)..(357): NCBI GI NO: 7487513 NR Description: hypothetical protein T29A15
MMSGDWLQGPYVYYLYSQYGFDKGDIGRLFIAGFGSSMLFGTIVGSLADKQGRKRACVTYCITYILSCITKHSPQYKVLMIGRVLGGIATSLLFSAFESWLVAEHNKKGFDPQWLSITFSKAIFLGNGLVAIVAGLFANFLADNMGFGPVAPFDAAACFLAIGMAIILSSWGENYGDSSDSKDLITQFKGAAKAIASDEKIALLGAIQSLFEGSMYTFVFLWTPALSPKDEEIPHGFIFATFMLSSMLGSSIASRLLARKLKVEGYMQIVFSVSAFTLFLPVVTNFLVPPSGEKGGSISLGGCLQLLGFCTFESCVGIFWPSIMKMRSQYIPEEARSTIMNFFRIPLNLFVCVVLYNVNAFPITVMFGMCSIFLLMAAVLQRRLMAVSDLHRSTKAVMMTAEDEPLNP

SEQ ID NO: 27279 - DNA, 583 bp, Zea mays subsp. mays
  misc_feature (1)..(583): Ceres Seq. ID no. 13564574
ttagaccgagcagtactcggtacgccaaagttcacgcggtactgctgtgtccttcgtttactaaggatcaaagtcaaacgtcgagaaatatagatttacctggaagttgctgataatccgccatctagtcggtaggcatgtatggcaaagttcagttggtgttcacttgttcctcaatggaggccaagaacaagaaaaaagggtcaaagatggagagagtttgtgagaacacagtggctgttgacttcaagcagactaagctgaacaactttgtcccattcatccggtcargggagtggktctgatattggagggtcgcggrttacatgggaagatgcccatgtgtgsatctctgatctggcaaagaattttggctatgactcagtcgatgatgaagtaatttccttctatggggtgtttgawggccataatggcaaagatgctgctcattatgtccgtgataacttgccacgggtcatcgtggaagacgctgattttcckcttgagcttgaaaaggtagtaaagaggtcatttgtgcaaactggatrgtaaagtttgcagagaaattctctcaccacagggg

SEQ ID NO: 27280 - protein, 55 aa, Zea mays subsp. mays
  peptide (1)..(55): Ceres Seq. ID no. 13564575
  misc_feature (20)..(54): NCBI GI NO: 24413992 NR Description: putative DNA-binding protein phosphatase 2C
  misc_feature (25)..(54): NCBI GI NO: 21693562 NR Description: DNA-binding protein phosphatase 2C
  misc_feature (52)..(52): Xaa is any aa, unknown or other
  misc_feature (55)..(55): Xaa is any aa, unknown or other
MYGKVQLVFTCSSMEAKNKKKGSKMERVCENTVAVDFKQTKLNNFVPFIRSXEWX

SEQ ID NO: 27281 - protein, 42 aa, Zea mays subsp. mays
  peptide (1)..(42): Ceres Seq. ID no. 13564576
  misc_feature (7)..(41): NCBI GI NO: 24413992 NR Description: putative DNA-binding protein phosphatase 2C
  misc_feature (12)..(41): NCBI GI NO: 21693562 NR Description: DNA-binding protein phosphatase 2C
  misc_feature (39)..(39): Xaa is any aa, unknown or other
  misc_feature (42)..(42): Xaa is any aa, unknown or other
MEAKNKKKGSKMERVCENTVAVDFKQTKLNNFVPFIRSXEWX

SEQ ID NO: 27282 - protein, 40 aa, Zea mays subsp. mays
  peptide (1)..(40): Ceres Seq. ID no. 13564577
MAKFSWCSLVPQWRPRTRKKGQRWREFVRTQWLLTSSRLS

SEQ ID NO: 27283 - DNA, 1568 bp, Zea mays subsp. mays
  misc_feature (1)..(1568): Ceres Seq. ID no. 12409445
agacttatttcgagagaggagtacgttttaagccggtgctccatgtgtcccgtcccgtgtcccgtcccgtctacgttttaagctgcgagcgagatctgctttcacagcgtggctgaccagcagatccgtcgttgccggaacccacgctcgccggctgcgaatgcatctgtagcctgctcttcgtccacacggacaattggacgagctagactctgcgtcgccggcgatggggtgctccttctcagggctgaacgcactgtacgacaccgtcggcggtcggggtggtgacgtctgggttaacgactaccacttccgcgtgctccgcaggctcggcgatgccggccctgcgggctcgtcggtcttcctcgtcaaggaggtcgtcgccgccgcaaccgcctccgacggcacggctgggtcagagcccggcgcctcagggatcgccgggaagaaaggcatcgacccatcacacatctcagctgacgggacatatgctctcaagaaagttcttgttcagagtgatcagcacttagagcttgttcagcaagagatccgagtgtcctctcaattcagccatccaaatttacttcctcttcttgaacatgccatcgttgctgtcaagggtgttcaggatggatcccagaactatgaggcctacttattattcccagttcatttagaaggaacattacatgatataactaaaaccatgcttgaaaagaaggaattcttcccaacaattactgttctccagatatttcgccagctttgttctggattaaagcacatgcacagttttgatccaccatatgcgcacaatggggttaaaccagataatgtcctcataacacagaggaagcagtctcatctagcaattttgatggattttgagagtgctggtccagcaagaaagactattagatcacaagctgaagctttgcagttacaggaatgggcttcagagcactgttcttctcattaccgtgcccccgaactatgggagtgtccaagtcatgctgacattgatgagaggacagatatatggtctttgggatgcactttgtatgctatgatgtatggaaagtctccatttgattatgagcttgatgagtcttctggtgaaagcttgcacagtgttattaaaaatgtacagattaaatggcctgaagaagcgggatctacataccctgattccctccgccagtttataacttggatgctgcagccacatcccgcagttcgtcctcatattgatgatatcataattcatgttgataaacttgtcatgaagtactctaattaaccgctacaccaagccgcttctccaccagaaaaaagaatcattattatgtaagtctacacgattcattagcaaaatgtgatatgtatgttccttgatagctattactgtattaaacgagaaaaggacattctgctgtagtcttcaaccattcgtggactcgccattgttcatgagtatgttatctatagatgttttttttgtatgcccgacagtgttaccgggttaataaatgatacagtacctcttttatagttataatggtgccctt

SEQ ID NO: 27284 - protein, 357 aa, Zea mays subsp. mays
  peptide (1)..(357): Ceres Seq. ID no. 12409446
  misc_feature (1)..(356): NCBI GI NO: 15241535 NR Description: serine/threonine protein kinase
  misc_feature (1)..(356): NCBI GI NO: 21593866 NR Description: serine/threonine protein kinase
  misc_feature (77)..(356): NCBI GI NO: 30682270 NR Description: serine/threonine protein kinase, putative
  misc_feature (1)..(31): NCBI GI NO: 30682270 NR Description: serine/threonine protein kinase, putative
  misc_feature (85)..(351): NCBI GI NO: 10640971 NR Description: F5-2 [Homo sapiens]
  misc_feature (85)..(351): NCBI GI NO: 3372666 NR Description: myristilated and palmitylated serine-threoninekinase MPSK
  misc_feature (85)..(351): NCBI GI NO: 27465615 NR Description: serine/threonine kinase 16 [Rattus norvegicus]
  misc_feature (65)..(351): NCBI GI NO: 6714558 NR Description: F5-2 [Mus musculus]
  misc_feature (65)..(351): NCBI GI NO: 6729083 NR Description: F5-2 [Mus musculus]
  misc_feature (85)..(351): NCBI GI NO: 4505837 NR Description: serine/threonine kinase 16
MGCSFSGLNALYDTVGGRGGDVWVNDYHFRVLRRLGDAGPAGSSVFLVKEVVAAATASDGTAGSEPGASGIAGKKGIDPSHISADGTYALKKVLVQSDQHLELVQQEIRVSSQFSHPNLLPLLEHAIVAVKGVQDGSQNYEAYLLFPVHLEGTLHDITKTMLEKKEFFPTITVLQIFRQLCSGLKHMHSFDPPYAHNGVKPDNVLITQRKQSHLAILMDFESAGPARKTIRSQAEALQLQEWASEHCSSHYRAPELWECPSHADIDERTDIWSLGCTLYAMMYGKSPFDYELDESSGESLHSVIKNVQIKWPEEAGSTYPDSLRQFITWMLQPHPAVRPHIDDIIIHVDKLVMKYSN

SEQ ID NO: 27285 - protein, 197 aa, Zea mays subsp. mays
  peptide (1)..(197): Ceres Seq. ID no. 12409447
  misc_feature (1)..(196): NCBI GI NO: 15241535 NR Description: serine/threonine protein kinase
  misc_feature (1)..(196): NCBI GI NO: 21593866 NR Description: serine/threonine protein kinase
  misc_feature (1)..(196): NCBI GI NO: 30682270 NR Description: serine/threonine protein kinase, putative
  misc_feature (1)..(191): NCBI GI NO: 10640971 NR Description: F5-2 [Homo sapiens]
  misc_feature (1)..(191): NCBI GI NO: 3372666 NR Description: myristilated and palmitylated serine-threoninekinase MPSK
  misc_feature (1)..(191): NCBI GI NO: 27465615 NR Description: serine/threonine kinase 16 [Rattus norvegicus]
  misc_feature (1)..(191): NCBI GI NO: 6714558 NR Description: F5-2 [Mus musculus]
  misc_feature (1)..(191): NCBI GI NO: 6729083 NR Description: F5-2 [Mus musculus]
  misc_feature (1)..(191): NCBI GI NO: 4505837 NR Description: serine/threonine kinase 16
  misc_feature (1)..(191): NCBI GI NO: 13626604 NR Description: SERINE/THREONINE PROTEIN KINASE 16
MLEKKEFFPTITVLQIFRQLCSGLKHMHSFDPPYAHNGVKPDNVLITQRKQSHLAILMDFESAGPARKTIRSQAEALQLQEWASEHCSSHYRAPELWECPSHADIDERTDIWSLGCTLYAMMYGKSPFDYELDESSGESLHSVIKNVQIKWPEEAGSTYPDSLRQFITWMLQPHPAVRPHIDDIIIHVDKLVMKYSN

SEQ ID NO: 27286 - DNA, 721 bp, Zea mays subsp. mays
  misc_feature (1)..(721): Ceres Seq. ID no. 12349054
acaacgacgctagggtttcactcgcagccgccgacgccaaaagcccgctcttctgccccaagccgcgacgccccacgacgccgctgcggtgccaccagagcggtggcttctccgacgctgaacgctctttccagggcgacgagagcggcctgtcgtcggcgtccccgcagccgccgctgttctacggctcaccgccacggcgagcgtcaaacccggtggtccacgacagtaggttcggcgcggactgcccgcccgtgcccgtgccggggctgtccgtgcaccggcccagcccgcggtcgtcggcggcggcgccgtccatgtcgccgcgcgggtgcacccgcgcgcggttcgcgttctagcccgcgaatagttaggtggtatgtcctagttcgtcaattaatgatgctttcttttttggtttttgatggggaattgtttttttctttgttgtccgtccgtccatgcaaccaagaaatttcatggagaatctgtacaaaagagtggctagctactacacgagagtctggtctgagagaagcaacacgaggtcagtcagtggatgaacttagagagagacattcacacgctgagagggttgataatttgtgatattttcctcctttttttcttcttcctgattttgtatattgtatatcctgctggattaacaaatactagcaaccacttatagtcagtcaacataggccatctactgccagtg

SEQ ID NO: 27287 - protein, 202 aa, Zea mays subsp. mays
  peptide (1)..(202): Ceres Seq. ID no. 12349055
TTTLGFHSQPPTPKARSSAPSRDAPRRRCGATRAVASPTLNALSRATRAACRRRPRSRRCSTAHRHGERQTRWSTTVGSARTARPCPCRGCPCTGPARGRRRRRRPCRRAGAPARGSRSSPRIVRWYVLVRQLMMLSFLVFDGELFFSLLSVRPCNQEISWRICTKEWLATTRESGLREATRGQSVDELRERHSHAERVDNL

SEQ ID NO: 27288 - protein, 118 aa, Zea mays subsp. mays
  peptide (1)..(118): Ceres Seq. ID no. 12349056
  misc_feature (18)..(118): NCBI GI NO: 18396232 NR Description: Expressed protein; protein id: At3g02555
NDARVSLAAADAKSPLFCPKPRRPTTPLRCHQSGGFSDAERSFQGDESGLSSASPQPPLFYGSPPRRASNPVVHDSRFGADCPPVPVPGLSVHRPSPRSSAAAPSMSPRGCTRARFAF

SEQ ID NO: 27289 - DNA, 1409 bp, Zea mays subsp. mays
  misc_feature (1)..(1409): Ceres Seq. ID no. 12357947
aggcttggttccccgtgaccttgccagccgcgctagatacacactcttcatcacccggagtcccggacggacgcacacgcatcgcttgcttgtcgttctccactcctcttcccccgctgctcgcctctcgattccgcctcatcgcgtccgcgaactccatgtccactgcgaccgcgaccctggccgccgcgcgatccccggctgtcgcgcttctcagcctgcgccgccgcgcacccgcggctgcccccattcgcttccccggtctccgcgtcgtctctggttgccgtcacatagctatggcttccggcggcgcactcccgcgcccccaccgacccgcttcccaagggtgctgatttatttttccgggcagtaatctcgaacatggaaaaggtttatttgagcaggaatcctacagccaaaaccattctggagcttgtacgatcttatgatggtgatcacatttgctatgatcactttgctttccggacatttggggtcaatggttatggtataaactcactttctgattttttcactgattttggttatttacctcgcgaagaactcagatttccagctaaaaagcttagggcactatggttttccccgcccactaatgatggctactctggaactggtacatatggacctttgccaaggatattcatttcagaacttcttgtggatgagttgactactcaaagccaggaaattatacataaatacattaaaacttctggcaatggaaataatcatgctgctattgcaagtacatctggggagctaacatgggagaagcccatttattcagatttccagattttgtctagggaaagtgaatatgctgcatggactcttgttaatggctatgcactaaatcatgccacaattgccacccatcgcctagaatcagatatcagaagtattaataagttcaacaaatttgtggaggacaatggcttcaagttaaattcagaaggagggattctgaaagtgagtcctgatggtctccttcaacaaagttcaacagtagctgactcatcattgtttacgtttgctgatggaataactgaatctattcctcgatcatacattgaatttgctgaacgtctcctgttaccacagtttcaaagatttacaagatgaagaggtgaaagaataccacaggcgtgatggtttttgaggtgggcaatgcggacaagatattcgaaagtacatcgaaggatcagctgacgcggagatctgcatgaacagtgaactctagatctgcatatgaccccgtgaactctctagatctgcaaacaacccagtgtgcctcttggaagtgtgttggtgactgtgaaatgattgtacctacttgggtgaaataaagcatgggagtcaataaaaagtaactgtttctttattcc

SEQ ID NO: 27290 - protein, 254 aa, Zea mays subsp. mays
  peptide (1)..(254): Ceres Seq. ID no. 12357948
  misc_feature (1)..(250): NCBI GI NO: 37535166 NR Description: unknown protein
  misc_feature (1)..(250): NCBI GI NO: 18390717 NR Description: expressed protein; protein id: At1g07040
  misc_feature (1)..(250): NCBI GI NO: 18396149 NR Description: expressed protein; protein id: At1g27030
  misc_feature (1)..(250): NCBI GI NO: 15223410 NR Description: unknown protein; protein id: At1g27020.1
  misc_feature (64)..(249): NCBI GI NO: 22973852 NR Description: hypothetical protein [Chloroflexus aurantiacus]
  misc_feature (1)..(243): NCBI GI NO: 15642610 NR Description: conserved hypothetical protein [Vibrio cholerae]
  misc_feature (5)..(243): NCBI GI NO: 27364716 NR Description: Conserved hypothetical protein
  misc_feature (5)..(243): NCBI GI NO: 28899568 NR Description: conserved hypothetical protein
  misc_feature (1)..(243): NCBI GI NO: 24372211 NR Description: conserved hypothetical protein
  misc_feature (5)..(243): NCBI GI NO: 37523419 NR Description: hypothetical protein glr3850
MEKVYLSRNPTAKTILELVRSYDGDHICYDHFAFRTFGVNGYGINSLSDFFTDFGYLPREELRFPAKKLRALWFSPPTNDGYSGTGTYGPLPRIFISELLVDELTTQSQEIIHKYIKTSGNGNNHAAIASTSGELTWEKPIYSDFQILSRESEYAAWTLVNGYALNHATIATHRLESDIRSINKFNKFVEDNGFKLNSEGGILKVSPDGLLQQSSTVADSSLFTFADGITESIPRSYIEFAERLLLPQFQRFTR

SEQ ID NO: 27291 - DNA, 1480 bp, Zea mays subsp. mays
  misc_feature (1)..(1480): Ceres Seq. ID no. 12435038
agggacggagcagttggtcgcccgccattggtccgccgatatctatttttcctctctctccttttctctgcttcagttcccgtccacgagcaggtgtagtagcttctagtagctagcaagtcggccagcacgctcgctcgcagcagtcgctagccagacagcattggcgccggcccgctcgcacgcgcgctatggaggaggcgaggcaaaggcggcggctgtgcctgtgcctggtggtggcggccgggagctgggcgctgctggcggcggtggcgcggtgcgacccgcaggtgccgtgctacttcatcttcggcgactcgctggtggacaacggcaacaacaactacatcgtgtcgctggcgcgcgccaactacccgccctacggcatcgacttcgccgccggcccgtcggggcgcttcaccaacggactcaccaccgtcgatgtcatcgctcaacttctgggtttcgacaacttcatcccgccgttcgccgcaacgagcgcagaccagctcctgggcggcgccaacttcgcctccgcggccgccggcatccgcgccgaaaccggccagcagctgggcgggcggatcccgttcgcggggcaggtgcagaactaccagacggcggtgcagacgctggtgagcatcctgggcgaccaggacacggcgtcggaccacctgagccggtgcatcttcagcgtgggcatgggcagcaacgactacctcaacaactacttcatgccggccttctacaacacgggcagccggtacaccccggagcagttcgccgactcgctcatcgccgactaccgccgccacctgcgggtgctgtacaactacggcgcgcgcaaggtggtgatgatcggggtcggccaggtcgggtgcagccccaacgagctggcccgctacagcgccgacggcgtcacctgcgtcgaccgcatcgacgacgccatccagatgttcaaccgccgcctcgtcggcctcgtcgacgagttcaacgcgctcccaggcgcgcacttcaccttcatcaacgcctacaacatcttcgacgacatcctcgccaacgccgcctcctacgggttcacggtgaccaacgccgggtgctgcggggtcggcaggaacaacgggcaggtgacgtgcctgccctaccaggcgccgtgcgccaacagggaccagcacatcttctgggacgccttccacccgtcggaggcggccaacatcatcgtcggccgccggtcctaccgcgccgagtcgcccaacgacgtctacccgatggacatcagcacgctcgcctccatctgattctcattctgatccctccataaatataaacataaatatatatataatccacccaccactgcgcaaatgctgcaatactaaacggggctccaagaggaggtagccgtgcaattctttcctgtgtacaagctcgcgccttatctgtaatttttcatgctttcatatatttgcatcgggcactt

SEQ ID NO: 27292 - protein, 368 aa, Zea mays subsp. mays
  peptide (1)..(368): Ceres Seq. ID no. 12435039
  misc_feature (37)..(348): Pfam Name: Pfam Description:  GDSL-like Lipase/Acylhydrolase
  misc_feature (9)..(368): NCBI GI NO: 34910808 NR Description: GDSL-motif lipase/hydrolase-like protein
  misc_feature (23)..(368): NCBI GI NO: 34909504 NR Description: putative GDSL-motif lipase/hydrolase-like protein
  misc_feature (7)..(368): NCBI GI NO: 15242458 NR Description: GDSL-motif lipase/hydrolase-like protein
  misc_feature (7)..(368): NCBI GI NO: 21553940 NR Description: GDSL-motif lipase/hydrolase-like protein
  misc_feature (12)..(368): NCBI GI NO: 7485419 NR Description: hypothetical protein F13C5
  misc_feature (12)..(368): NCBI GI NO: 18415211 NR Description: Expressed protein; protein id: At4g18970
  misc_feature (12)..(368): NCBI GI NO: 21618199 NR Description: GDSL-motif lipase/hydrolase-like protein
  misc_feature (13)..(368): NCBI GI NO: 15220512 NR Description: lipase/hydrolase, putative; protein id:At1g29660
  misc_feature (13)..(368): NCBI GI NO: 21594055 NR Description: lipase/hydrolase, putative [Arabidopsis thaliana]
  misc_feature (11)..(368): NCBI GI NO: 21592417 NR Description: lipase/hydrolase, putative [Arabidopsis thaliana]
MEEARQRRRLCLCLVVAAGSWALLAAVARCDPQVPCYFIFGDSLVDNGNNNYIVSLARANYPPYGIDFAAGPSGRFTNGLTTVDVIAQLLGFDNFIPPFAATSADQLLGGANFASAAAGIRAETGQQLGGRIPFAGQVQNYQTAVQTLVSILGDQDTASDHLSRCIFSVGMGSNDYLNNYFMPAFYNTGSRYTPEQFADSLIADYRRHLRVLYNYGARKVVMIGVGQVGCSPNELARYSADGVTCVDRIDDAIQMFNRRLVGLVDEFNALPGAHFTFINAYNIFDDILANAASYGFTVTNAGCCGVGRNNGQVTCLPYQAPCANRDQHIFWDAFHPSEAANIIVGRRSYRAESPNDVYPMDISTLASI

SEQ ID NO: 27293 - protein, 198 aa, Zea mays subsp. mays
  peptide (1)..(198): Ceres Seq. ID no. 12435040
  misc_feature (1)..(178): Pfam Name: Pfam Description:  GDSL-like Lipase/Acylhydrolase
  misc_feature (1)..(198): NCBI GI NO: 34910808 NR Description: GDSL-motif lipase/hydrolase-like protein
  misc_feature (1)..(198): NCBI GI NO: 34909504 NR Description: putative GDSL-motif lipase/hydrolase-like protein
  misc_feature (1)..(198): NCBI GI NO: 15242458 NR Description: GDSL-motif lipase/hydrolase-like protein
  misc_feature (1)..(198): NCBI GI NO: 21553940 NR Description: GDSL-motif lipase/hydrolase-like protein
  misc_feature (1)..(198): NCBI GI NO: 7485419 NR Description: hypothetical protein F13C5
  misc_feature (1)..(198): NCBI GI NO: 18415211 NR Description: Expressed protein; protein id: At4g18970
  misc_feature (1)..(198): NCBI GI NO: 21618199 NR Description: GDSL-motif lipase/hydrolase-like protein
  misc_feature (1)..(198): NCBI GI NO: 15220512 NR Description: lipase/hydrolase, putative; protein id:At1g29660
  misc_feature (1)..(198): NCBI GI NO: 21594055 NR Description: lipase/hydrolase, putative [Arabidopsis thaliana]
  misc_feature (1)..(198): NCBI GI NO: 21592417 NR Description: lipase/hydrolase, putative [Arabidopsis thaliana]
MGSNDYLNNYFMPAFYNTGSRYTPEQFADSLIADYRRHLRVLYNYGARKVVMIGVGQVGCSPNELARYSADGVTCVDRIDDAIQMFNRRLVGLVDEFNALPGAHFTFINAYNIFDDILANAASYGFTVTNAGCCGVGRNNGQVTCLPYQAPCANRDQHIFWDAFHPSEAANIIVGRRSYRAESPNDVYPMDISTLASI

SEQ ID NO: 27294 - protein, 187 aa, Zea mays subsp. mays
  peptide (1)..(187): Ceres Seq. ID no. 12435041
  misc_feature (1)..(167): Pfam Name: Pfam Description:  GDSL-like Lipase/Acylhydrolase
  misc_feature (1)..(187): NCBI GI NO: 34910808 NR Description: GDSL-motif lipase/hydrolase-like protein
  misc_feature (1)..(187): NCBI GI NO: 34909504 NR Description: putative GDSL-motif lipase/hydrolase-like protein
  misc_feature (1)..(187): NCBI GI NO: 15242458 NR Description: GDSL-motif lipase/hydrolase-like protein
  misc_feature (1)..(187): NCBI GI NO: 21553940 NR Description: GDSL-motif lipase/hydrolase-like protein
  misc_feature (1)..(187): NCBI GI NO: 7485419 NR Description: hypothetical protein F13C5
  misc_feature (1)..(187): NCBI GI NO: 18415211 NR Description: Expressed protein; protein id: At4g18970
  misc_feature (1)..(187): NCBI GI NO: 21618199 NR Description: GDSL-motif lipase/hydrolase-like protein
  misc_feature (1)..(187): NCBI GI NO: 15220512 NR Description: lipase/hydrolase, putative; protein id:At1g29660
  misc_feature (1)..(187): NCBI GI NO: 21594055 NR Description: lipase/hydrolase, putative [Arabidopsis thaliana]
  misc_feature (1)..(187): NCBI GI NO: 21592417 NR Description: lipase/hydrolase, putative [Arabidopsis thaliana]
MPAFYNTGSRYTPEQFADSLIADYRRHLRVLYNYGARKVVMIGVGQVGCSPNELARYSADGVTCVDRIDDAIQMFNRRLVGLVDEFNALPGAHFTFINAYNIFDDILANAASYGFTVTNAGCCGVGRNNGQVTCLPYQAPCANRDQHIFWDAFHPSEAANIIVGRRSYRAESPNDVYPMDISTLASI

SEQ ID NO: 27295 - DNA, 1366 bp, Zea mays subsp. mays
  misc_feature (1)..(1366): Ceres Seq. ID no. 12405611
gtgtaggcatggcactaggttcgatttgggcctaaacaggctttggtgggacatccacatccttgtccgcggcgaaacaaaatttcccacagtgagcgaggttcccctcccgactcggtgatggcggcgccggcggcggacgaggcatggtgccggaagacggtgccacgggtgatggaactggtgtgtccgcgccttccgcagcgggacgcatgcgcgctgctcgctgtcagtccctggtgctaccgtgccctcgttgctaactccaggctctgggaggtacttgatctacgtgagatgaagaatgctggaaaccgacttatttcagcactttcactggcaaggtatcgtcacctcaaagtattaaaccttgaatttgctcaagatattgaggatcgatattttgttcatctaaaagaaacgagtggcatctcactggaaaatttggaattcctgaacctaaatgcatgtcagaagatctctgataaaggaattgaagctgttaccagtctttgtcctaatcttcagcgccttgctatctattggattgtaggactgacagactcaagtattgggcacattacaaagaactgcaagcatctagtgcaccttaacttgagcggttgtaagaatatcacggataaaggaatgcagttgattgctaataattaccaaggactaaagacattgaacataaccaggtgtgttaagttgacagatgatgggcttaaccaagttcttctgaagtgttcttcacttgaaagcctaaacctttttgccctttcaagttttactgacagtgtttatagggagataggatcattaagtaatcttacatttctagacctatgtggtgctcagaatctaacggacgatggccttgcatgcatatcaagatgtggacgtctaacatacctcaatttgacttggtgtgtacgtgttactgacgctggcattttagctattgcgcaaggttgtcgagccctcgaactgttaagtttgtttggaatagttggggtgaccgatgcatgccttgaggctttatcaaaatcttgctcgtccagcctcacaacactcgacgtaaatggctgcataggtattaagaggaggagccgggatgacctgctgaagctcttcccatcactgagttgcttcaaagtgcacagctagcaggcacggtggttctcgatggctttgtattctacatctaggaaggggaagggagatgttgaggtgtgtcttgacttcatgttcttgtgttagtatatactttctttgtttcggattttctatgttcgttgattttgctatgtatggagacattgtgtatatctaagttcgtatcaagagaagttctacagcagct

SEQ ID NO: 27296 - protein, 349 aa, Zea mays subsp. mays
  peptide (1)..(349): Ceres Seq. ID no. 12405612
  misc_feature (7)..(349): NCBI GI NO: 18410977 NR Description: putative protein; protein id: At3g58530
  misc_feature (7)..(349): NCBI GI NO: 15450960 NR Description: putative protein [Arabidopsis thaliana]
  misc_feature (96)..(349): NCBI GI NO: 11357437 NR Description: hypothetical protein F14P22
  misc_feature (7)..(308): NCBI GI NO: 11357437 NR Description: hypothetical protein F14P22
  misc_feature (7)..(324): NCBI GI NO: 6164721 NR Description: F-box protein Fbl2 [Homo sapiens]
  misc_feature (7)..(324): NCBI GI NO: 7022695 NR Description: unnamed protein product [Homo sapiens]
  misc_feature (1)..(324): NCBI GI NO: 6063090 NR Description: F-box protein FBL2 [Homo sapiens]
  misc_feature (6)..(324): NCBI GI NO: 30519963 NR Description: F-box and leucine-rich repeat protein 2
  misc_feature (7)..(324): NCBI GI NO: 5919219 NR Description: leucine-rich repeats containing F-box protein FBL3
  misc_feature (7)..(324): NCBI GI NO: 16306582 NR Description: F-box and leucine-rich repeat protein 2
MAAPAADEAWCRKTVPRVMELVCPRLPQRDACALLAVSPWCYRALVANSRLWEVLDLREMKNAGNRLISALSLARYRHLKVLNLEFAQDIEDRYFVHLKETSGISLENLEFLNLNACQKISDKGIEAVTSLCPNLQRLAIYWIVGLTDSSIGHITKNCKHLVHLNLSGCKNITDKGMQLIANNYQGLKTLNITRCVKLTDDGLNQVLLKCSSLESLNLFALSSFTDSVYREIGSLSNLTFLDLCGAQNLTDDGLACISRCGRLTYLNLTWCVRVTDAGILAIAQGCRALELLSLFGIVGVTDACLEALSKSCSSSLTTLDVNGCIGIKRRSRDDLLKLFPSLSCFKVHS

SEQ ID NO: 27297 - protein, 331 aa, Zea mays subsp. mays
  peptide (1)..(331): Ceres Seq. ID no. 12405613
  misc_feature (1)..(331): NCBI GI NO: 18410977 NR Description: putative protein; protein id: At3g58530
  misc_feature (1)..(331): NCBI GI NO: 15450960 NR Description: putative protein [Arabidopsis thaliana]
  misc_feature (78)..(331): NCBI GI NO: 11357437 NR Description: hypothetical protein F14P22
  misc_feature (1)..(290): NCBI GI NO: 11357437 NR Description: hypothetical protein F14P22
  misc_feature (1)..(306): NCBI GI NO: 6164721 NR Description: F-box protein Fbl2 [Homo sapiens]
  misc_feature (1)..(306): NCBI GI NO: 7022695 NR Description: unnamed protein product [Homo sapiens]
  misc_feature (1)..(306): NCBI GI NO: 6063090 NR Description: F-box protein FBL2 [Homo sapiens]
  misc_feature (1)..(306): NCBI GI NO: 30519963 NR Description: F-box and leucine-rich repeat protein 2
  misc_feature (1)..(306): NCBI GI NO: 5919219 NR Description: leucine-rich repeats containing F-box protein FBL3
  misc_feature (1)..(306): NCBI GI NO: 16306582 NR Description: F-box and leucine-rich repeat protein 2
MELVCPRLPQRDACALLAVSPWCYRALVANSRLWEVLDLREMKNAGNRLISALSLARYRHLKVLNLEFAQDIEDRYFVHLKETSGISLENLEFLNLNACQKISDKGIEAVTSLCPNLQRLAIYWIVGLTDSSIGHITKNCKHLVHLNLSGCKNITDKGMQLIANNYQGLKTLNITRCVKLTDDGLNQVLLKCSSLESLNLFALSSFTDSVYREIGSLSNLTFLDLCGAQNLTDDGLACISRCGRLTYLNLTWCVRVTDAGILAIAQGCRALELLSLFGIVGVTDACLEALSKSCSSSLTTLDVNGCIGIKRRSRDDLLKLFPSLSCFKVHS

SEQ ID NO: 27298 - protein, 290 aa, Zea mays subsp. mays
  peptide (1)..(290): Ceres Seq. ID no. 12405614
  misc_feature (1)..(290): NCBI GI NO: 18410977 NR Description: putative protein; protein id: At3g58530
  misc_feature (1)..(290): NCBI GI NO: 15450960 NR Description: putative protein [Arabidopsis thaliana]
  misc_feature (37)..(290): NCBI GI NO: 11357437 NR Description: hypothetical protein F14P22
  misc_feature (1)..(249): NCBI GI NO: 11357437 NR Description: hypothetical protein F14P22
  misc_feature (1)..(265): NCBI GI NO: 6164721 NR Description: F-box protein Fbl2 [Homo sapiens]
  misc_feature (1)..(265): NCBI GI NO: 7022695 NR Description: unnamed protein product [Homo sapiens]
  misc_feature (1)..(265): NCBI GI NO: 6063090 NR Description: F-box protein FBL2 [Homo sapiens]
  misc_feature (1)..(265): NCBI GI NO: 30519963 NR Description: F-box and leucine-rich repeat protein 2
  misc_feature (1)..(265): NCBI GI NO: 5919219 NR Description: leucine-rich repeats containing F-box protein FBL3
  misc_feature (1)..(265): NCBI GI NO: 16306582 NR Description: F-box and leucine-rich repeat protein 2
MKNAGNRLISALSLARYRHLKVLNLEFAQDIEDRYFVHLKETSGISLENLEFLNLNACQKISDKGIEAVTSLCPNLQRLAIYWIVGLTDSSIGHITKNCKHLVHLNLSGCKNITDKGMQLIANNYQGLKTLNITRCVKLTDDGLNQVLLKCSSLESLNLFALSSFTDSVYREIGSLSNLTFLDLCGAQNLTDDGLACISRCGRLTYLNLTWCVRVTDAGILAIAQGCRALELLSLFGIVGVTDACLEALSKSCSSSLTTLDVNGCIGIKRRSRDDLLKLFPSLSCFKVHS

SEQ ID NO: 27299 - DNA, 1460 bp, Zea mays subsp. mays
  misc_feature (1)..(1460): Ceres Seq. ID no. 12405090
acagccagctgcccagctccgtccggcggaactcggaagccctacgctacgcctaccctcgctgtactactagctgccttcctacccgcttcccctctcctcccgacgccgtctccctccctccctccgcctccgccgtcgccgccgggacacgcgaagcttccaggtcttgtctttgggtagaacatgtcgtgctttgcgtgctgtggtgatgaagatacccaagtaccagacaccagggctcaatacccaggacaccatccagcgagggctgatgcataccgcccttctgatcaacctcccaagggtcctcagcctgtgaaaatgcaaccaatcgcagtccctgctattcctgtggatgagattagggaggtgaccaagggttttggtgatgaagctttgattggtgagggatcctttggcagagtatacttgggtgttctaagaaatggtaggagtgccgcggtcaaaaagttggattctaacaagcagccagaccaagagttcttggcccaggtgtctatggtgtcaaggctgaagcatgaaaatgttgtcgagttgcttggttactgtgctgatgggacactccgcgtccttgcttatgagttcgctacaatgggttcccttcatgatatgcttcatggaaggaaaggggttaaaggggctcaacccggtccagtcttatcgtggtcgcaacgtgtgaagatagcggttggggcagcgaaaggcctcgagtatcttcatgagaaagcgcagccccatatcatacaccgagacatcaagtctagcaacgtccttcttttcgatgacgatgtagctaagatcgctgactttgatctgtcgaaccaagctcctgacatggcagctcggcttcactcaactagggttctcggaacattcggataccatgcgcctgagtatgcgatgacggggcaactcagctctaagagtgatgtatatagttttggggttgttcttcttgagctgttgactgggaggaaacctgtcgaccatacattgccaaggggacagcagagtcttgtgacctgggctacaccaagacttagcgaagacaaggttagacagtgtgttgactcaagacttggaggggactatcctcctaaagctgttgcgaagtttgcggctgtcgccgccttgtgtgttcaatacgaagcggacttccggccgaacatgagcattgttgtcaaggcgctacaacccctgctgaatgcgcatgcgcgggcgactaaccctggagaacatgctgggtcataagctttgcgtttgcttctctccctcctcttgttcttgtatgataggtaaggtatatgactcgtcgatgtcgttgttgcggacatgtggctggcagcgtgtaatgtctgtgattattcttcccctgagctgtaaacaagattcttgtatccccacagtatttgattctttctattggtgccgttttt

SEQ ID NO: 27300 - protein, 362 aa, Zea mays subsp. mays
  peptide (1)..(362): Ceres Seq. ID no. 12405091
  misc_feature (1)..(359): NCBI GI NO: 15226492 NR Description: putative protein kinase; protein id: At2g47060
  misc_feature (1)..(347): NCBI GI NO: 3668069 NR Description: Pto kinase interactor 1 [Lycopersicon esculentum]
  misc_feature (1)..(348): NCBI GI NO: 22331138 NR Description: putative protein kinase; protein id: At3g17410
  misc_feature (1)..(360): NCBI GI NO: 15228711 NR Description: serine/threonine protein kinase-like protein
  misc_feature (1)..(348): NCBI GI NO: 15221111 NR Description: Pto kinase interactor 1, putative
  misc_feature (1)..(361): NCBI GI NO: 34894710 NR Description: Putative Pto kinase interactor 1
  misc_feature (1)..(348): NCBI GI NO: 15451196 NR Description: similar to Pto kinase interactor 1 gb|AAC61805.1
  misc_feature (1)..(341): NCBI GI NO: 1586940 NR Description: Ser/Thr kinase
  misc_feature (1)..(340): NCBI GI NO: 25405922 NR Description: protein F21D18.6 [imported] - Arabidopsis thaliana
  misc_feature (1)..(351): NCBI GI NO: 9651969 NR Description: Pti1 kinase-like protein [Glycine max]
MSCFACCGDEDTQVPDTRAQYPGHHPARADAYRPSDQPPKGPQPVKMQPIAVPAIPVDEIREVTKGFGDEALIGEGSFGRVYLGVLRNGRSAAVKKLDSNKQPDQEFLAQVSMVSRLKHENVVELLGYCADGTLRVLAYEFATMGSLHDMLHGRKGVKGAQPGPVLSWSQRVKIAVGAAKGLEYLHEKAQPHIIHRDIKSSNVLLFDDDVAKIADFDLSNQAPDMAARLHSTRVLGTFGYHAPEYAMTGQLSSKSDVYSFGVVLLELLTGRKPVDHTLPRGQQSLVTWATPRLSEDKVRQCVDSRLGGDYPPKAVAKFAAVAALCVQYEADFRPNMSIVVKALQPLLNAHARATNPGEHAGS

SEQ ID NO: 27301 - protein, 316 aa, Zea mays subsp. mays
  peptide (1)..(316): Ceres Seq. ID no. 12405092
  misc_feature (1)..(313): NCBI GI NO: 15226492 NR Description: putative protein kinase; protein id: At2g47060
  misc_feature (1)..(301): NCBI GI NO: 3668069 NR Description: Pto kinase interactor 1 [Lycopersicon esculentum]
  misc_feature (1)..(302): NCBI GI NO: 22331138 NR Description: putative protein kinase; protein id: At3g17410
  misc_feature (1)..(314): NCBI GI NO: 15228711 NR Description: serine/threonine protein kinase-like protein
  misc_feature (1)..(302): NCBI GI NO: 15221111 NR Description: Pto kinase interactor 1, putative
  misc_feature (1)..(315): NCBI GI NO: 34894710 NR Description: Putative Pto kinase interactor 1
  misc_feature (1)..(302): NCBI GI NO: 15451196 NR Description: similar to Pto kinase interactor 1 gb|AAC61805.1
  misc_feature (1)..(295): NCBI GI NO: 1586940 NR Description: Ser/Thr kinase
  misc_feature (1)..(294): NCBI GI NO: 25405922 NR Description: protein F21D18.6 [imported] - Arabidopsis thaliana
  misc_feature (1)..(305): NCBI GI NO: 9651969 NR Description: Pti1 kinase-like protein [Glycine max]
MQPIAVPAIPVDEIREVTKGFGDEALIGEGSFGRVYLGVLRNGRSAAVKKLDSNKQPDQEFLAQVSMVSRLKHENVVELLGYCADGTLRVLAYEFATMGSLHDMLHGRKGVKGAQPGPVLSWSQRVKIAVGAAKGLEYLHEKAQPHIIHRDIKSSNVLLFDDDVAKIADFDLSNQAPDMAARLHSTRVLGTFGYHAPEYAMTGQLSSKSDVYSFGVVLLELLTGRKPVDHTLPRGQQSLVTWATPRLSEDKVRQCVDSRLGGDYPPKAVAKFAAVAALCVQYEADFRPNMSIVVKALQPLLNAHARATNPGEHAGS

SEQ ID NO: 27302 - protein, 250 aa, Zea mays subsp. mays
  peptide (1)..(250): Ceres Seq. ID no. 12405093
  misc_feature (1)..(247): NCBI GI NO: 15226492 NR Description: putative protein kinase; protein id: At2g47060
  misc_feature (1)..(235): NCBI GI NO: 3668069 NR Description: Pto kinase interactor 1 [Lycopersicon esculentum]
  misc_feature (1)..(236): NCBI GI NO: 22331138 NR Description: putative protein kinase; protein id: At3g17410
  misc_feature (1)..(248): NCBI GI NO: 15228711 NR Description: serine/threonine protein kinase-like protein
  misc_feature (1)..(236): NCBI GI NO: 15221111 NR Description: Pto kinase interactor 1, putative
  misc_feature (1)..(249): NCBI GI NO: 34894710 NR Description: Putative Pto kinase interactor 1
  misc_feature (1)..(236): NCBI GI NO: 15451196 NR Description: similar to Pto kinase interactor 1 gb|AAC61805.1
  misc_feature (1)..(229): NCBI GI NO: 1586940 NR Description: Ser/Thr kinase
  misc_feature (1)..(228): NCBI GI NO: 25405922 NR Description: protein F21D18.6 [imported] - Arabidopsis thaliana
  misc_feature (1)..(239): NCBI GI NO: 9651969 NR Description: Pti1 kinase-like protein [Glycine max]
MVSRLKHENVVELLGYCADGTLRVLAYEFATMGSLHDMLHGRKGVKGAQPGPVLSWSQRVKIAVGAAKGLEYLHEKAQPHIIHRDIKSSNVLLFDDDVAKIADFDLSNQAPDMAARLHSTRVLGTFGYHAPEYAMTGQLSSKSDVYSFGVVLLELLTGRKPVDHTLPRGQQSLVTWATPRLSEDKVRQCVDSRLGGDYPPKAVAKFAAVAALCVQYEADFRPNMSIVVKALQPLLNAHARATNPGEHAGS

SEQ ID NO: 27303 - DNA, 1161 bp, Zea mays subsp. mays
  misc_feature (1)..(1161): Ceres Seq. ID no. 12342860
tcccctctgccccgctctgtcatctttgactgcccctgtccggttcctcccctccatcccactccacgccacgccacccccaccggccaagcaaacacgctgcacatttcagttcagacggtccaagaacagcaccaagaaagactccttgccgctcttcttgcttggctactgactaggagagctccctgccgctggttgatcaacagaggcaggcggacggcatggtcagctctatgccgctgtcctcgctgctgctgctgctctccgcagccagcttcggcggcggcgtaaggctcggcgatggtggctacgaggactggaggctcggcaccgccacctacgtcaaggagttccagtcacaccctctcaatgatggcggtggcgcctgcgggtacggcgacctggacatcttcaggtacgggcgctacacgacggggctgagcgcggcgctgttcgggcgcggcggcgcctgcggcggctgctacgagctgcggtgcgtcaaccacatccagtggtgcctccggggcagccccacggtggtggtgacggcgacggacttctgcccggccaacatgggcctcgccgacgacgacgccggcggctggtgcaacttcccgcgggagcacctcgagctgtcggaggccgcgttcctccgcgtcgccaaggccaaggccggcatcgtgccggtgcagttccggagggtgagctgcgacagggccggcggcatgcggttcaccatcaccggtagcgcccacttcctgcaggtgctcatcaccaacgtggcggcggacggcgaggtggcggccgtgaaggtgaaggggtcgaggacggggtggatcccgatggggcggaactggggccagaactggcagtgcgacgccgacctccgcgcccagccgctgtcgttcgaggtcaccggcgggaggggcaggacggtcaccgcctacagcgtggcgccggcggactggatgttcgcgcagacgttcgagggcaagcagttcgccgagtagagatcgacgccgaaaaccaactctccggcggtggtgatgtaagtagaattatacggatgtcttcttgctcgcgagtcgtgaccggcgactcgagaaaacgagacgtattgaatggcgaaaggatttccagtcacaagaaagtggcagt

SEQ ID NO: 27304 - protein, 262 aa, Zea mays subsp. mays
  peptide (1)..(262): Ceres Seq. ID no. 12342861
  misc_feature (169)..(246): Pfam Name: Pfam Description:  Pollen allergen
  misc_feature (53)..(262): NCBI GI NO: 16517043 NR Description: alpha-expansin [Oryza sativa]
  misc_feature (31)..(260): NCBI GI NO: 15233735 NR Description: expansin, putative; protein id: At4g38210
  misc_feature (1)..(260): NCBI GI NO: 21314543 NR Description: alpha-expansin precursor [Gossypium hirsutum]
  misc_feature (1)..(260): NCBI GI NO: 7484721 NR Description: expansin - upland cotton
  misc_feature (2)..(260): NCBI GI NO: 20135554 NR Description: expansin 1 [Musa acuminata]
  misc_feature (32)..(260): NCBI GI NO: 18396479 NR Description: expansin, putative; protein id: At3g03220
  misc_feature (8)..(260): NCBI GI NO: 14193751 NR Description: alpha-expansin [Zea mays]
  misc_feature (1)..(260): NCBI GI NO: 30841322 NR Description: expansin [Gossypium hirsutum]
  misc_feature (32)..(260): NCBI GI NO: 21618283 NR Description: Alpha-expansin 13 precursor
  misc_feature (1)..(260): NCBI GI NO: 40217880 NR Description: expansin-3 [Petunia x hybrida]
MVSSMPLSSLLLLLSAASFGGGVRLGDGGYEDWRLGTATYVKEFQSHPLNDGGGACGYGDLDIFRYGRYTTGLSAALFGRGGACGGCYELRCVNHIQWCLRGSPTVVVTATDFCPANMGLADDDAGGWCNFPREHLELSEAAFLRVAKAKAGIVPVQFRRVSCDRAGGMRFTITGSAHFLQVLITNVAADGEVAAVKVKGSRTGWIPMGRNWGQNWQCDADLRAQPLSFEVTGGRGRTVTAYSVAPADWMFAQTFEGKQFAE

SEQ ID NO: 27305 - protein, 258 aa, Zea mays subsp. mays
  peptide (1)..(258): Ceres Seq. ID no. 12342862
  misc_feature (165)..(242): Pfam Name: Pfam Description:  Pollen allergen
  misc_feature (49)..(258): NCBI GI NO: 16517043 NR Description: alpha-expansin [Oryza sativa]
  misc_feature (27)..(256): NCBI GI NO: 15233735 NR Description: expansin, putative; protein id: At4g38210
  misc_feature (1)..(256): NCBI GI NO: 21314543 NR Description: alpha-expansin precursor [Gossypium hirsutum]
  misc_feature (1)..(256): NCBI GI NO: 7484721 NR Description: expansin - upland cotton
  misc_feature (1)..(256): NCBI GI NO: 20135554 NR Description: expansin 1 [Musa acuminata]
  misc_feature (28)..(256): NCBI GI NO: 18396479 NR Description: expansin, putative; protein id: At3g03220
  misc_feature (4)..(256): NCBI GI NO: 14193751 NR Description: alpha-expansin [Zea mays]
  misc_feature (1)..(256): NCBI GI NO: 30841322 NR Description: expansin [Gossypium hirsutum]
  misc_feature (28)..(256): NCBI GI NO: 21618283 NR Description: Alpha-expansin 13 precursor
  misc_feature (1)..(256): NCBI GI NO: 40217880 NR Description: expansin-3 [Petunia x hybrida]
MPLSSLLLLLSAASFGGGVRLGDGGYEDWRLGTATYVKEFQSHPLNDGGGACGYGDLDIFRYGRYTTGLSAALFGRGGACGGCYELRCVNHIQWCLRGSPTVVVTATDFCPANMGLADDDAGGWCNFPREHLELSEAAFLRVAKAKAGIVPVQFRRVSCDRAGGMRFTITGSAHFLQVLITNVAADGEVAAVKVKGSRTGWIPMGRNWGQNWQCDADLRAQPLSFEVTGGRGRTVTAYSVAPADWMFAQTFEGKQFAE

SEQ ID NO: 27306 - protein, 145 aa, Zea mays subsp. mays
  peptide (1)..(145): Ceres Seq. ID no. 12342863
  misc_feature (52)..(129): Pfam Name: Pfam Description:  Pollen allergen
  misc_feature (1)..(145): NCBI GI NO: 16517043 NR Description: alpha-expansin [Oryza sativa]
  misc_feature (1)..(143): NCBI GI NO: 15233735 NR Description: expansin, putative; protein id: At4g38210
  misc_feature (1)..(143): NCBI GI NO: 21314543 NR Description: alpha-expansin precursor [Gossypium hirsutum]
  misc_feature (1)..(143): NCBI GI NO: 7484721 NR Description: expansin - upland cotton
  misc_feature (1)..(143): NCBI GI NO: 20135554 NR Description: expansin 1 [Musa acuminata]
  misc_feature (1)..(143): NCBI GI NO: 18396479 NR Description: expansin, putative; protein id: At3g03220
  misc_feature (1)..(143): NCBI GI NO: 14193751 NR Description: alpha-expansin [Zea mays]
  misc_feature (1)..(143): NCBI GI NO: 30841322 NR Description: expansin [Gossypium hirsutum]
  misc_feature (1)..(143): NCBI GI NO: 21618283 NR Description: Alpha-expansin 13 precursor
  misc_feature (1)..(143): NCBI GI NO: 40217880 NR Description: expansin-3 [Petunia x hybrida]
MGLADDDAGGWCNFPREHLELSEAAFLRVAKAKAGIVPVQFRRVSCDRAGGMRFTITGSAHFLQVLITNVAADGEVAAVKVKGSRTGWIPMGRNWGQNWQCDADLRAQPLSFEVTGGRGRTVTAYSVAPADWMFAQTFEGKQFAE

SEQ ID NO: 27307 - DNA, 1027 bp, Zea mays subsp. mays
  misc_feature (1)..(1027): Ceres Seq. ID no. 12374422
atagtgccatagtggacaccatattcacccatttcagccggcagctaggtatttcttttttcaacaagccagaccgccaggcgccagtagccattgagtccttgacccgaagtcccacagccgccgccaaaagggttcctcaccatcttgaacgctcgccggaccaatcccaagcagtcctcgcagcagatggcagttcccggcggccgcaacggactcagggacgaggacgacgacatggcccagcacgccgaggccttcggcggcgtctctgacgacgaggacgtgcccccccaccttcgcgccctcgccaacgccgcccagtccggcgacgtcaccgcccttgtggctgccctcgataatcatgatggcagtattgatgttccagttgaagatggtgatactttgctccatctggcatgcttatatggtcatcttccttgtgtgcagctattgctggaacgtggagctagcttggaatgccaagacgaagaaggtgctattcctcttcacgatgcttgtgctggaggcttcactgagctggtccaatatattctcaactttgctgccaacaaggatggttgcgtagtgagaatgctcaacactattgattctgaaggcgatacgccgctccatcatgctgctagaggagaacatttggatgttgtcaagcttcttctccaggctggggcgtcccccaagaaggagaacacttacgggcagacacccgctgatatggctgaccaagacaccgaagttcgaaccctgttgactgccaagcaaattgaggcaagcacacacatgagtgatgattaagcggcattggaatccttagttgcaactggtactggtaatgttgagaaatagccgtaacatcttatctgccatccaaacttcatttgaactgaagtaatattgtaatcagactagtatggaggggttagcttagctacatgatcatgctccttttccttatcgctgcattatactaaagatgaagtggaacacccatcggtctttcttgtcc

SEQ ID NO: 27308 - protein, 208 aa, Zea mays subsp. mays
  peptide (1)..(208): Ceres Seq. ID no. 12374423
  misc_feature (69)..(101): Pfam Name: Pfam Description:  Ankyrin repeat
  misc_feature (1)..(204): NCBI GI NO: 15451616 NR Description: Hypothetical protein with similarity to ankyrinsand BRCA1-associated ring domain proteins
  misc_feature (1)..(194): NCBI GI NO: 18398673 NR Description: expressed protein; protein id: At3g09890
  misc_feature (1)..(178): NCBI GI NO: 6681330 NR Description: hypothetical protein [Arabidopsis thaliana]
  misc_feature (1)..(88): NCBI GI NO: 27497215 NR Description: Unknown protein
  misc_feature (71)..(207): NCBI GI NO: 27497215 NR Description: Unknown protein
  misc_feature (69)..(194): NCBI GI NO: 28373837 NR Description: Chain A
  misc_feature (32)..(207): NCBI GI NO: 28274854 NR Description: ankyrin repeat protein E4_8 [synthetic construct]
  misc_feature (32)..(189): NCBI GI NO: 28274850 NR Description: ankyrin repeat protein E3_19 [synthetic construct]
  misc_feature (32)..(189): NCBI GI NO: 28373666 NR Description: Chain A
  misc_feature (28)..(189): NCBI GI NO: 28274852 NR Description: ankyrin repeat protein E4_2 [synthetic construct]
MAVPGGRNGLRDEDDDMAQHAEAFGGVSDDEDVPPHLRALANAAQSGDVTALVAALDNHDGSIDVPVEDGDTLLHLACLYGHLPCVQLLLERGASLECQDEEGAIPLHDACAGGFTELVQYILNFAANKDGCVVRMLNTIDSEGDTPLHHAARGEHLDVVKLLLQAGASPKKENTYGQTPADMADQDTEVRTLLTAKQIEASTHMSDD

SEQ ID NO: 27309 - protein, 192 aa, Zea mays subsp. mays
  peptide (1)..(192): Ceres Seq. ID no. 12374424
  misc_feature (53)..(85): Pfam Name: Pfam Description:  Ankyrin repeat
  misc_feature (1)..(188): NCBI GI NO: 15451616 NR Description: Hypothetical protein with similarity to ankyrinsand BRCA1-associated ring domain proteins
  misc_feature (1)..(178): NCBI GI NO: 18398673 NR Description: expressed protein; protein id: At3g09890
  misc_feature (1)..(162): NCBI GI NO: 6681330 NR Description: hypothetical protein [Arabidopsis thaliana]
  misc_feature (1)..(72): NCBI GI NO: 27497215 NR Description: Unknown protein
  misc_feature (55)..(191): NCBI GI NO: 27497215 NR Description: Unknown protein
  misc_feature (53)..(178): NCBI GI NO: 28373837 NR Description: Chain A
  misc_feature (16)..(191): NCBI GI NO: 28274854 NR Description: ankyrin repeat protein E4_8 [synthetic construct]
  misc_feature (16)..(173): NCBI GI NO: 28274850 NR Description: ankyrin repeat protein E3_19 [synthetic construct]
  misc_feature (16)..(173): NCBI GI NO: 28373666 NR Description: Chain A
  misc_feature (12)..(173): NCBI GI NO: 28274852 NR Description: ankyrin repeat protein E4_2 [synthetic construct]
MAQHAEAFGGVSDDEDVPPHLRALANAAQSGDVTALVAALDNHDGSIDVPVEDGDTLLHLACLYGHLPCVQLLLERGASLECQDEEGAIPLHDACAGGFTELVQYILNFAANKDGCVVRMLNTIDSEGDTPLHHAARGEHLDVVKLLLQAGASPKKENTYGQTPADMADQDTEVRTLLTAKQIEASTHMSDD

SEQ ID NO: 27310 - DNA, 1345 bp, Zea mays subsp. mays
  misc_feature (1)..(1345): Ceres Seq. ID no. 13494449
  misc_feature (1270)..(1270): n is a, c, t, g, unknown, or other
gttgagaccgcagagcgctcgccgaagcccgtcctgtcctgtagctagctgatctccctccgaaactctctgctcgcccgctgcctgctggaagcttggcgcggtcccggcggcggcattctccggcaatggggtgcaaggcgtgcgacaagcccaagcccagctaccgcaagggcctgtggtcgccggaggaggaccagaagctccgcgactacatcctcctccacggccacggctgctggagcgcgctccccgccaaagccgggctccagcggaacggcaagagctgcaggctgcggtggatcaactacctccggccgggcctgaagcacggcaccttctccccggaggaggaggagacggtgatgagcctccacgccacgctcggcaacaagtggtctaggatcgccaaacacctgcctggcaggaccgacaacgaggtcaagaaccactggaactcgtacctcaagaagagggtcgagggcaaggatggacccagcacgccgccgtccgattcagacgactcgcattgcgccaagcccgggggcggaagcacggcgcgggagacgggagacgaccgcccagcggactactccggctcgtcggagccgcgcgagccgtcgtcgtcgtcgtcgcccgacacgagctgcctgacgggcccgcccaaggtcatgttcgtggactggctcgacatggactgcatgggtggtggtggtggtggcccgccgggcgcggcggcagcggcagcggcacctggtctgggcgctgctgcgggcgtggccagggccagcacgggcgatgatcagatgacgatggatgatgggtcggcgtccggtcgtgccgacgtgtccctgcacggtacgttcggtgacagcggcggcgccggctgctgggagttccacgagagcttcgatcagatgcaggcggccggcttctgcgacctgctctcctccattggcgagtactacttcggactcgactaggctctcggccctggttggtgatcggtcgttgctcaaaggatttgcgcgtttttttttttttaactttgttagaagtttcgatggatggctttgtctgtgcttgtaaattgttgtcgtgtacggtatagatagagcaattttaaaggcagataaaagtcaaggacggtgacgagtcacgagtgtcgtgtttcttgcgggttcactttggggaggagtggagagcaccgacggatgggtaggaagatttattagttatatatgaggatataaagtacttaagagttgcnacgcttgcagctagcgattgggctgcacaaactgtgctttcttaatttgaaaatggggcgtcctcttttagtgtt

SEQ ID NO: 27311 - protein, 284 aa, Zea mays subsp. mays
  peptide (1)..(284): Ceres Seq. ID no. 15222931
  misc_feature (15)..(62): Pfam Name: Pfam Description:  Myb-like DNA-binding domain
  misc_feature (4)..(187): NCBI GI NO: 15242947 NR Description: myb family transcription factor(MYB19)
  misc_feature (13)..(187): NCBI GI NO: 15235149 NR Description: myb family transcription factor
  misc_feature (13)..(187): NCBI GI NO: 25387539 NR Description: myb-like protein [imported] - Arabidopsis thaliana
  misc_feature (1)..(183): NCBI GI NO: 22329445 NR Description: myb family transcription factor
  misc_feature (1)..(183): NCBI GI NO: 25294104 NR Description: hypothetical protein
  misc_feature (1)..(149): NCBI GI NO: 34901838 NR Description: putative myb-related protein
  misc_feature (6)..(209): NCBI GI NO: 28927688 NR Description: putative Myb-like DNA-binding protein
  misc_feature (1)..(143): NCBI GI NO: 34910458 NR Description: putative transcription factor
  misc_feature (8)..(188): NCBI GI NO: 15229055 NR Description: myb family transcription factor
  misc_feature (1)..(134): NCBI GI NO: 2129932 NR Description: myb-related protein 1 - tomato
MGCKACDKPKPSYRKGLWSPEEDQKLRDYILLHGHGCWSALPAKAGLQRNGKSCRLRWINYLRPGLKHGTFSPEEEETVMSLHATLGNKWSRIAKHLPGRTDNEVKNHWNSYLKKRVEGKDGPSTPPSDSDDSHCAKPGGGSTARETGDDRPADYSGSSEPREPSSSSSPDTSCLTGPPKVMFVDWLDMDCMGGGGGGPPGAAAAAAAPGLGAAAGVARASTGDDQMTMDDGSASGRADVSLHGTFGDSGGAGCWEFHESFDQMQAAGFCDLLSSIGEYYFGLD

SEQ ID NO: 27312 - protein, 205 aa, Zea mays subsp. mays
  peptide (1)..(205): Ceres Seq. ID no. 15222932
  misc_feature (1)..(108): NCBI GI NO: 15242947 NR Description: myb family transcription factor(MYB19)
  misc_feature (1)..(108): NCBI GI NO: 15235149 NR Description: myb family transcription factor
  misc_feature (1)..(108): NCBI GI NO: 25387539 NR Description: myb-like protein [imported] - Arabidopsis thaliana
  misc_feature (1)..(104): NCBI GI NO: 22329445 NR Description: myb family transcription factor
  misc_feature (1)..(104): NCBI GI NO: 25294104 NR Description: hypothetical protein
  misc_feature (1)..(70): NCBI GI NO: 34901838 NR Description: putative myb-related protein
  misc_feature (1)..(130): NCBI GI NO: 28927688 NR Description: putative Myb-like DNA-binding protein
  misc_feature (1)..(64): NCBI GI NO: 34910458 NR Description: putative transcription factor
  misc_feature (1)..(109): NCBI GI NO: 15229055 NR Description: myb family transcription factor
  misc_feature (1)..(55): NCBI GI NO: 2129932 NR Description: myb-related protein 1 - tomato
MSLHATLGNKWSRIAKHLPGRTDNEVKNHWNSYLKKRVEGKDGPSTPPSDSDDSHCAKPGGGSTARETGDDRPADYSGSSEPREPSSSSSPDTSCLTGPPKVMFVDWLDMDCMGGGGGGPPGAAAAAAAPGLGAAAGVARASTGDDQMTMDDGSASGRADVSLHGTFGDSGGAGCWEFHESFDQMQAAGFCDLLSSIGEYYFGLD

SEQ ID NO: 27313 - DNA, 1041 bp, Zea mays subsp. mays
  misc_feature (1)..(1041): Ceres Seq. ID no. 13498730
taatcgaaaaaggtctctagtctccactccgctgtcgctccggcccagcagctcgaccaccaccgctccgcaggcaggaagccgccaaggacatggacgacgctcaggagcctccctcccctccctccccctcgcagtcatcctcctcctcttcctcgtcgtcctccgtggccccgaacccgaagaagcgggcgcgcaaggacggcagccggcacccgacgtaccgcggcgtgcgcatgcggagctggggcaagtgggtgtcggagatcagggagccccgcaagaagtctcgcatctggctgggcaccttcgccaccgcggagatggcggcgcgcgcgcacgacgtggccgcgctcgccatcaagggcgcgcgcgacgcgcacctcaacttcccgggcctcgcgcacctgctcccgcgcccggccaccgcggcgcccaaggacgtgcaggccgcggccgcgctcgccgcggccgccgacttccctctgccgccgtcccccggcggcgccaatgccaagagccccgagagcagcagctccggctccgcctccgcctccgcctccgacgacgccagcgccgcctcgccggcggcgccgcaggacgccgagcccaacccggacgacgcgctgttcgacctcccggacctgcttctggacctgagatgctgcgggccgtcgtcgtgggccgtcgacgacgacgtggccggcggcggcgcgttccggatcatcgaggagccgctgctgtgggagtactgaactgatcaatgccaccgcgccagtcctgtccttgagcggttggcagtgatcagcgagttcatgcatcggtagctgttgagtgttagatcgaccggacggacacatgtaaatgcagctcctttccgctcctctgtttcgtgctctggattactctgctgtttcttctctttatgccagatttaggtgccgcgcttgtataaagttagttcctttttttccctccttctcttgcttgatttggaagacaagaatatgtataaccataagaagcatcttatcttgtgcc

SEQ ID NO: 27314 - protein, 252 aa, Zea mays subsp. mays
  peptide (1)..(252): Ceres Seq. ID no. 13498731
NRKRSLVSTPLSLRPSSSTTTAPQAGSRQGHGRRSGASLPSLPLAVILLLFLVVLRGPEPEEAGAQGRQPAPDVPRRAHAELGQVGVGDQGAPQEVSHLAGHLRHRGDGGARARRGRARHQGRARRAPQLPGPRAPAPAPGHRGAQGRAGRGRARRGRRLPSAAVPRRRQCQEPREQQLRLRLRLRLRRRQRRLAGGAAGRRAQPGRRAVRPPGPASGPEMLRAVVVGRRRRRGRRRRVPDHRGAAAVGVLN

SEQ ID NO: 27315 - protein, 220 aa, Zea mays subsp. mays
  peptide (1)..(220): Ceres Seq. ID no. 13498732
  misc_feature (41)..(105): Pfam Name: Pfam Description:  AP2 domain
  misc_feature (1)..(220): NCBI GI NO: 38605848 NR Description: OSJNBb0034G17.6
  misc_feature (1)..(220): NCBI GI NO: 14140163 NR Description: putative AP2 domain containing protein
  misc_feature (1)..(219): NCBI GI NO: 21908034 NR Description: DRE binding factor 2 [Zea mays]
  misc_feature (1)..(219): NCBI GI NO: 25990951 NR Description: DREB-like protein [Zea mays]
  misc_feature (1)..(220): NCBI GI NO: 14140155 NR Description: putative AP2 domain transcription factor
  misc_feature (1)..(219): NCBI GI NO: 37536842 NR Description: putative DNA binding protein
  misc_feature (14)..(220): NCBI GI NO: 38605845 NR Description: OSJNBb0034G17.3
  misc_feature (1)..(218): NCBI GI NO: 38605844 NR Description: OSJNBb0034G17.2
  misc_feature (2)..(188): NCBI GI NO: 15225381 NR Description: AP2 domain transcription factor TINY, putative
  misc_feature (15)..(165): NCBI GI NO: 15227471 NR Description: AP2 domain transcription factor, putative
MDDAQEPPSPPSPSQSSSSSSSSSSVAPNPKKRARKDGSRHPTYRGVRMRSWGKWVSEIREPRKKSRIWLGTFATAEMAARAHDVAALAIKGARDAHLNFPGLAHLLPRPATAAPKDVQAAAALAAAADFPLPPSPGGANAKSPESSSSGSASASASDDASAASPAAPQDAEPNPDDALFDLPDLLLDLRCCGPSSWAVDDDVAGGGAFRIIEEPLLWEY

SEQ ID NO: 27316 - protein, 172 aa, Zea mays subsp. mays
  peptide (1)..(172): Ceres Seq. ID no. 13498733
  misc_feature (1)..(57): Pfam Name: Pfam Description:  AP2 domain
  misc_feature (1)..(172): NCBI GI NO: 38605848 NR Description: OSJNBb0034G17.6
  misc_feature (1)..(172): NCBI GI NO: 14140163 NR Description: putative AP2 domain containing protein
  misc_feature (1)..(171): NCBI GI NO: 21908034 NR Description: DRE binding factor 2 [Zea mays]
  misc_feature (1)..(171): NCBI GI NO: 25990951 NR Description: DREB-like protein [Zea mays]
  misc_feature (1)..(172): NCBI GI NO: 14140155 NR Description: putative AP2 domain transcription factor
  misc_feature (1)..(171): NCBI GI NO: 37536842 NR Description: putative DNA binding protein
  misc_feature (1)..(172): NCBI GI NO: 38605845 NR Description: OSJNBb0034G17.3
  misc_feature (1)..(170): NCBI GI NO: 38605844 NR Description: OSJNBb0034G17.2
  misc_feature (1)..(140): NCBI GI NO: 15225381 NR Description: AP2 domain transcription factor TINY, putative
  misc_feature (1)..(117): NCBI GI NO: 15227471 NR Description: AP2 domain transcription factor, putative
MRSWGKWVSEIREPRKKSRIWLGTFATAEMAARAHDVAALAIKGARDAHLNFPGLAHLLPRPATAAPKDVQAAAALAAAADFPLPPSPGGANAKSPESSSSGSASASASDDASAASPAAPQDAEPNPDDALFDLPDLLLDLRCCGPSSWAVDDDVAGGGAFRIIEEPLLWEY

SEQ ID NO: 27317 - DNA, 1578 bp, Zea mays subsp. mays
  misc_feature (1)..(1578): Ceres Seq. ID no. 12349057
accccaacccaacccctgccgcgcccgcacccagcgccccgagccctgctcccccatcgtcttcttccttgtccgtctccactaccgaccaacggctgcctgctcacacttcgccactactgctgctgcgcgttggcgagcgcgcgtggttcacgagcgagctccaccacaagcccagtcgcgcacggcagccgttttgcttgttttgtttgcttaccgcctcttccgtccttcctcttttgcgcggcctggctggctgggctagctagctgttctgttcattccgagttcccggcatagcacacgaggttggagttggaggcgtaccgagggagcagacagcagaggacactataagagtagctagccctacccaacatcttcagccgtgcttgccaacttggagagagagagagagaaaagagaagagaagggagtgatcgcaggaaggaggatcggagtgatgggagacgcagcagagaccaacaagactcttcacaactggatgggcgagccgaggccgaggtcgagcgaccagcgcgacgaggaggagacgcttcagctcagcctcggcctccccggaggaggagcaagtgcgggtggtgtggtagcacccgccgcctggagaatgctgccggccagagacgaggagatgcgctctgctgctgctgtcgtcgacacctccctgctctctctcggctactccgccccagctttctcgccccgctcaccaggcaaggcaaaggggtccccagcagcagctacagagaatgcccttgcatccaccaacaacgcctcccagagaagatctccaaataccccggttattgggtggcctccagttcgtgccttcagaagaaatctggccacctctagcagagcatctcttgaaaatcagaatgggaagaaggcagccaaacctgaacagaccacaaaaagagctccatttgtaaagatcaacatggacggcatccctattggtagaaaaatcgacctgagtgccctcggtagttacgatgagctgtctctgtctgtcgacaagctattccgggggcttcttgcagcacaacaagaccctctggctgccggcgcaaaggagtgttcacaggaagaggtggcgatatcgggtttactagatggaactggggagtacactctggtttatgaggattatgaaggcgatagggtgctggttggcgatgtcccctgggggatgtttgtttcttcggtgaagaggctgcgcgttctgaagacatctgacctctcttcatctctaacagcacctcctggccagaagaggacggtaaccgagtgtccagtgtttacctcttagacacttccttgcagtgatgttggtgtgctgtgaagaagaaaacgtcttctgagcttgtatcatctttcttcctggtttcttcctcttcttttccctactttctcttggaaggaatcatcaaagaaccgaaccgaccttttgggttttcctgctcttgtttattttgtttctctttccgggaagcgatgtgaccttttgggttgtatgtaaatgttcagacgaaccagctctatgtttatgcagcc

SEQ ID NO: 27318 - protein, 289 aa, Zea mays subsp. mays
  peptide (1)..(289): Ceres Seq. ID no. 12349058
  misc_feature (58)..(272): Pfam Name: Pfam Description:  AUX/IAA family
  misc_feature (58)..(272): NCBI GI NO: 15228226 NR Description: phytochrome-associated protein 1
  misc_feature (58)..(272): NCBI GI NO: 21593333 NR Description: phytochrome-associated protein 1 (PAP1)
  misc_feature (103)..(272): NCBI GI NO: 4093155 NR Description: phytochrome-associated protein 1
  misc_feature (53)..(283): NCBI GI NO: 34906394 NR Description: P0710E05.9
  misc_feature (106)..(278): NCBI GI NO: 15218080 NR Description: auxin regulated protein IAA18, putative
  misc_feature (106)..(278): NCBI GI NO: 21594025 NR Description: auxin regulated protein IAA18, putative
  misc_feature (106)..(278): NCBI GI NO: 25296228 NR Description: auxin-induced protein IAA18
  misc_feature (90)..(271): NCBI GI NO: 34909384 NR Description: putative phytochrome-associated protein
  misc_feature (76)..(195): NCBI GI NO: 18420964 NR Description: putative protein; protein id: At5g25890
  misc_feature (229)..(265): NCBI GI NO: 18420964 NR Description: putative protein; protein id: At5g25890
MGDAAETNKTLHNWMGEPRPRSSDQRDEEETLQLSLGLPGGGASAGGVVAPAAWRMLPARDEEMRSAAAVVDTSLLSLGYSAPAFSPRSPGKAKGSPAAATENALASTNNASQRRSPNTPVIGWPPVRAFRRNLATSSRASLENQNGKKAAKPEQTTKRAPFVKINMDGIPIGRKIDLSALGSYDELSLSVDKLFRGLLAAQQDPLAAGAKECSQEEVAISGLLDGTGEYTLVYEDYEGDRVLVGDVPWGMFVSSVKRLRVLKTSDLSSSLTAPPGQKRTVTECPVFTS

SEQ ID NO: 27319 - protein, 275 aa, Zea mays subsp. mays
  peptide (1)..(275): Ceres Seq. ID no. 12349059
  misc_feature (44)..(258): Pfam Name: Pfam Description:  AUX/IAA family
  misc_feature (44)..(258): NCBI GI NO: 15228226 NR Description: phytochrome-associated protein 1
  misc_feature (44)..(258): NCBI GI NO: 21593333 NR Description: phytochrome-associated protein 1 (PAP1)
  misc_feature (89)..(258): NCBI GI NO: 4093155 NR Description: phytochrome-associated protein 1
  misc_feature (39)..(269): NCBI GI NO: 34906394 NR Description: P0710E05.9
  misc_feature (92)..(264): NCBI GI NO: 15218080 NR Description: auxin regulated protein IAA18, putative
  misc_feature (92)..(264): NCBI GI NO: 21594025 NR Description: auxin regulated protein IAA18, putative
  misc_feature (92)..(264): NCBI GI NO: 25296228 NR Description: auxin-induced protein IAA18
  misc_feature (76)..(257): NCBI GI NO: 34909384 NR Description: putative phytochrome-associated protein
  misc_feature (62)..(181): NCBI GI NO: 18420964 NR Description: putative protein; protein id: At5g25890
  misc_feature (215)..(251): NCBI GI NO: 18420964 NR Description: putative protein; protein id: At5g25890
MGEPRPRSSDQRDEEETLQLSLGLPGGGASAGGVVAPAAWRMLPARDEEMRSAAAVVDTSLLSLGYSAPAFSPRSPGKAKGSPAAATENALASTNNASQRRSPNTPVIGWPPVRAFRRNLATSSRASLENQNGKKAAKPEQTTKRAPFVKINMDGIPIGRKIDLSALGSYDELSLSVDKLFRGLLAAQQDPLAAGAKECSQEEVAISGLLDGTGEYTLVYEDYEGDRVLVGDVPWGMFVSSVKRLRVLKTSDLSSSLTAPPGQKRTVTECPVFTS

SEQ ID NO: 27320 - protein, 234 aa, Zea mays subsp. mays
  peptide (1)..(234): Ceres Seq. ID no. 12349060
  misc_feature (3)..(217): Pfam Name: Pfam Description:  AUX/IAA family
  misc_feature (3)..(217): NCBI GI NO: 15228226 NR Description: phytochrome-associated protein 1
  misc_feature (3)..(217): NCBI GI NO: 21593333 NR Description: phytochrome-associated protein 1 (PAP1)
  misc_feature (48)..(217): NCBI GI NO: 4093155 NR Description: phytochrome-associated protein 1
  misc_feature (1)..(228): NCBI GI NO: 34906394 NR Description: P0710E05.9
  misc_feature (51)..(223): NCBI GI NO: 15218080 NR Description: auxin regulated protein IAA18, putative
  misc_feature (51)..(223): NCBI GI NO: 21594025 NR Description: auxin regulated protein IAA18, putative
  misc_feature (51)..(223): NCBI GI NO: 25296228 NR Description: auxin-induced protein IAA18
  misc_feature (35)..(216): NCBI GI NO: 34909384 NR Description: putative phytochrome-associated protein
  misc_feature (21)..(140): NCBI GI NO: 18420964 NR Description: putative protein; protein id: At5g25890
  misc_feature (174)..(210): NCBI GI NO: 18420964 NR Description: putative protein; protein id: At5g25890
MLPARDEEMRSAAAVVDTSLLSLGYSAPAFSPRSPGKAKGSPAAATENALASTNNASQRRSPNTPVIGWPPVRAFRRNLATSSRASLENQNGKKAAKPEQTTKRAPFVKINMDGIPIGRKIDLSALGSYDELSLSVDKLFRGLLAAQQDPLAAGAKECSQEEVAISGLLDGTGEYTLVYEDYEGDRVLVGDVPWGMFVSSVKRLRVLKTSDLSSSLTAPPGQKRTVTECPVFTS

SEQ ID NO: 27321 - DNA, 1685 bp, Zea mays subsp. mays
  misc_feature (1)..(1685): Ceres Seq. ID no. 12409422
  misc_feature (1043)..(1043): n is a, c, t, g, unknown, or other
  misc_feature (1022)..(1022): n is a, c, t, g, unknown, or other
  misc_feature (957)..(957): n is a, c, t, g, unknown, or other
attcgccctgcctctagctgctgcttcttccaggatcggggatcggagcttgtgctgctactgctactataccagcgctagctagcagcagccgccggccggctcgcgcaagctaaggaagggtcgacatgacgatggggctccgcgtccgcgactcctccgcgctgctggctctggccgtcgcgctcgcctgctgctccgttgcagtggtggcctacgaccccctggacccgaacggcaacatcaccatcaagtgggacgtgatctcgtggacgcccgacgggtacgtggcgatggtgacgatgagcaactaccagatgtaccggcacatcatggcgcccgggtggacgttggggtggtcgtgggccaagaaggaggtgatctggtccatcgtgggggcgcaggccacggagcagggggactgctccaagttcaagggcggcatcccgcactgctgcaagcgcaccccggccgtggtggacctcctcccgggggtgccctacaaccagcagatcgccaactgctgcaaggccggcgtggtgtcggcgtacgggcaggacccggcggggtccgtctccgcgttccaggtctccgtcggcctggccggtaccaccaacaagacggtgaagctgcccaggaacttcacgctcatggggcccgggctgggctacacctgcgggcccgccgccgtggtgccgtccaccgtgtactggacgcccgaccaccggcgccggacgcaggcgctcatgacgtggacggtgacctgcacctactcgcagcagctggcgtcccggtacccgtcctgctgcgtctccttctcctccttctacaacagcaccatcgtgccgtgcgcccggtgcgcgtgcggctgcggcggccacggcggccacgcgggtccgggcggctgcatcgagggggactccaagcgcgcgctgtcggccggggtgaacacgccgngcaaggacggccaggcgctgctgcagtgcacgccgcacatgtgccccatccgggtgcactggcangtcaagctcaactacaaggantactggcgcgccaagatcgccatcaccaactacaactacaggatgaactacacgcagtggacgctggtggcgcagcaccccaacctggacaacgtcaccgaggtcttcagcttccagtacaagccgctgcaaccatacgggagcatcaatgacactggcatgttctacgggctcaagttctacaacgactttctcatggaggccggcccgttcggcaacgtgcagtcggaggtgctcatgcgcaaggacgcaaggaccttcaccttcagcatgggctgggcgttcccgcgcaagatctacttcaacggcgacgagtgcaagatgccgccgccggactcctacccctacctgcccaacgccgcgcccgtcgtcgcctcgcagctggtcctgtccgccgccgcctcggcgttcctactgttgctgctcctggtggcatgaccgtgaccgaaccaagggcaaggcctccgttttgttttcccgtctcgtcccgtgggcagggagcagacttcagtaggcagggcattttatttggtttttttgccaaggattcaacacttgggttttcgtcagaggaaaactgtcgtgtatgtagtgtgagttgcaggtcgtcggatccccacgtacaagacaatctttggatcg

SEQ ID NO: 27322 - protein, 450 aa, Zea mays subsp. mays
  peptide (1)..(450): Ceres Seq. ID no. 12409423
  misc_feature (29)..(447): NCBI GI NO: 21553837 NR Description: phytochelatin synthetase-like protein
  misc_feature (29)..(447): NCBI GI NO: 18424412 NR Description: phytochelatin synthetase - like protein
  misc_feature (29)..(448): NCBI GI NO: 15232863 NR Description: unknown protein; protein id: At3g02210.1
  misc_feature (29)..(449): NCBI GI NO: 13477083 NR Description: phytochelatin synthetase-like protein
  misc_feature (8)..(449): NCBI GI NO: 18406342 NR Description: phytochelatin synthetase-like protein
  misc_feature (29)..(449): NCBI GI NO: 21618129 NR Description: phytochelatin synthetase-like protein
  misc_feature (8)..(262): NCBI GI NO: 10092257 NR Description: unknown protein; 31818-33764
  misc_feature (301)..(449): NCBI GI NO: 10092257 NR Description: unknown protein; 31818-33764
  misc_feature (88)..(447): NCBI GI NO: 25456127 NR Description: probable phytochelatin synthetase
  misc_feature (88)..(428): NCBI GI NO: 6690554 NR Description: phytochelatin synthetase-like protein [Zea mays]
  misc_feature (277)..(277): Xaa is any aa, unknown or other
  misc_feature (298)..(298): Xaa is any aa, unknown or other
  misc_feature (305)..(305): Xaa is any aa, unknown or other
MTMGLRVRDSSALLALAVALACCSVAVVAYDPLDPNGNITIKWDVISWTPDGYVAMVTMSNYQMYRHIMAPGWTLGWSWAKKEVIWSIVGAQATEQGDCSKFKGGIPHCCKRTPAVVDLLPGVPYNQQIANCCKAGVVSAYGQDPAGSVSAFQVSVGLAGTTNKTVKLPRNFTLMGPGLGYTCGPAAVVPSTVYWTPDHRRRTQALMTWTVTCTYSQQLASRYPSCCVSFSSFYNSTIVPCARCACGCGGHGGHAGPGGCIEGDSKRALSAGVNTPXKDGQALLQCTPHMCPIRVHWXVKLNYKXYWRAKIAITNYNYRMNYTQWTLVAQHPNLDNVTEVFSFQYKPLQPYGSINDTGMFYGLKFYNDFLMEAGPFGNVQSEVLMRKDARTFTFSMGWAFPRKIYFNGDECKMPPPDSYPYLPNAAPVVASQLVLSAAASAFLLLLLLVA

SEQ ID NO: 27323 - protein, 448 aa, Zea mays subsp. mays
  peptide (1)..(448): Ceres Seq. ID no. 12409424
  misc_feature (27)..(445): NCBI GI NO: 21553837 NR Description: phytochelatin synthetase-like protein
  misc_feature (27)..(445): NCBI GI NO: 18424412 NR Description: phytochelatin synthetase - like protein
  misc_feature (27)..(446): NCBI GI NO: 15232863 NR Description: unknown protein; protein id: At3g02210.1
  misc_feature (27)..(447): NCBI GI NO: 13477083 NR Description: phytochelatin synthetase-like protein
  misc_feature (6)..(447): NCBI GI NO: 18406342 NR Description: phytochelatin synthetase-like protein
  misc_feature (27)..(447): NCBI GI NO: 21618129 NR Description: phytochelatin synthetase-like protein
  misc_feature (6)..(260): NCBI GI NO: 10092257 NR Description: unknown protein; 31818-33764
  misc_feature (299)..(447): NCBI GI NO: 10092257 NR Description: unknown protein; 31818-33764
  misc_feature (86)..(445): NCBI GI NO: 25456127 NR Description: probable phytochelatin synthetase
  misc_feature (86)..(426): NCBI GI NO: 6690554 NR Description: phytochelatin synthetase-like protein [Zea mays]
  misc_feature (275)..(275): Xaa is any aa, unknown or other
  misc_feature (296)..(296): Xaa is any aa, unknown or other
  misc_feature (303)..(303): Xaa is any aa, unknown or other
MGLRVRDSSALLALAVALACCSVAVVAYDPLDPNGNITIKWDVISWTPDGYVAMVTMSNYQMYRHIMAPGWTLGWSWAKKEVIWSIVGAQATEQGDCSKFKGGIPHCCKRTPAVVDLLPGVPYNQQIANCCKAGVVSAYGQDPAGSVSAFQVSVGLAGTTNKTVKLPRNFTLMGPGLGYTCGPAAVVPSTVYWTPDHRRRTQALMTWTVTCTYSQQLASRYPSCCVSFSSFYNSTIVPCARCACGCGGHGGHAGPGGCIEGDSKRALSAGVNTPXKDGQALLQCTPHMCPIRVHWXVKLNYKXYWRAKIAITNYNYRMNYTQWTLVAQHPNLDNVTEVFSFQYKPLQPYGSINDTGMFYGLKFYNDFLMEAGPFGNVQSEVLMRKDARTFTFSMGWAFPRKIYFNGDECKMPPPDSYPYLPNAAPVVASQLVLSAAASAFLLLLLLVA

SEQ ID NO: 27324 - protein, 395 aa, Zea mays subsp. mays
  peptide (1)..(395): Ceres Seq. ID no. 12409425
  misc_feature (1)..(392): NCBI GI NO: 21553837 NR Description: phytochelatin synthetase-like protein
  misc_feature (1)..(392): NCBI GI NO: 18424412 NR Description: phytochelatin synthetase - like protein
  misc_feature (1)..(393): NCBI GI NO: 15232863 NR Description: unknown protein; protein id: At3g02210.1
  misc_feature (1)..(394): NCBI GI NO: 13477083 NR Description: phytochelatin synthetase-like protein
  misc_feature (1)..(394): NCBI GI NO: 18406342 NR Description: phytochelatin synthetase-like protein
  misc_feature (1)..(394): NCBI GI NO: 21618129 NR Description: phytochelatin synthetase-like protein
  misc_feature (1)..(207): NCBI GI NO: 10092257 NR Description: unknown protein; 31818-33764
  misc_feature (246)..(394): NCBI GI NO: 10092257 NR Description: unknown protein; 31818-33764
  misc_feature (33)..(392): NCBI GI NO: 25456127 NR Description: probable phytochelatin synthetase
  misc_feature (33)..(373): NCBI GI NO: 6690554 NR Description: phytochelatin synthetase-like protein [Zea mays]
  misc_feature (222)..(222): Xaa is any aa, unknown or other
  misc_feature (243)..(243): Xaa is any aa, unknown or other
  misc_feature (250)..(250): Xaa is any aa, unknown or other
MVTMSNYQMYRHIMAPGWTLGWSWAKKEVIWSIVGAQATEQGDCSKFKGGIPHCCKRTPAVVDLLPGVPYNQQIANCCKAGVVSAYGQDPAGSVSAFQVSVGLAGTTNKTVKLPRNFTLMGPGLGYTCGPAAVVPSTVYWTPDHRRRTQALMTWTVTCTYSQQLASRYPSCCVSFSSFYNSTIVPCARCACGCGGHGGHAGPGGCIEGDSKRALSAGVNTPXKDGQALLQCTPHMCPIRVHWXVKLNYKXYWRAKIAITNYNYRMNYTQWTLVAQHPNLDNVTEVFSFQYKPLQPYGSINDTGMFYGLKFYNDFLMEAGPFGNVQSEVLMRKDARTFTFSMGWAFPRKIYFNGDECKMPPPDSYPYLPNAAPVVASQLVLSAAASAFLLLLLLVA

SEQ ID NO: 27325 - DNA, 1237 bp, Zea mays subsp. mays
  misc_feature (1)..(1237): Ceres Seq. ID no. 12356266
atattcattgttcggcccccaagcgagagcatactccgcattgcgaatttgcaagctaaccatggcaccctcgcatgcccactctcgctccgtgccgctcctcctcctcgtgataggagtttgttgctgctgcagtggagcagtcatcgccccgtcgtcggtcgtctccgacgacgacccgacctgtcctcgggagccgacggcggcggtggcagccgtgtcgtcagctgagtctagctacgtcgagccacgccggtgccagccgccggcgccgcacatcgcggtggccgtgttcccctacgacgtcgacccgatgcagttcgcgctgaacctggagtacaccgaggccgagttcttcctgcacggcgcgtacggcgtggggctcgaccacctcgcgccgaggctggcgctgggcggcccgcctccggtgggcgcccggaaggccaacctcgacgaggtgacgaggcgcatcgtcgcggagtttggcctgcaggaagttggccacatcagggctatccagcgcacggtcggcgggattcctcggccgttgatagacctcagcgcccacaacttcgctagggtgatggacgaggcgttcgggacccgcctggaccctcccttcgatccctacgtcaacagcctcaacttcctgctggcctcgtacgtcatcccctacctcggcatcaacggctacgtcggcaccaaccccatcgtcgacggctaccagacaaagaagcttctggcagggctgctgggggtggaggcggcgcaggacgcggtgttccgggcacgcctcttcgagcgcctcggcgaggccgtgccaccgtacgggaacatcacggtggccgagttcacggaccgcgtgtcggcgctgcgcaaccggctggggcggtgcggggtcaaggacgaggggctcacggtgccccgccggctcggcgccgagggcgccatctgcaccaacgtgctctccgcggacagggactcgctctcctacgcccggacgcccgccgagctgctcagcatcctctacctcaccggcgacgagcgcgtgcccggcgggttctatccggagggtgccaacgggaggatcgccaggtcctttcttggcaagccacatggaaactagccaatgcaagctgccgatttgaactacgtgtccgtgcagaaacccggaacatatatatgcatggttggatgaacttgcaaagtttgctgaataatataacagtggattgat

SEQ ID NO: 27326 - protein, 374 aa, Zea mays subsp. mays
  peptide (1)..(374): Ceres Seq. ID no. 12356267
  misc_feature (101)..(368): NCBI GI NO: 15228845 NR Description: putative protein; protein id: At3g62730
  misc_feature (105)..(368): NCBI GI NO: 18401988 NR Description: dessication-related protein, putative
  misc_feature (105)..(368): NCBI GI NO: 25357137 NR Description: hypothetical protein T2J15.11
  misc_feature (105)..(368): NCBI GI NO: 21593191 NR Description: dessication-related protein, putative
  misc_feature (85)..(226): NCBI GI NO: 12083528 NR Description: similar to Arabidopsis thaliana hypotheticalprotein
  misc_feature (228)..(367): NCBI GI NO: 12083528 NR Description: similar to Arabidopsis thaliana hypotheticalprotein
  misc_feature (101)..(368): NCBI GI NO: 38346151 NR Description: OSJNBb0118P14.11
  misc_feature (64)..(362): NCBI GI NO: 118926 NR Description: Desiccation-related protein PCC13-62 precursor
  misc_feature (99)..(366): NCBI GI NO: 22984403 NR Description: hypothetical protein [Burkholderia fungorum]
  misc_feature (115)..(363): NCBI GI NO: 16263242 NR Description: Conserved hypothetical protein
YSLFGPQARAYSALRICKLTMAPSHAHSRSVPLLLLVIGVCCCCSGAVIAPSSVVSDDDPTCPREPTAAVAAVSSAESSYVEPRRCQPPAPHIAVAVFPYDVDPMQFALNLEYTEAEFFLHGAYGVGLDHLAPRLALGGPPPVGARKANLDEVTRRIVAEFGLQEVGHIRAIQRTVGGIPRPLIDLSAHNFARVMDEAFGTRLDPPFDPYVNSLNFLLASYVIPYLGINGYVGTNPIVDGYQTKKLLAGLLGVEAAQDAVFRARLFERLGEAVPPYGNITVAEFTDRVSALRNRLGRCGVKDEGLTVPRRLGAEGAICTNVLSADRDSLSYARTPAELLSILYLTGDERVPGGFYPEGANGRIARSFLGKPHGN

SEQ ID NO: 27327 - protein, 354 aa, Zea mays subsp. mays
  peptide (1)..(354): Ceres Seq. ID no. 12356268
  misc_feature (81)..(348): NCBI GI NO: 15228845 NR Description: putative protein; protein id: At3g62730
  misc_feature (85)..(348): NCBI GI NO: 18401988 NR Description: dessication-related protein, putative
  misc_feature (85)..(348): NCBI GI NO: 25357137 NR Description: hypothetical protein T2J15.11
  misc_feature (85)..(348): NCBI GI NO: 21593191 NR Description: dessication-related protein, putative
  misc_feature (65)..(206): NCBI GI NO: 12083528 NR Description: similar to Arabidopsis thaliana hypotheticalprotein
  misc_feature (208)..(347): NCBI GI NO: 12083528 NR Description: similar to Arabidopsis thaliana hypotheticalprotein
  misc_feature (81)..(348): NCBI GI NO: 38346151 NR Description: OSJNBb0118P14.11
  misc_feature (44)..(342): NCBI GI NO: 118926 NR Description: Desiccation-related protein PCC13-62 precursor
  misc_feature (79)..(346): NCBI GI NO: 22984403 NR Description: hypothetical protein [Burkholderia fungorum]
  misc_feature (95)..(343): NCBI GI NO: 16263242 NR Description: Conserved hypothetical protein
MAPSHAHSRSVPLLLLVIGVCCCCSGAVIAPSSVVSDDDPTCPREPTAAVAAVSSAESSYVEPRRCQPPAPHIAVAVFPYDVDPMQFALNLEYTEAEFFLHGAYGVGLDHLAPRLALGGPPPVGARKANLDEVTRRIVAEFGLQEVGHIRAIQRTVGGIPRPLIDLSAHNFARVMDEAFGTRLDPPFDPYVNSLNFLLASYVIPYLGINGYVGTNPIVDGYQTKKLLAGLLGVEAAQDAVFRARLFERLGEAVPPYGNITVAEFTDRVSALRNRLGRCGVKDEGLTVPRRLGAEGAICTNVLSADRDSLSYARTPAELLSILYLTGDERVPGGFYPEGANGRIARSFLGKPHGN

SEQ ID NO: 27328 - protein, 270 aa, Zea mays subsp. mays
  peptide (1)..(270): Ceres Seq. ID no. 12356269
  misc_feature (1)..(264): NCBI GI NO: 15228845 NR Description: putative protein; protein id: At3g62730
  misc_feature (1)..(264): NCBI GI NO: 18401988 NR Description: dessication-related protein, putative
  misc_feature (1)..(264): NCBI GI NO: 25357137 NR Description: hypothetical protein T2J15.11
  misc_feature (1)..(264): NCBI GI NO: 21593191 NR Description: dessication-related protein, putative
  misc_feature (1)..(122): NCBI GI NO: 12083528 NR Description: similar to Arabidopsis thaliana hypotheticalprotein
  misc_feature (124)..(263): NCBI GI NO: 12083528 NR Description: similar to Arabidopsis thaliana hypotheticalprotein
  misc_feature (1)..(264): NCBI GI NO: 38346151 NR Description: OSJNBb0118P14.11
  misc_feature (1)..(258): NCBI GI NO: 118926 NR Description: Desiccation-related protein PCC13-62 precursor
  misc_feature (1)..(262): NCBI GI NO: 22984403 NR Description: hypothetical protein [Burkholderia fungorum]
  misc_feature (11)..(259): NCBI GI NO: 16263242 NR Description: Conserved hypothetical protein
MQFALNLEYTEAEFFLHGAYGVGLDHLAPRLALGGPPPVGARKANLDEVTRRIVAEFGLQEVGHIRAIQRTVGGIPRPLIDLSAHNFARVMDEAFGTRLDPPFDPYVNSLNFLLASYVIPYLGINGYVGTNPIVDGYQTKKLLAGLLGVEAAQDAVFRARLFERLGEAVPPYGNITVAEFTDRVSALRNRLGRCGVKDEGLTVPRRLGAEGAICTNVLSADRDSLSYARTPAELLSILYLTGDERVPGGFYPEGANGRIARSFLGKPHGN

SEQ ID NO: 27329 - DNA, 1354 bp, Zea mays subsp. mays
  misc_feature (1)..(1354): Ceres Seq. ID no. 12405084
  misc_feature (234)..(234): n is a, c, t, g, unknown, or other
  misc_feature (282)..(282): n is a, c, t, g, unknown, or other
  misc_feature (314)..(314): n is a, c, t, g, unknown, or other
  misc_feature (295)..(295): n is a, c, t, g, unknown, or other
  misc_feature (288)..(288): n is a, c, t, g, unknown, or other
  misc_feature (336)..(336): n is a, c, t, g, unknown, or other
  misc_feature (297)..(297): n is a, c, t, g, unknown, or other
  misc_feature (246)..(246): n is a, c, t, g, unknown, or other
  misc_feature (272)..(272): n is a, c, t, g, unknown, or other
  misc_feature (261)..(261): n is a, c, t, g, unknown, or other
  misc_feature (1046)..(1046): n is a, c, t, g, unknown, or other
  misc_feature (278)..(278): n is a, c, t, g, unknown, or other
  misc_feature (260)..(260): n is a, c, t, g, unknown, or other
  misc_feature (285)..(285): n is a, c, t, g, unknown, or other
atcgaaaagctcgttcagtcgtcctcttcctccaaacctttccgctgccggtgaacttcctccacctgaagcccctaccacgataagccctaatcccagcgccacctcgatggcgaccacctctttctttcatccgctcgccgccccgatggaccgcggtaggtgtgtgttttcgtcgctgcccgttcagcctaaccatccccgcccgtacagcgccccggcgaccggcgccgnttctcgtcgtcngcgctaagcgcgcnnggcagccagcnccctgntgcngcngcntcgcgtnanccgcgaatcccagcgcnggtcccgaagccgggacgtggnaagaagaggaggaggaggtcgagggaggagatgccctggatccaggacaaggcgctggacctcgtggagttcactggcaccgtcacacaggccatcccagggccccgtgttggctctagccctgttccatggcttctcgcggttcccctcgcctacgtcggggtctcctttgtgctcgcggtcgtccgcaccgtgcgcaagttcacctcgccgcacactaagaagaagcgaagggtgagtaagaatatattcttgttgaagtcactagatgatctgtttcagaagggcagggaggcaataaattatcctgctcttcaggacctaatgcaaaagacaggatttgacatggatgatgtagtaaggaagtacatccgttacacactgaatgaaaaacagttcagtcctgatgtggttgtggatctcatacatcttaggaaggcatcaatgctggaagatgcagaagttgctgaaattttaaatgagatttcaagacgaattgtccgggaaaaagggccagtagttatggacttattctggttttacagagcaaggttttaagcggaagcttgctgtacaagcactgtttggaaaaatcctatacttatcagaacttccggagttctgttcacgggacagctcacttgtagtcaaagaaatctttggagttacagatgaggatgcagacagcctgcggattcacaccctatcancaacaggtgatatcgaatctatacagaagatggtggacgatctagacctagaacaaggtcccccatcatcgtcttgagttatggtggtggaataatgctaaacatcttcgttgatagtgttgcaattttagattgatgtgagtttctcgaatcttttcgtttagttttttcagctgctgaagtaggacttgggcctgtgaacacaggatactttcggctggagcctggaggttttgtaaattgcctctcgattaggataacgtatgtcagacctgcccatgatttgagtaaacgagaatactattatt

SEQ ID NO: 27330 - protein, 175 aa, Zea mays subsp. mays
  peptide (1)..(175): Ceres Seq. ID no. 12405085
  misc_feature (1)..(175): NCBI GI NO: 38344450 NR Description: OSJNBa0038O10.22
  misc_feature (1)..(175): NCBI GI NO: 18415850 NR Description: putative protein; protein id: At5g08540
  misc_feature (1)..(175): NCBI GI NO: 21592521 NR Description: unknown [Arabidopsis thaliana]
  misc_feature (1)..(175): NCBI GI NO: 9759348 NR Description: gene_id:MAH20
MPWIQDKALDLVEFTGTVTQAIPGPRVGSSPVPWLLAVPLAYVGVSFVLAVVRTVRKFTSPHTKKKRRVSKNIFLLKSLDDLFQKGREAINYPALQDLMQKTGFDMDDVVRKYIRYTLNEKQFSPDVVVDLIHLRKASMLEDAEVAEILNEISRRIVREKGPVVMDLFWFYRARF

SEQ ID NO: 27331 - DNA, 1766 bp, Zea mays subsp. mays
  misc_feature (1)..(1766): Ceres Seq. ID no. 12408037
caggctccctcctcctccctgcaaatcctgcagacaccaccgctcgtttttctctccgggacaggagaaaaggggagagagaggtgaggcgcggtgtccgcccgatctgctctgccccgacgcagctgttacgacctcctcagtctcaggagcaagatgggtgccggcggcaggatgaccgagaaggagcgggagaagcaggagcagctcgcccgagctaccggtggcgccgcgatgcagcggtcgccggtggagaagcctccgttcactctgggtcagatcaagaaggccatcccgccacactgcttcgagcgctcggtgcctcaagtccttctcgtacgtggtccacgacctggtgatcgccgcggcgctcctctacttcgcgctggccatcataccggcgctcccaagcccgctcggctacgcggcctggccgctgtactggatcgcgcaggggtgcgtgtgcaccggcgtgtgggtcatcgcgcacgagtgcggccaccacgccttctcggactactcgctcctggacgacgtggtcggcctggtgctgcactcgtcgctcatggtgccctacttctcgtggaagtacagccaccggcgccaccactccaacactgggtccctggagcgcgacgaggtgttcgtgcccaagaagaaggaggcgctgccgtggtacaccccgtacgtgtacaacaacccggtcggccggctggtgcacatcgtggtgcagctcaccctcgggtggcccgctgtacctggcgaccaacgcgtcggggcggcccgtacccgcgcttcgcctgccacttcgacccctacggccccatctacaacgaccgggagcgcgcccagatcttcgtctcggacgccggcgtcgtggccgtggcgttcgggctgtacaagctggcggcggcgttcggggtctggtgggtggtgcgcgtgtacgccgtgccgctgctgatcgtgaacgcgtggctggtgctcatcacctacctgcagcacacccacccgtcgctcccccactacgactcgagcgagtgggactggctgcgcggcgcgctggccaccatggaccgcgactacggcatcctcaaccgcgtgttccacaacatcacggacacgcacgtcgcgcaccacctcttctccaccatgccgcactaccacgccatggaggccaccaaggcgatcaggcccatcctcggcgactactaccacttcgacccgacccctgtggccaaggcgacctggcgcgaggccggggaatgcatctacgtcgagcccgaggaccgcaagggcgtcttctctacaacaagaagttctagccgccgccgctcgcagagctgagaggacgctaccataggaatgggagcaggaaccaggaggaggagacggtactcgccccaaagtctccgtctacctatctaatcgttagtcgtcagtcttttagacgggaagagagagcatttggacacagagacgaaggcttactgcagtgccatcgctagagctgccatcaagtacaagtaggcaaattcgtcaacttagtgtgtcccatgttgtttttcttagtcgtccgctgctgtaggctttccggcggcggtcgtttgtgtggttggcatccgtggccatgcctgtgcgtgcgtggccgcgcttgtcgtgtgcgtctgtcgtcgcgttggcgtcgtctcttcgtgctccccgtgtgttgttgtaaaacaagaagatgttttctggtgtctttggcggaataacagatcgtccgaacg

SEQ ID NO: 27332 - protein, 395 aa, Zea mays subsp. mays
  peptide (1)..(395): Ceres Seq. ID no. 12408038
  misc_feature (208)..(348): Pfam Name: Pfam Description:  Fatty acid desaturase
  misc_feature (208)..(382): NCBI GI NO: 28371827 NR Description: delta-12 oleate desaturase [Punica granatum]
  misc_feature (1)..(55): NCBI GI NO: 28371827 NR Description: delta-12 oleate desaturase [Punica granatum]
  misc_feature (208)..(382): NCBI GI NO: 34903462 NR Description: putative omega-6 fatty acid desaturase
  misc_feature (1)..(55): NCBI GI NO: 34903462 NR Description: putative omega-6 fatty acid desaturase
  misc_feature (208)..(382): NCBI GI NO: 28564441 NR Description: delta 12-acyl-lipid-desaturase [Punica granatum]
  misc_feature (1)..(55): NCBI GI NO: 28564441 NR Description: delta 12-acyl-lipid-desaturase [Punica granatum]
  misc_feature (208)..(382): NCBI GI NO: 8886726 NR Description: omega-6 fatty acid desaturase [Sesamum indicum]
  misc_feature (1)..(55): NCBI GI NO: 8886726 NR Description: omega-6 fatty acid desaturase [Sesamum indicum]
  misc_feature (208)..(382): NCBI GI NO: 27261181 NR Description: delta 12 oleic acid desaturase FAD2
  misc_feature (1)..(55): NCBI GI NO: 27261181 NR Description: delta 12 oleic acid desaturase FAD2
MGAGGRMTEKEREKQEQLARATGGAAMQRSPVEKPPFTLGQIKKAIPPHCFERSVPQVLLVRGPRPGDRRGAPLLRAGHHTGAPKPARLRGLAAVLDRAGVRVHRRVGHRARVRPPRLLGLLAPGRRGRPGAALVAHGALLLVEVQPPAPPLQHWVPGARRGVRAQEEGGAAVVHPVRVQQPGRPAGAHRGAAHPRVARCTWRPTRRGGPYPRFACHFDPYGPIYNDRERAQIFVSDAGVVAVAFGLYKLAAAFGVWWVVRVYAVPLLIVNAWLVLITYLQHTHPSLPHYDSSEWDWLRGALATMDRDYGILNRVFHNITDTHVAHHLFSTMPHYHAMEATKAIRPILGDYYHFDPTPVAKATWREAGECIYVEPEDRKGVFSTTRSSSRRRSQS

SEQ ID NO: 27333 - protein, 389 aa, Zea mays subsp. mays
  peptide (1)..(389): Ceres Seq. ID no. 12408039
  misc_feature (202)..(342): Pfam Name: Pfam Description:  Fatty acid desaturase
  misc_feature (202)..(376): NCBI GI NO: 28371827 NR Description: delta-12 oleate desaturase [Punica granatum]
  misc_feature (1)..(49): NCBI GI NO: 28371827 NR Description: delta-12 oleate desaturase [Punica granatum]
  misc_feature (202)..(376): NCBI GI NO: 34903462 NR Description: putative omega-6 fatty acid desaturase
  misc_feature (1)..(49): NCBI GI NO: 34903462 NR Description: putative omega-6 fatty acid desaturase
  misc_feature (202)..(376): NCBI GI NO: 28564441 NR Description: delta 12-acyl-lipid-desaturase [Punica granatum]
  misc_feature (1)..(49): NCBI GI NO: 28564441 NR Description: delta 12-acyl-lipid-desaturase [Punica granatum]
  misc_feature (202)..(376): NCBI GI NO: 8886726 NR Description: omega-6 fatty acid desaturase [Sesamum indicum]
  misc_feature (1)..(49): NCBI GI NO: 8886726 NR Description: omega-6 fatty acid desaturase [Sesamum indicum]
  misc_feature (202)..(376): NCBI GI NO: 27261181 NR Description: delta 12 oleic acid desaturase FAD2
  misc_feature (1)..(49): NCBI GI NO: 27261181 NR Description: delta 12 oleic acid desaturase FAD2
MTEKEREKQEQLARATGGAAMQRSPVEKPPFTLGQIKKAIPPHCFERSVPQVLLVRGPRPGDRRGAPLLRAGHHTGAPKPARLRGLAAVLDRAGVRVHRRVGHRARVRPPRLLGLLAPGRRGRPGAALVAHGALLLVEVQPPAPPLQHWVPGARRGVRAQEEGGAAVVHPVRVQQPGRPAGAHRGAAHPRVARCTWRPTRRGGPYPRFACHFDPYGPIYNDRERAQIFVSDAGVVAVAFGLYKLAAAFGVWWVVRVYAVPLLIVNAWLVLITYLQHTHPSLPHYDSSEWDWLRGALATMDRDYGILNRVFHNITDTHVAHHLFSTMPHYHAMEATKAIRPILGDYYHFDPTPVAKATWREAGECIYVEPEDRKGVFSTTRSSSRRRSQS

SEQ ID NO: 27334 - protein, 369 aa, Zea mays subsp. mays
  peptide (1)..(369): Ceres Seq. ID no. 12408040
  misc_feature (182)..(322): Pfam Name: Pfam Description:  Fatty acid desaturase
  misc_feature (182)..(356): NCBI GI NO: 28371827 NR Description: delta-12 oleate desaturase [Punica granatum]
  misc_feature (1)..(29): NCBI GI NO: 28371827 NR Description: delta-12 oleate desaturase [Punica granatum]
  misc_feature (182)..(356): NCBI GI NO: 34903462 NR Description: putative omega-6 fatty acid desaturase
  misc_feature (1)..(29): NCBI GI NO: 34903462 NR Description: putative omega-6 fatty acid desaturase
  misc_feature (182)..(356): NCBI GI NO: 28564441 NR Description: delta 12-acyl-lipid-desaturase [Punica granatum]
  misc_feature (1)..(29): NCBI GI NO: 28564441 NR Description: delta 12-acyl-lipid-desaturase [Punica granatum]
  misc_feature (182)..(356): NCBI GI NO: 8886726 NR Description: omega-6 fatty acid desaturase [Sesamum indicum]
  misc_feature (1)..(29): NCBI GI NO: 8886726 NR Description: omega-6 fatty acid desaturase [Sesamum indicum]
  misc_feature (182)..(356): NCBI GI NO: 27261181 NR Description: delta 12 oleic acid desaturase FAD2
  misc_feature (1)..(29): NCBI GI NO: 27261181 NR Description: delta 12 oleic acid desaturase FAD2
MQRSPVEKPPFTLGQIKKAIPPHCFERSVPQVLLVRGPRPGDRRGAPLLRAGHHTGAPKPARLRGLAAVLDRAGVRVHRRVGHRARVRPPRLLGLLAPGRRGRPGAALVAHGALLLVEVQPPAPPLQHWVPGARRGVRAQEEGGAAVVHPVRVQQPGRPAGAHRGAAHPRVARCTWRPTRRGGPYPRFACHFDPYGPIYNDRERAQIFVSDAGVVAVAFGLYKLAAAFGVWWVVRVYAVPLLIVNAWLVLITYLQHTHPSLPHYDSSEWDWLRGALATMDRDYGILNRVFHNITDTHVAHHLFSTMPHYHAMEATKAIRPILGDYYHFDPTPVAKATWREAGECIYVEPEDRKGVFSTTRSSSRRRSQS

SEQ ID NO: 27335 - DNA, 1434 bp, Zea mays subsp. mays
  misc_feature (1)..(1434): Ceres Seq. ID no. 12362303
accgatcacacaatcccgacttcccgaggccgcccggcccgagagcaccgagcacgcttctcccaaactgcactgctccgtccacggcacggcgaggcggggacgccaaagcaaaaaggcaataaagccagcggccagggccaggaccaggagccggcgtcggtggaggctgaggcagaggcgccgaagcggcggcggcatgggggtgctgcggagcacgcagagcctggaggccgaggtagaggagatgcgcggcgcgctgctgctccatggcgcgtgggcgtggaggcccggcgggggcgccgccaagcgcgcggcccgcgccgtggagcccgccgccgcggaggcgcgcaccgtgtgcgtcacggggggcacgtccttcctcggcttcgccgtcgtcgaccgcctgctccgccacggctacaccgtccgcctcgccctcgagacgcaagaggaccttgacaagctgcgggagatggagatgtttggggagaatggcagggatggggtctggactgtgatcgcaaatgtgatggacccggagagtttgcatgaggctttcgacggctgtgttggtgtctttcacacttcgtcgcatgtggatccagcgggcatctccggttacacgaaacacatggcaggcttggaggccaaagcagcagagctggtggtggaagcatgtgtgaggacagaatccgtgaggaagtgcgtcctgacgtcgtcactgttggcatgcgtctggaggcagaactaccctcatgaccgccgccggttcccaactaccatcgatgagaactgttggagcgacgagagcttgtgccgcgacaacaagctgtggctgtcactcggcaagacgatggcggaaaaggcggcgtggagggccgcacggggaacagacctgaagctagtgaccatatgcccagcactggtaactgggccggggttccggaggcggaaccctactccatccattgcatacctcaaaggagcgcacgccatgctcgtccaaggtctgctggcgactgcgaacgtggagagggtggcggaggcgcacgtccgcgtgtacgaggagctgagcggcacggccgggggccggtacatctgctacgaccacgtggtgcgacgaggcgaggagttcgcggagctgcagcggcagctggggctcagggtccccgcgacgcccgacggctatggtggcgacgacgacgacggccgggcgccgcggttccagctctgtaaccggaagctggcggcgctcatgtccgcgcggaggcggtgcacctacgacgcctacttccccatgccgcaggagtgagaccggaagaggagagagagctgctgatgctggacaacgactggagcgtgcgtgacaagtgacctcgtgtacatagcaatagtggtgatcggctcgcatcaatataataaatcggcccc

SEQ ID NO: 27336 - protein, 437 aa, Zea mays subsp. mays
  peptide (1)..(437): Ceres Seq. ID no. 12362304
  misc_feature (67)..(432): NCBI GI NO: 34911590 NR Description: putative cinnamoyl CoA reductase
  misc_feature (67)..(428): NCBI GI NO: 15241467 NR Description: cinnamoyl CoA reductase - like protein
  misc_feature (67)..(428): NCBI GI NO: 21553833 NR Description: cinnamoyl CoA reductase-like protein
  misc_feature (120)..(426): NCBI GI NO: 25412171 NR Description: probable cinnamoyl CoA reductase
  misc_feature (120)..(426): NCBI GI NO: 15234751 NR Description: cinnamoyl-CoA reductase - like protein
  misc_feature (120)..(426): NCBI GI NO: 18400407 NR Description: putative cinnamoyl CoA reductase
  misc_feature (120)..(426): NCBI GI NO: 21553548 NR Description: cinnamoyl-CoA reductase-like protein
  misc_feature (120)..(426): NCBI GI NO: 21553382 NR Description: putative cinnamoyl CoA reductase
  misc_feature (115)..(437): NCBI GI NO: 17978649 NR Description: cinnamoyl-CoA reductase [Pinus taeda]
  misc_feature (107)..(420): NCBI GI NO: 37537132 NR Description: putative cinnamoyl-CoA reductase
PITQSRLPEAARPESTEHASPKLHCSVHGTARRGRQSKKAIKPAARARTRSRRRWRLRQRRRSGGGMGVLRSTQSLEAEVEEMRGALLLHGAWAWRPGGGAAKRAARAVEPAAAEARTVCVTGGTSFLGFAVVDRLLRHGYTVRLALETQEDLDKLREMEMFGENGRDGVWTVIANVMDPESLHEAFDGCVGVFHTSSHVDPAGISGYTKHMAGLEAKAAELVVEACVRTESVRKCVLTSSLLACVWRQNYPHDRRRFPTTIDENCWSDESLCRDNKLWLSLGKTMAEKAAWRAARGTDLKLVTICPALVTGPGFRRRNPTPSIAYLKGAHAMLVQGLLATANVERVAEAHVRVYEELSGTAGGRYICYDHVVRRGEEFAELQRQLGLRVPATPDGYGGDDDDGRAPRFQLCNRKLAALMSARRRCTYDAYFPMPQE

SEQ ID NO: 27337 - protein, 371 aa, Zea mays subsp. mays
  peptide (1)..(371): Ceres Seq. ID no. 12362305
  misc_feature (1)..(366): NCBI GI NO: 34911590 NR Description: putative cinnamoyl CoA reductase
  misc_feature (1)..(362): NCBI GI NO: 15241467 NR Description: cinnamoyl CoA reductase - like protein
  misc_feature (1)..(362): NCBI GI NO: 21553833 NR Description: cinnamoyl CoA reductase-like protein
  misc_feature (54)..(360): NCBI GI NO: 25412171 NR Description: probable cinnamoyl CoA reductase
  misc_feature (54)..(360): NCBI GI NO: 15234751 NR Description: cinnamoyl-CoA reductase - like protein
  misc_feature (54)..(360): NCBI GI NO: 18400407 NR Description: putative cinnamoyl CoA reductase
  misc_feature (54)..(360): NCBI GI NO: 21553548 NR Description: cinnamoyl-CoA reductase-like protein
  misc_feature (54)..(360): NCBI GI NO: 21553382 NR Description: putative cinnamoyl CoA reductase
  misc_feature (49)..(371): NCBI GI NO: 17978649 NR Description: cinnamoyl-CoA reductase [Pinus taeda]
  misc_feature (41)..(354): NCBI GI NO: 37537132 NR Description: putative cinnamoyl-CoA reductase
MGVLRSTQSLEAEVEEMRGALLLHGAWAWRPGGGAAKRAARAVEPAAAEARTVCVTGGTSFLGFAVVDRLLRHGYTVRLALETQEDLDKLREMEMFGENGRDGVWTVIANVMDPESLHEAFDGCVGVFHTSSHVDPAGISGYTKHMAGLEAKAAELVVEACVRTESVRKCVLTSSLLACVWRQNYPHDRRRFPTTIDENCWSDESLCRDNKLWLSLGKTMAEKAAWRAARGTDLKLVTICPALVTGPGFRRRNPTPSIAYLKGAHAMLVQGLLATANVERVAEAHVRVYEELSGTAGGRYICYDHVVRRGEEFAELQRQLGLRVPATPDGYGGDDDDGRAPRFQLCNRKLAALMSARRRCTYDAYFPMPQE

SEQ ID NO: 27338 - protein, 355 aa, Zea mays subsp. mays
  peptide (1)..(355): Ceres Seq. ID no. 12362306
  misc_feature (1)..(350): NCBI GI NO: 34911590 NR Description: putative cinnamoyl CoA reductase
  misc_feature (1)..(346): NCBI GI NO: 15241467 NR Description: cinnamoyl CoA reductase - like protein
  misc_feature (1)..(346): NCBI GI NO: 21553833 NR Description: cinnamoyl CoA reductase-like protein
  misc_feature (38)..(344): NCBI GI NO: 25412171 NR Description: probable cinnamoyl CoA reductase
  misc_feature (38)..(344): NCBI GI NO: 15234751 NR Description: cinnamoyl-CoA reductase - like protein
  misc_feature (38)..(344): NCBI GI NO: 18400407 NR Description: putative cinnamoyl CoA reductase
  misc_feature (38)..(344): NCBI GI NO: 21553548 NR Description: cinnamoyl-CoA reductase-like protein
  misc_feature (38)..(344): NCBI GI NO: 21553382 NR Description: putative cinnamoyl CoA reductase
  misc_feature (33)..(355): NCBI GI NO: 17978649 NR Description: cinnamoyl-CoA reductase [Pinus taeda]
  misc_feature (25)..(338): NCBI GI NO: 37537132 NR Description: putative cinnamoyl-CoA reductase
MRGALLLHGAWAWRPGGGAAKRAARAVEPAAAEARTVCVTGGTSFLGFAVVDRLLRHGYTVRLALETQEDLDKLREMEMFGENGRDGVWTVIANVMDPESLHEAFDGCVGVFHTSSHVDPAGISGYTKHMAGLEAKAAELVVEACVRTESVRKCVLTSSLLACVWRQNYPHDRRRFPTTIDENCWSDESLCRDNKLWLSLGKTMAEKAAWRAARGTDLKLVTICPALVTGPGFRRRNPTPSIAYLKGAHAMLVQGLLATANVERVAEAHVRVYEELSGTAGGRYICYDHVVRRGEEFAELQRQLGLRVPATPDGYGGDDDDGRAPRFQLCNRKLAALMSARRRCTYDAYFPMPQE

SEQ ID NO: 27339 - DNA, 1334 bp, Zea mays subsp. mays
  misc_feature (1)..(1334): Ceres Seq. ID no. 12365472
gccagtcttctcgccttcacgccgcccgctgtcctgcaaggccgctcccgcgtcgccggagcccgccgtcgccgtctccgcctcttccgcggcgcccgcgcccgccgccgccggttcgccgctccgccccttcgcgctccgcgcgctgctccgggaggaggtatttccgtctccatcgccccagctggcctctgccgcagcggtggcctcggtaccaagcggggccgtgctgaagcggcggcgacctgcgccgctccttgtgccggcgtccggcgcggctgctgctgctccggtggccgccgtggaggcagatccgaggaacgaggtggaggaggagggggaggagttcgcagcgtattgccggagggggaaggggagaagggtggaaatggaggaccggcatgtggccaaggtcgctctcggcggagatccccaagtggcgctctttggtgtattcgatggtcacgggggcaaaaatgcggcagagttcgctgcggagaacatgcccaagtttttggccgaggagttcaagaaggtgaacggcggaggagagatcgaaggagttgtcaagaggggttacctcaagacggacgaggagttcctcaagagggacgagagcgggggcgcgtgctgcgtcacagccgttctccaaaagggtggactggtcgtctccaatgctggagactgccgtgcggtgctcagccgagcagggaaggcagaggtgctcacctctgaccaccggggcctcccgggaggatgagaaggagagaattgaaaaattgggtggatttgtggtgaattaccatgggacatggcgagtccagggttccctggcagtgtctaggggcattggggatggacaactaaagcagtgggttgtggctaacccagacactaggacgctcctcgtcgaccaccagtgcgagttcttgatacttgcttctgatggcctatgggataaggtcgataatcaggaggcagtagaccttgcacgtcctctatgcattagcaatgacaagacctctcgcctggctgcctgcaggatgctcactgagacgtcgatttccaggggctcaactgatgatatcagtgttatgatcgtgcaattgcagaagttttcaagttcctaacttaattggagaaacttgaccaaaactctaggcattagcaccaacagactggcggaaggcaggactttgctggctaaagttttcatgagtcagcgctatttttggctgtttaacgttcattcattcattctttgtcatagaaccatttttattattattagatgtaattagatctatttgattcattctttgacaatatttatc

SEQ ID NO: 27340 - protein, 252 aa, Zea mays subsp. mays
  peptide (1)..(252): Ceres Seq. ID no. 12365473
  misc_feature (114)..(247): Pfam Name: Pfam Description:  Protein phosphatase 2C
  misc_feature (107)..(247): NCBI GI NO: 6478146 NR Description: putative serine/threonine phosphatase type 2c
  misc_feature (126)..(247): NCBI GI NO: 23506609 NR Description: putative serine/threonine phosphatase
  misc_feature (1)..(247): NCBI GI NO: 15227687 NR Description: protein phosphatase 2C
  misc_feature (126)..(247): NCBI GI NO: 23506607 NR Description: putative serine/threonine phosphatase
  misc_feature (1)..(247): NCBI GI NO: 7488754 NR Description: protein phosphatase 2C - alfalfa
  misc_feature (1)..(247): NCBI GI NO: 15222312 NR Description: protein phosphatase 2C
  misc_feature (1)..(247): NCBI GI NO: 25352225 NR Description: hypothetical protein
  misc_feature (1)..(247): NCBI GI NO: 30013681 NR Description: Avr9/Cf-9 rapidly elicited protein 284
  misc_feature (23)..(251): NCBI GI NO: 15220548 NR Description: protein phosphatase 2C
  misc_feature (130)..(194): NCBI GI NO: 15236450 NR Description: protein phosphatase 2C
PVFSPSRRPLSCKAAPASPEPAVAVSASSAAPAPAAAGSPLRPFALRALLREEVFPSPSPQLASAAAVASVPSGAVLKRRRPAPLLVPASGAAAAAPVAAVEADPRNEVEEEGEEFAAYCRRGKGRRVEMEDRHVAKVALGGDPQVALFGVFDGHGGKNAAEFAAENMPKFLAEEFKKVNGGGEIEGVVKRGYLKTDEEFLKRDESGGACCVTAVLQKGGLVVSNAGDCRAVLSRAGKAEVLTSDHRGLPGG

SEQ ID NO: 27341 - protein, 244 aa, Zea mays subsp. mays
  peptide (1)..(244): Ceres Seq. ID no. 12365474
ASLLAFTPPAVLQGRSRVAGARRRRLRLFRGARARRRRFAAPPLRAPRAAPGGGISVSIAPAGLCRSGGLGTKRGRAEAAATCAAPCAGVRRGCCCSGGRRGGRSEERGGGGGGGVRSVLPEGEGEKGGNGGPACGQGRSRRRSPSGALWCIRWSRGQKCGRVRCGEHAQVFGRGVQEGERRRRDRRSCQEGLPQDGRGVPQEGRERGRVLRHSRSPKGWTGRLQCWRLPCGAQPSREGRGAHL

SEQ ID NO: 27342 - protein, 151 aa, Zea mays subsp. mays
  peptide (1)..(151): Ceres Seq. ID no. 12365475
  misc_feature (8)..(138): Pfam Name: Pfam Description:  Protein phosphatase 2C
  misc_feature (8)..(151): NCBI GI NO: 6478146 NR Description: putative serine/threonine phosphatase type 2c
  misc_feature (8)..(118): NCBI GI NO: 23506609 NR Description: putative serine/threonine phosphatase
  misc_feature (25)..(148): NCBI GI NO: 15227687 NR Description: protein phosphatase 2C
  misc_feature (24)..(118): NCBI GI NO: 23506607 NR Description: putative serine/threonine phosphatase
  misc_feature (25)..(148): NCBI GI NO: 7488754 NR Description: protein phosphatase 2C - alfalfa
  misc_feature (25)..(145): NCBI GI NO: 15222312 NR Description: protein phosphatase 2C
  misc_feature (37)..(145): NCBI GI NO: 25352225 NR Description: hypothetical protein
  misc_feature (25)..(148): NCBI GI NO: 30013681 NR Description: Avr9/Cf-9 rapidly elicited protein 284
  misc_feature (26)..(103): NCBI GI NO: 15220548 NR Description: protein phosphatase 2C
  misc_feature (47)..(148): NCBI GI NO: 15236450 NR Description: protein phosphatase 2C
MLETAVRCSAEQGRQRCSPLTTGASREDEKERIEKLGGFVVNYHGTWRVQGSLAVSRGIGDGQLKQWVVANPDTRTLLVDHQCEFLILASDGLWDKVDNQEAVDLARPLCISNDKTSRLAACRMLTETSISRGSTDDISVMIVQLQKFSSS

SEQ ID NO: 27343 - DNA, 1800 bp, Zea mays subsp. mays
  misc_feature (1)..(1800): Ceres Seq. ID no. 12409414
acaagcgcaagcagggcaagaaaactccgcaggccagtctgcgcgagttggatggccttcttcttggccctcgtgtgcatcctcgtcttgctagccatcgcctcctacgtccagtacactcgctggcagaaggggaaaggccgcttcggcggccatgggaggtctgctcccttgaagctgcctcctggctccatgggctggccttaccttggcgagaccctccagctttactcccaggaccccagcgtcttcttcgcttccaaacagaagaggtacggcgagatcttcaagacgcaccttctgggctgcccgtgcgtgatgctggcgagcccggaggcggcgcggttcgtgctggtgacgcaggcgcacctgttcaagccgacctacccgcggagcaaggagcgcatgatcgggccgtcggctctcttcttccaccagggcgactaccacctccgcctccgcaagctcgtccagggcgcgctcggccccgacgcgctgcgcgcgctcgttcctgaggtggaggccgccgtgcggtccactctcgcttcctgggacgccggccacgtcagaagcacgttccacgccatgaagacgctgtcgtttgacgtgggcatcgtgacgatcttcggcggccggctggacgagtggcgcaaggcggagctgaggaagaattactccgtcgtggagaaggggtacaactccttccccaacagcctgccggggacgctccattacaaggcgatgcaggcgcggcggcggctgcacggcgtgctgtgcgacatcatgcgggagcgtcgtggccaggcccaggcgggcaccaccggcctgctgggctgcctgatgcggtcccggggcgacgacggcgcgccgctgctgagcgacgagcagatcgccgacaacgtcatcggcgtgctgttcgcggcgcaggacacgacggccagcgcgctcacctggatcgtcaagtacctccacgaccaccccaagctcctcgaggccgtccgggcggagcaggcggcggtccgcgaggccaccggcggcgggaggcagccgctggcgtgggcgcacacgaagagcatggcgctaacgcatagggtgattttggagagcttaaggatggcgagcatcatctcgttcacgttcagggaggccgtggccgacgtggagtacaaagggttccttatccccaaggggtgggaaggtgatgcctctcttcaggaacatccaccacagccctgactacttccaggatccacacaagttcgacccttctagattccaggtggcgccgcgtccgagcacgttcctgccgtttgggcacggcgtgcacgcgtgccccgggaacgagctgggccaagctcgagatgctcgtcctcatccaccacctggtcaccggctacaggtggcaaatcgttggatccagtgacgaggtcgagtacagcccgttccctgtgcccaagcacggcttgcctgtcagattatggagacaaaacaatccggtcgtcgacagaaaggggcgtgagaccgacgacgatgatgtggaggatattttagtttgactcttgagttaggcatgaatttaaccccaagctagctagagaagttttttttccctttgaaattcttctttgctcgccttcctcctggatcaaattacgttggaggacaagaaacggcagctttctctttcgttttctttgcctgcttcaccgcgacgataatggtgaaaatatgtaagctacgtggacatcaatgatccacagcatcgttgatatatataatatagagagaaaattctctgct

SEQ ID NO: 27344 - protein, 411 aa, Zea mays subsp. mays
  peptide (1)..(411): Ceres Seq. ID no. 12409415
  misc_feature (61)..(399): Pfam Name: Pfam Description:  Cytochrome P450
  misc_feature (59)..(399): NCBI GI NO: 9294629 NR Description: cytochrome P450 [Arabidopsis thaliana]
  misc_feature (59)..(399): NCBI GI NO: 18402179 NR Description: cytochrome P450, putative; protein id: At3g19270
  misc_feature (28)..(399): NCBI GI NO: 30694740 NR Description: cytochrome P450 family [Arabidopsis thaliana]
  misc_feature (28)..(399): NCBI GI NO: 30694744 NR Description: cytochrome P450 family [Arabidopsis thaliana]
  misc_feature (28)..(399): NCBI GI NO: 7430728 NR Description: cytochrome P450 - Arabidopsis thaliana
  misc_feature (28)..(399): NCBI GI NO: 18415271 NR Description: cytochrome p450 family; protein id: At4g19230
  misc_feature (52)..(399): NCBI GI NO: 15227033 NR Description: taxane 13-alpha-hydroxylase
  misc_feature (60)..(399): NCBI GI NO: 15239203 NR Description: cytochrome p450, putative; protein id: At5g05690
  misc_feature (22)..(399): NCBI GI NO: 33146520 NR Description: putative 5-alpha-taxadienol-10-beta-hydroxylase
  misc_feature (22)..(399): NCBI GI NO: 34901962 NR Description: 5-alpha-taxadienol-10-beta-hydroxylase-like
TSASRARKLRRPVCASWMAFFLALVCILVLLAIASYVQYTRWQKGKGRFGGHGRSAPLKLPPGSMGWPYLGETLQLYSQDPSVFFASKQKRYGEIFKTHLLGCPCVMLASPEAARFVLVTQAHLFKPTYPRSKERMIGPSALFFHQGDYHLRLRKLVQGALGPDALRALVPEVEAAVRSTLASWDAGHVRSTFHAMKTLSFDVGIVTIFGGRLDEWRKAELRKNYSVVEKGYNSFPNSLPGTLHYKAMQARRRLHGVLCDIMRERRGQAQAGTTGLLGCLMRSRGDDGAPLLSDEQIADNVIGVLFAAQDTTASALTWIVKYLHDHPKLLEAVRAEQAAVREATGGGRQPLAWAHTKSMALTHRVILESLRMASIISFTFREAVADVEYKGFLIPKGWEGDASLQEHPPQP

SEQ ID NO: 27345 - protein, 394 aa, Zea mays subsp. mays
  peptide (1)..(394): Ceres Seq. ID no. 12409416
  misc_feature (44)..(382): Pfam Name: Pfam Description:  Cytochrome P450
  misc_feature (42)..(382): NCBI GI NO: 9294629 NR Description: cytochrome P450 [Arabidopsis thaliana]
  misc_feature (42)..(382): NCBI GI NO: 18402179 NR Description: cytochrome P450, putative; protein id: At3g19270
  misc_feature (11)..(382): NCBI GI NO: 30694740 NR Description: cytochrome P450 family [Arabidopsis thaliana]
  misc_feature (11)..(382): NCBI GI NO: 30694744 NR Description: cytochrome P450 family [Arabidopsis thaliana]
  misc_feature (11)..(382): NCBI GI NO: 7430728 NR Description: cytochrome P450 - Arabidopsis thaliana
  misc_feature (11)..(382): NCBI GI NO: 18415271 NR Description: cytochrome p450 family; protein id: At4g19230
  misc_feature (35)..(382): NCBI GI NO: 15227033 NR Description: taxane 13-alpha-hydroxylase
  misc_feature (43)..(382): NCBI GI NO: 15239203 NR Description: cytochrome p450, putative; protein id: At5g05690
  misc_feature (5)..(382): NCBI GI NO: 33146520 NR Description: putative 5-alpha-taxadienol-10-beta-hydroxylase
  misc_feature (5)..(382): NCBI GI NO: 34901962 NR Description: 5-alpha-taxadienol-10-beta-hydroxylase-like
MAFFLALVCILVLLAIASYVQYTRWQKGKGRFGGHGRSAPLKLPPGSMGWPYLGETLQLYSQDPSVFFASKQKRYGEIFKTHLLGCPCVMLASPEAARFVLVTQAHLFKPTYPRSKERMIGPSALFFHQGDYHLRLRKLVQGALGPDALRALVPEVEAAVRSTLASWDAGHVRSTFHAMKTLSFDVGIVTIFGGRLDEWRKAELRKNYSVVEKGYNSFPNSLPGTLHYKAMQARRRLHGVLCDIMRERRGQAQAGTTGLLGCLMRSRGDDGAPLLSDEQIADNVIGVLFAAQDTTASALTWIVKYLHDHPKLLEAVRAEQAAVREATGGGRQPLAWAHTKSMALTHRVILESLRMASIISFTFREAVADVEYKGFLIPKGWEGDASLQEHPPQP

SEQ ID NO: 27346 - protein, 347 aa, Zea mays subsp. mays
  peptide (1)..(347): Ceres Seq. ID no. 12409417
  misc_feature (1)..(335): Pfam Name: Pfam Description:  Cytochrome P450
  misc_feature (1)..(335): NCBI GI NO: 9294629 NR Description: cytochrome P450 [Arabidopsis thaliana]
  misc_feature (1)..(335): NCBI GI NO: 18402179 NR Description: cytochrome P450, putative; protein id: At3g19270
  misc_feature (1)..(335): NCBI GI NO: 30694740 NR Description: cytochrome P450 family [Arabidopsis thaliana]
  misc_feature (1)..(335): NCBI GI NO: 30694744 NR Description: cytochrome P450 family [Arabidopsis thaliana]
  misc_feature (1)..(335): NCBI GI NO: 7430728 NR Description: cytochrome P450 - Arabidopsis thaliana
  misc_feature (1)..(335): NCBI GI NO: 18415271 NR Description: cytochrome p450 family; protein id: At4g19230
  misc_feature (1)..(335): NCBI GI NO: 15227033 NR Description: taxane 13-alpha-hydroxylase
  misc_feature (1)..(335): NCBI GI NO: 15239203 NR Description: cytochrome p450, putative; protein id: At5g05690
  misc_feature (1)..(335): NCBI GI NO: 33146520 NR Description: putative 5-alpha-taxadienol-10-beta-hydroxylase
  misc_feature (1)..(335): NCBI GI NO: 34901962 NR Description: 5-alpha-taxadienol-10-beta-hydroxylase-like
MGWPYLGETLQLYSQDPSVFFASKQKRYGEIFKTHLLGCPCVMLASPEAARFVLVTQAHLFKPTYPRSKERMIGPSALFFHQGDYHLRLRKLVQGALGPDALRALVPEVEAAVRSTLASWDAGHVRSTFHAMKTLSFDVGIVTIFGGRLDEWRKAELRKNYSVVEKGYNSFPNSLPGTLHYKAMQARRRLHGVLCDIMRERRGQAQAGTTGLLGCLMRSRGDDGAPLLSDEQIADNVIGVLFAAQDTTASALTWIVKYLHDHPKLLEAVRAEQAAVREATGGGRQPLAWAHTKSMALTHRVILESLRMASIISFTFREAVADVEYKGFLIPKGWEGDASLQEHPPQP

SEQ ID NO: 27347 - DNA, 1448 bp, Zea mays subsp. mays
  misc_feature (1)..(1448): Ceres Seq. ID no. 12409411
gtgaaagggccgtgcgggaagctaaccaccgcgaaagcgcctctgggggagtcagacgaacgaagcaatccaaccgaacgaaccgacctaggtcgtcgtcggctcgtcccctccgcaggaccggttcgccgtctcgtcgcgatctcgccgcctgcccgccgcgccctattaccgccatggaggcgctgtggaagcaggcctccaggctcaaggaccaggtctctcggcagggtgtgttcaagcagtttggctacgggaattctgataatgcgtttacagatgagtcagaggttaaactgcatcagagattggaaaagctttacttatcgactcgtgctgctaaacattttcaaagggacattgttcggggcgtggagggctatatagtcacaggatctaaacaagtcgaaatagggaataaattgtctgatgacagccagaaatacggtgttggaaacacatgtacaagtggtgatactttgtccaaagctgctacatatttcggaaaggcacgctcacagatggaaaaggagcgtggcaatatgttgaaagcatttggcacacaggtggcagagccactgcgggcgatggttatgggtgcacctttagaggatgccagacatatggcccagagatatgacagaacgaggcaagaagctgaagcacaggctgtcgaagtatcaagacggcagaacagggtgagggaatctactgggaatggcgatatggtatcaaaattggaagctgccgagtacaagcttgaagaactgaagtcaaacatggtgggattagggaaggaagctattgcagcaatgtcggctgttgaggctcagcagcaacggttgaccttacagcgtctcattgcactggttgaggctgagagaacttaccatcagagagttctggagatacttgacaaattggaagaagaaatggtgtctgagcgccaaaaaaattgaagcacccccgactccagcagctgaaaattatataccaccaccagcaccaccatcttatgatgaaattaatggagcatttgcatccacttctgttaacgagtcagtccaatctgtcgatttcttccttggagaggcccttgattcatttaatgctgaaagtgagtttgagcttaccttgtcagctggtgacattgtaattgtccgaaagatctcaagcaatggttgggcagaaggtgaatgcaagggcaaagcaggatggttccctcatgcttatatcgaaaggcaggaacgtgttctagcaagcaaagttccacatatattttaggagtttctggcagtcgcattacacggttttcatttctattgttgggagctggaactgtatccatgttttcacttcctcttagtttccgcgatgtaattactggctgtcatgtgcatagattaaatttacttccctttttttagtctggaaaaggttttggatgt

SEQ ID NO: 27348 - protein, 318 aa, Zea mays subsp. mays
  peptide (1)..(318): Ceres Seq. ID no. 12409412
  misc_feature (59)..(318): NCBI GI NO: 38344978 NR Description: OSJNBa0011L07.8
  misc_feature (59)..(318): NCBI GI NO: 18418491 NR Description: putative protein; protein id: At4g34660
  misc_feature (59)..(318): NCBI GI NO: 21928139 NR Description: AT4g18060/F15J5_30 [Arabidopsis thaliana]
  misc_feature (59)..(318): NCBI GI NO: 22328762 NR Description: putative protein; protein id: At4g18060
  misc_feature (59)..(315): NCBI GI NO: 34902022 NR Description: unknown protein
  misc_feature (196)..(317): NCBI GI NO: 37535998 NR Description: unknown protein
  misc_feature (59)..(316): NCBI GI NO: 16974680 NR Description: SH3 domain-containing protein 3
  misc_feature (59)..(318): NCBI GI NO: 7487662 NR Description: hypothetical protein T4L20
  misc_feature (59)..(318): NCBI GI NO: 22093679 NR Description: putative SH3
  misc_feature (59)..(318): NCBI GI NO: 15221714 NR Description: unknown protein; protein id: At1g31440
ERAVREANHRESASGGVRRTKQSNRTNRPRSSSARPLRRTGSPSRRDLAACPPRPITAMEALWKQASRLKDQVSRQGVFKQFGYGNSDNAFTDESEVKLHQRLEKLYLSTRAAKHFQRDIVRGVEGYIVTGSKQVEIGNKLSDDSQKYGVGNTCTSGDTLSKAATYFGKARSQMEKERGNMLKAFGTQVAEPLRAMVMGAPLEDARHMAQRYDRTRQEAEAQAVEVSRRQNRVRESTGNGDMVSKLEAAEYKLEELKSNMVGLGKEAIAAMSAVEAQQQRLTLQRLIALVEAERTYHQRVLEILDKLEEEMVSERQKN

SEQ ID NO: 27349 - protein, 260 aa, Zea mays subsp. mays
  peptide (1)..(260): Ceres Seq. ID no. 12409413
  misc_feature (1)..(260): NCBI GI NO: 38344978 NR Description: OSJNBa0011L07.8
  misc_feature (1)..(260): NCBI GI NO: 18418491 NR Description: putative protein; protein id: At4g34660
  misc_feature (1)..(260): NCBI GI NO: 21928139 NR Description: AT4g18060/F15J5_30 [Arabidopsis thaliana]
  misc_feature (1)..(260): NCBI GI NO: 22328762 NR Description: putative protein; protein id: At4g18060
  misc_feature (1)..(257): NCBI GI NO: 34902022 NR Description: unknown protein
  misc_feature (138)..(259): NCBI GI NO: 37535998 NR Description: unknown protein
  misc_feature (1)..(258): NCBI GI NO: 16974680 NR Description: SH3 domain-containing protein 3
  misc_feature (1)..(260): NCBI GI NO: 7487662 NR Description: hypothetical protein T4L20
  misc_feature (1)..(260): NCBI GI NO: 22093679 NR Description: putative SH3
  misc_feature (1)..(260): NCBI GI NO: 15221714 NR Description: unknown protein; protein id: At1g31440
MEALWKQASRLKDQVSRQGVFKQFGYGNSDNAFTDESEVKLHQRLEKLYLSTRAAKHFQRDIVRGVEGYIVTGSKQVEIGNKLSDDSQKYGVGNTCTSGDTLSKAATYFGKARSQMEKERGNMLKAFGTQVAEPLRAMVMGAPLEDARHMAQRYDRTRQEAEAQAVEVSRRQNRVRESTGNGDMVSKLEAAEYKLEELKSNMVGLGKEAIAAMSAVEAQQQRLTLQRLIALVEAERTYHQRVLEILDKLEEEMVSERQKN

SEQ ID NO: 27350 - DNA, 1749 bp, Zea mays subsp. mays
  misc_feature (1)..(1749): Ceres Seq. ID no. 12405080
atctataacagccgccaccttcccccttatactcgccggaggccaaccagtactcgtgccacgactgccacccctcctcttccttgtgatctccgaatacccatctcagattccaagggccgcgccgtgtaatccccggctctccccacccaccatatatctagtatccgcgcctcaaatccctcgcgaaacgccccgccgtaagcagttgttgtctgccgtgatttgagccgggcggacggattgatcccgggacgaggtgtctcagctcttgatcttgatcctgatcctgggaggcgttcctggtttattggtgggagcgaagaagccatgataccttccgtgaggctctctcctggtcctgcagccttctcaggctccagcctacgctcaaaattaccgtcaattccatccatctccagtctcaaaccctccaaatatgtggtctcctcgctgaaaccactctacctagcaccgctagatggtccgcgcactgccgagcttaagtctcggagacagccacttgagttccgttgttctgcttctgctgctgatgacaaggagtcaaagactcaggtggtgccagttcagtcggaaggcgcacagaggttgaagatctccatctatttcgccacctggtgggcgcttaatgtgatatttaacatttacaacaagaaggttctcaatgcattcccttacccctggctcacctccacactctccctcgcctgtggctctgctatgatgcttttctcgtgggccacccgtcttgttgaggcccctaagaccgacctggacttctggaaagttcttttcccggttgctgtggcgcatacaattggccatgttgctgctacagtgagcatgtctaaggtggcagtgtcattcacacacataattaaaagcgcagaacctgcattcagtgttttggtgtcaaggttcttccttggggagacgtttccaattccagtatatctttctcttcttccaatcattggtggttgtgctctagctgctgtcacagagctgaactttaatatggttggatttatgggtgccatgatatccaaccttgcatttgttttccgcaacatcttctcgaagaggggcatgaaggggaagtccgtcagtggcatgaattactacgcttgcctgtcaattatgtccctggtcatactgactccatttgctatagctatggaaggccctcaaatgtgggctgctggttggcaaaaggctcttgcagaagttggacccaatgttgtctggtggattgctgcacagagcgtgttctaccacttatataaccaggtgtcctacatgtctctcgatcagatttctccattgacattcagcattggcaatacaatgaagcgtatatcagtgattgtttcatcaatcattatcttccacactcctgtccgcgctgtcaatgcactgggagctgccattgccatccttggcacattcctgtactctcaggcaaaggcgtgaggcgggccatgatgacgaacgtctgcagaatcagtagcaagcactaaatccaattttgcttgttccagtggcatgtaaatatcgggttaggtttccgtatgagagtttgtaataatggatgaatggctctgctgtttcgttcttgtttgttggccagactcaaatccataggccatgaactgcggtcgagtgtacctgaataatactgtaacggagaattcgccgatgctgtttctttatgggtatatatatagt

SEQ ID NO: 27351 - protein, 387 aa, Zea mays subsp. mays
  peptide (1)..(387): Ceres Seq. ID no. 12405081
  misc_feature (105)..(230): Pfam Name: Pfam Description:  Integral membrane protein DUF6
  misc_feature (1)..(387): NCBI GI NO: 7489744 NR Description: glucose-6-phosphate/ phosphate-translocatorprecursor
  misc_feature (1)..(386): NCBI GI NO: 14150753 NR Description: glucose-6-phosphate/phosphate translocator
  misc_feature (27)..(386): NCBI GI NO: 7488807 NR Description: glucose-6-phosphate/ phosphate-translocatorprecursor
  misc_feature (1)..(386): NCBI GI NO: 18407336 NR Description: glucose-6-phosphate/ phosphate-translocatorprecursor
  misc_feature (1)..(386): NCBI GI NO: 14596173 NR Description: Similar to glucose-6-phosphate/phosphate-translocator
  misc_feature (1)..(384): NCBI GI NO: 7484980 NR Description: glucose-6-phosphate/ phosphate translocatorprecursor
  misc_feature (1)..(386): NCBI GI NO: 18423670 NR Description: glucose-6-phosphate/phosphate translocator
  misc_feature (1)..(386): NCBI GI NO: 21554690 NR Description: glucose-6-phosphate/phosphate translocator
  misc_feature (72)..(386): NCBI GI NO: 28564755 NR Description: putative glucose-6-phosphate/phosphate-translocator precursor
  misc_feature (1)..(384): NCBI GI NO: 9758260 NR Description: glucose-6-phosphate/phosphate translocator
MIPSVRLSPGPAAFSGSSLRSKLPSIPSISSLKPSKYVVSSLKPLYLAPLDGPRTAELKSRRQPLEFRCSASAADDKESKTQVVPVQSEGAQRLKISIYFATWWALNVIFNIYNKKVLNAFPYPWLTSTLSLACGSAMMLFSWATRLVEAPKTDLDFWKVLFPVAVAHTIGHVAATVSMSKVAVSFTHIIKSAEPAFSVLVSRFFLGETFPIPVYLSLLPIIGGCALAAVTELNFNMVGFMGAMISNLAFVFRNIFSKRGMKGKSVSGMNYYACLSIMSLVILTPFAIAMEGPQMWAAGWQKALAEVGPNVVWWIAAQSVFYHLYNQVSYMSLDQISPLTFSIGNTMKRISVIVSSIIIFHTPVRAVNALGAAIAILGTFLYSQAKA

SEQ ID NO: 27352 - protein, 250 aa, Zea mays subsp. mays
  peptide (1)..(250): Ceres Seq. ID no. 12405082
  misc_feature (1)..(93): Pfam Name: Pfam Description:  Integral membrane protein DUF6
  misc_feature (1)..(250): NCBI GI NO: 7489744 NR Description: glucose-6-phosphate/ phosphate-translocatorprecursor
  misc_feature (1)..(249): NCBI GI NO: 14150753 NR Description: glucose-6-phosphate/phosphate translocator
  misc_feature (1)..(249): NCBI GI NO: 7488807 NR Description: glucose-6-phosphate/ phosphate-translocatorprecursor
  misc_feature (1)..(249): NCBI GI NO: 18407336 NR Description: glucose-6-phosphate/ phosphate-translocatorprecursor
  misc_feature (1)..(249): NCBI GI NO: 14596173 NR Description: Similar to glucose-6-phosphate/phosphate-translocator
  misc_feature (1)..(247): NCBI GI NO: 7484980 NR Description: glucose-6-phosphate/ phosphate translocatorprecursor
  misc_feature (1)..(249): NCBI GI NO: 18423670 NR Description: glucose-6-phosphate/phosphate translocator
  misc_feature (1)..(249): NCBI GI NO: 21554690 NR Description: glucose-6-phosphate/phosphate translocator
  misc_feature (1)..(249): NCBI GI NO: 28564755 NR Description: putative glucose-6-phosphate/phosphate-translocator precursor
  misc_feature (1)..(247): NCBI GI NO: 9758260 NR Description: glucose-6-phosphate/phosphate translocator
MMLFSWATRLVEAPKTDLDFWKVLFPVAVAHTIGHVAATVSMSKVAVSFTHIIKSAEPAFSVLVSRFFLGETFPIPVYLSLLPIIGGCALAAVTELNFNMVGFMGAMISNLAFVFRNIFSKRGMKGKSVSGMNYYACLSIMSLVILTPFAIAMEGPQMWAAGWQKALAEVGPNVVWWIAAQSVFYHLYNQVSYMSLDQISPLTFSIGNTMKRISVIVSSIIIFHTPVRAVNALGAAIAILGTFLYSQAKA

SEQ ID NO: 27353 - protein, 249 aa, Zea mays subsp. mays
  peptide (1)..(249): Ceres Seq. ID no. 12405083
  misc_feature (1)..(92): Pfam Name: Pfam Description:  Integral membrane protein DUF6
  misc_feature (1)..(249): NCBI GI NO: 7489744 NR Description: glucose-6-phosphate/ phosphate-translocatorprecursor
  misc_feature (1)..(248): NCBI GI NO: 14150753 NR Description: glucose-6-phosphate/phosphate translocator
  misc_feature (1)..(248): NCBI GI NO: 7488807 NR Description: glucose-6-phosphate/ phosphate-translocatorprecursor
  misc_feature (1)..(248): NCBI GI NO: 18407336 NR Description: glucose-6-phosphate/ phosphate-translocatorprecursor
  misc_feature (1)..(248): NCBI GI NO: 14596173 NR Description: Similar to glucose-6-phosphate/phosphate-translocator
  misc_feature (1)..(246): NCBI GI NO: 7484980 NR Description: glucose-6-phosphate/ phosphate translocatorprecursor
  misc_feature (1)..(248): NCBI GI NO: 18423670 NR Description: glucose-6-phosphate/phosphate translocator
  misc_feature (1)..(248): NCBI GI NO: 21554690 NR Description: glucose-6-phosphate/phosphate translocator
  misc_feature (1)..(248): NCBI GI NO: 28564755 NR Description: putative glucose-6-phosphate/phosphate-translocator precursor
  misc_feature (1)..(246): NCBI GI NO: 9758260 NR Description: glucose-6-phosphate/phosphate translocator
MLFSWATRLVEAPKTDLDFWKVLFPVAVAHTIGHVAATVSMSKVAVSFTHIIKSAEPAFSVLVSRFFLGETFPIPVYLSLLPIIGGCALAAVTELNFNMVGFMGAMISNLAFVFRNIFSKRGMKGKSVSGMNYYACLSIMSLVILTPFAIAMEGPQMWAAGWQKALAEVGPNVVWWIAAQSVFYHLYNQVSYMSLDQISPLTFSIGNTMKRISVIVSSIIIFHTPVRAVNALGAAIAILGTFLYSQAKA

SEQ ID NO: 27354 - DNA, 1174 bp, Zea mays subsp. mays
  misc_feature (1)..(1174): Ceres Seq. ID no. 12365527
catcacaagattggctgaagttttcatcatacaaggagcgcctacttggcctttcatttggtttgctgtcaacaaggaaccatgacttgtcatacaaccttgcgtggcgtaccttaactgatccatcacgtgtctcatcaaaggccataaggaggcagttagggcataaccttctttctgcattgaagtacacatacaagattgataagagggattcacatcttaggccaacgaaaggatatgcgtttcagtcaacttctcaagttggtggtctatggaatagcaaaggattgagatatttccggcaggagttcgatgtacgtggtgctgtgcctttgggattttatagtgctgctctcaacgttggtgtaggagcgggtgtcattttaccgcttgcagggggattcatgaattcgacttcatcagtgccagagaggttttatcttggaggtaattcttctccagtgtgcagcttgggcggaccgtcatctctgctgggtttcagattaaggggagttggcccaacagaggcgcggaggcatgtccttaataactcggagagtggttcggctgaccctggaagggattacttgggaggtgatctggccgtgtctgccttcgctgacttttcttttgatctgcccctcaagatattccagagacgctggaatgccatggccacgcattccttactgctggaaaccttgcgaaactgtcggagggtgagtacaagaacttttcggcttctgaatttcggcaaacgttctggagctctgctggcgttgggattattttgcctaccaaacttttccgggtggaggtgaactattgtcgcatcctaaagcaagctgagcatgacagcgcgaagactggaatccagttcagcttttcctcgcccatgtaggaacttgccatggcagccgaagtagctgcactttcctctgtagacttgcattcttcccgttcttttcatgctgaagcaattgaagaggtttacgtgctcccttttcttgtgacgcttgttcattgacacgaggagctgctccttttttttggtgtcttcaggagatgaatttattatttgctgtttttgacctcacgagggatttgtcctcgcacaactcaaataccgatgctgtggctacacaatggtggatagaataatattttggct

SEQ ID NO: 27355 - protein, 273 aa, Zea mays subsp. mays
  peptide (1)..(273): Ceres Seq. ID no. 12365528
  misc_feature (1)..(251): NCBI GI NO: 18414910 NR Description: expressed protein; protein id: At5g05520
  misc_feature (1)..(251): NCBI GI NO: 21553544 NR Description: unknown [Arabidopsis thaliana]
  misc_feature (1)..(251): NCBI GI NO: 15228433 NR Description: unknown protein; protein id: At3g11070
  misc_feature (17)..(174): NCBI GI NO: 27882330 NR Description: Unknown (protein for MGC:55803) [Danio rerio]
  misc_feature (18)..(174): NCBI GI NO: 30519943 NR Description: RIKEN cDNA 1110030L07 [Mus musculus]
  misc_feature (18)..(174): NCBI GI NO: 34867488 NR Description: similar to Protein CGI-51 [Rattus norvegicus]
  misc_feature (7)..(174): NCBI GI NO: 38511778 NR Description: CGI-51 protein [Silurana tropicalis]
  misc_feature (7)..(174): NCBI GI NO: 7022134 NR Description: unnamed protein product [Homo sapiens]
  misc_feature (7)..(174): NCBI GI NO: 14043738 NR Description: Unknown (protein for MGC:14085) [Homo sapiens]
  misc_feature (23)..(220): NCBI GI NO: 40742445 NR Description: hypothetical protein AN6989.2
SQDWLKFSSYKERLLGLSFGLLSTRNHDLSYNLAWRTLTDPSRVSSKAIRRQLGHNLLSALKYTYKIDKRDSHLRPTKGYAFQSTSQVGGLWNSKGLRYFRQEFDVRGAVPLGFYSAALNVGVGAGVILPLAGGFMNSTSSVPERFYLGGNSSPVCSLGGPSSLLGFRLRGVGPTEARRHVLNNSESGSADPGRDYLGGDLAVSAFADFSFDLPLKIFQRRWNAMATHSLLLETLRNCRRVSTRTFRLLNFGKRSGALLALGLFCLPNFSGWR

SEQ ID NO: 27356 - protein, 138 aa, Zea mays subsp. mays
  peptide (1)..(138): Ceres Seq. ID no. 12365529
  misc_feature (1)..(116): NCBI GI NO: 18414910 NR Description: expressed protein; protein id: At5g05520
  misc_feature (1)..(116): NCBI GI NO: 21553544 NR Description: unknown [Arabidopsis thaliana]
  misc_feature (1)..(116): NCBI GI NO: 15228433 NR Description: unknown protein; protein id: At3g11070
  misc_feature (1)..(39): NCBI GI NO: 27882330 NR Description: Unknown (protein for MGC:55803) [Danio rerio]
  misc_feature (1)..(39): NCBI GI NO: 30519943 NR Description: RIKEN cDNA 1110030L07 [Mus musculus]
  misc_feature (1)..(39): NCBI GI NO: 34867488 NR Description: similar to Protein CGI-51 [Rattus norvegicus]
  misc_feature (1)..(39): NCBI GI NO: 38511778 NR Description: CGI-51 protein [Silurana tropicalis]
  misc_feature (1)..(39): NCBI GI NO: 7022134 NR Description: unnamed protein product [Homo sapiens]
  misc_feature (1)..(39): NCBI GI NO: 14043738 NR Description: Unknown (protein for MGC:14085) [Homo sapiens]
  misc_feature (1)..(85): NCBI GI NO: 40742445 NR Description: hypothetical protein AN6989.2
MNSTSSVPERFYLGGNSSPVCSLGGPSSLLGFRLRGVGPTEARRHVLNNSESGSADPGRDYLGGDLAVSAFADFSFDLPLKIFQRRWNAMATHSLLLETLRNCRRVSTRTFRLLNFGKRSGALLALGLFCLPNFSGWR

SEQ ID NO: 27357 - DNA, 1288 bp, Zea mays subsp. mays
  misc_feature (1)..(1288): Ceres Seq. ID no. 12373648
ccattcgtttctcccctccagcgccgaggccgagtacctcactgtggctaatggcgtcgctgaggcggcatggcttcgtcagctgctccaggagctgcacagtccgttgacatggagcacacttgtctactgtgataacgtcagtgccatgtatctctccaccaatcctgttcagcaccagcgcacaaatcatgttgagctcgacctctacttcgtccgcgagcgtgtcgccgtcggggatgtgcgagttctctatgtcccgaccacttctcagtttgtcgacatcttcaccaagggcctaactacatcgttatttgaggaggtttggtccagtcttaacatctgtcgtggctagaatttcgaccacgagagtgttagagttatttgtggctttgtattgtaatggggtgttttctatgtaatgggcttagggccaacaactctattataaatatagctcccccaaccctggttaggggttagggtttccagcccactaacagattgaactatgactagattagtcatgcgaagattttaaatatttgtggattgatatgtctacaggtccttccgtgactatggagaatccgtcttgagacatttagagaatgcaatcagcaaagacccaaatctccgtaaagccccggtgaaccatgagggcgtatgtacatattctttgctttgttctttcgaaacttgaatatagatcttgatgcataatttttcttctccgagaaagctggatttctgcttattttatggcataccatacacaggtaagggtttcaggatatggtgggtggttcttgctgaggctctctctgcatgatcctgttcttcccctaaacattgaggcacagagtaacgatgatgcgattaagctggggcttgcggttcttgctgctgtgaatgaatttccagcactggatgtgacggcactgaacaaattcgtgcatcagtgaatataagggacggacattggcatcataatgtgatcagcttcgcatggtgtcgtgttcgccccggtcgaacatgttctacatgtggcacgagtatcatacagaaatataccagtttattacttgcacaggctttttagtttggaaagacaagggagatttcagtgttgagatgattcttgtgtgtgtttataccagctatcagagtaagaatatgcgtgcgtactgttgaggctgatctttacttgagaataaggtttgagttacctgagtatttttttaaaaggatcaggaggcttgctgtgatgtgaggccacgaatttgcc

SEQ ID NO: 27358 - protein, 117 aa, Zea mays subsp. mays
  peptide (1)..(117): Ceres Seq. ID no. 12373649
  misc_feature (1)..(114): NCBI GI NO: 12328472 NR Description: putative gag/pol polyprotein
  misc_feature (6)..(114): NCBI GI NO: 37531648 NR Description: putative polyprotein
  misc_feature (6)..(112): NCBI GI NO: 34910174 NR Description: putative gag/pol polyprotein
  misc_feature (6)..(114): NCBI GI NO: 38346582 NR Description: OSJNBa0061G20.2
  misc_feature (6)..(117): NCBI GI NO: 12039328 NR Description: putative copia-like retrotransposon polyprotein
  misc_feature (6)..(117): NCBI GI NO: 37536522 NR Description: putative gag-pol polyprotein
  misc_feature (6)..(112): NCBI GI NO: 37530764 NR Description: putative copia-type polyprotein
  misc_feature (6)..(117): NCBI GI NO: 37530576 NR Description: putative gag-pol polyprotein
  misc_feature (6)..(112): NCBI GI NO: 32487794 NR Description: OSJNBa0035I04.5
  misc_feature (1)..(90): NCBI GI NO: 34900938 NR Description: gag/pol polyprotein-like
HSFLPSSAEAEYLTVANGVAEAAWLRQLLQELHSPLTWSTLVYCDNVSAMYLSTNPVQHQRTNHVELDLYFVRERVAVGDVRVLYVPTTSQFVDIFTKGLTTSLFEEVWSSLNICRG

SEQ ID NO: 27359 - protein, 68 aa, Zea mays subsp. mays
  peptide (1)..(68): Ceres Seq. ID no. 12373650
  misc_feature (1)..(65): NCBI GI NO: 12328472 NR Description: putative gag/pol polyprotein
  misc_feature (1)..(65): NCBI GI NO: 37531648 NR Description: putative polyprotein
  misc_feature (1)..(63): NCBI GI NO: 34910174 NR Description: putative gag/pol polyprotein
  misc_feature (1)..(65): NCBI GI NO: 38346582 NR Description: OSJNBa0061G20.2
  misc_feature (1)..(68): NCBI GI NO: 12039328 NR Description: putative copia-like retrotransposon polyprotein
  misc_feature (1)..(68): NCBI GI NO: 37536522 NR Description: putative gag-pol polyprotein
  misc_feature (1)..(63): NCBI GI NO: 37530764 NR Description: putative copia-type polyprotein
  misc_feature (1)..(68): NCBI GI NO: 37530576 NR Description: putative gag-pol polyprotein
  misc_feature (1)..(63): NCBI GI NO: 32487794 NR Description: OSJNBa0035I04.5
  misc_feature (1)..(41): NCBI GI NO: 34900938 NR Description: gag/pol polyprotein-like
MYLSTNPVQHQRTNHVELDLYFVRERVAVGDVRVLYVPTTSQFVDIFTKGLTTSLFEEVWSSLNICRG

SEQ ID NO: 27360 - protein, 67 aa, Zea mays subsp. mays
  peptide (1)..(67): Ceres Seq. ID no. 12373651
  misc_feature (7)..(67): NCBI GI NO: 33146934 NR Description: putative phosphoglucomutase precursor, chloroplast
  misc_feature (7)..(67): NCBI GI NO: 34901238 NR Description: phosphoglucomutase-like protein
  misc_feature (7)..(66): NCBI GI NO: 11358618 NR Description: phosphoglucomutase-like protein
  misc_feature (7)..(66): NCBI GI NO: 18418333 NR Description: phosphoglucomutase-like protein
MAYHTQVRVSGYGGWFLLRLSLHDPVLPLNIEAQSNDDAIKLGLAVLAAVNEFPALDVTALNKFVHQ

SEQ ID NO: 27361 - DNA, 1173 bp, Zea mays subsp. mays
  misc_feature (1)..(1173): Ceres Seq. ID no. 12409399
atctggattatggcagcaccggaggggagtacatctctgttagttcttcacaactctagactctcagttatcttacggcggtccaaaacccgcaaactgcaggtccgtcgcgcggtacttatcccgtgacttgccatacgagctgtcgcccgacgacgtctacctgacgaacggcggcgctcaggcgatcgagatagtgtgctcggcgctggctcgtccgggcgccaacatcttgctcccgaggcccggctacaagctctacgaggcgcgcgccgtgttcagcgggatggaggcccggtacttcgaccttgtacccggcgaaggctgggaggtcgacaccgacggtgtccgagctctcgccgacaagaacacggttgccgtcgtcatcatcaaccccggaaacccgtgcggttgctgagactgcgcggaagctcggcgtgtttgtcgtagcggacgaggcttacgcgcacttgacgtttggagagaggaggttcgtgccgatgggcgtgtttggggccgtggctccggtcatcacgctggggtccatttcgaagaggtggctggtgcccggctggcggctcgggtggatcgctaccagtgaccctagtggcgtgtttcagagaaccaaggtagccagcagcatcaagacctaccattacatctgctctgaccctacgacgtttgttcagggagcggttccaaacctcctggagaacacaagcgaggagttcttccgaagaaacatcagaactctaaaagaaagcgcggacatgtgctgggagaagctgaagggcgtcaacgggatcgcatgcccaagcagaccgatggggtccatgttcgtaatggtgaaactggacctgtcctgcctgcaggggatcgaagacgacatggacttctgctgccggctcgccaaggaagaatcggtggttgttctgccagggcgtgttgtgggatgcgaggactggctccggatcaccttcgccatcgatccgtcctctctcgaagacggcctggacaggctcaggtccttctgctcgcgacacagcaagccggcggcacagggttctgctgcctctgtagtctagtagtttctgttagaggatctgaagcactccacgtcttggaaacaatgaagtttgggtcaatatgagaacgtaataataaagttgattc

SEQ ID NO: 27362 - protein, 194 aa, Zea mays subsp. mays
  peptide (1)..(194): Ceres Seq. ID no. 12409400
  misc_feature (1)..(178): Pfam Name: Pfam Description:  Aminotransferase class I and II
  misc_feature (1)..(182): NCBI GI NO: 27525396 NR Description: tyrosine aminotransferase
  misc_feature (1)..(183): NCBI GI NO: 15239521 NR Description: tyrosine aminotransferase; protein id: At5g53970.1
  misc_feature (1)..(183): NCBI GI NO: 23397279 NR Description: putatative tyrosine aminotransferase
  misc_feature (1)..(183): NCBI GI NO: 8777301 NR Description: tyrosine aminotransferase-like protein
  misc_feature (1)..(183): NCBI GI NO: 11527941 NR Description: ROOTY/SUPERROOT1 [Arabidopsis thaliana]
  misc_feature (1)..(183): NCBI GI NO: 11527943 NR Description: ROOTY/SUPERROOT1 [Arabidopsis thaliana]
  misc_feature (1)..(183): NCBI GI NO: 15225387 NR Description: putative tyrosine aminotransferase
  misc_feature (1)..(183): NCBI GI NO: 15809874 NR Description: At2g20610/F23N11.7 [Arabidopsis thaliana]
  misc_feature (1)..(193): NCBI GI NO: 15224631 NR Description: putative tyrosine aminotransferase
  misc_feature (1)..(193): NCBI GI NO: 21553462 NR Description: putative tyrosine aminotransferase
MGVFGAVAPVITLGSISKRWLVPGWRLGWIATSDPSGVFQRTKVASSIKTYHYICSDPTTFVQGAVPNLLENTSEEFFRRNIRTLKESADMCWEKLKGVNGIACPSRPMGSMFVMVKLDLSCLQGIEDDMDFCCRLAKEESVVVLPGRVVGCEDWLRITFAIDPSSLEDGLDRLRSFCSRHSKPAAQGSAASVV

SEQ ID NO: 27363 - protein, 113 aa, Zea mays subsp. mays
  peptide (1)..(113): Ceres Seq. ID no. 12409401
MPKQTDGVHVRNGETGPVLPAGDRRRHGLLLPARQGRIGGCSARACCGMRGLAPDHLRHRSVLSRRRPGQAQVLLLATQQAGGTGFCCLCSLVVSVRGSEALHVLETMKFGSI

SEQ ID NO: 27364 - protein, 104 aa, Zea mays subsp. mays
  peptide (1)..(104): Ceres Seq. ID no. 12409402
  misc_feature (1)..(88): Pfam Name: Pfam Description:  Aminotransferase class I and II
  misc_feature (1)..(92): NCBI GI NO: 27525396 NR Description: tyrosine aminotransferase
  misc_feature (1)..(93): NCBI GI NO: 15239521 NR Description: tyrosine aminotransferase; protein id: At5g53970.1
  misc_feature (1)..(93): NCBI GI NO: 23397279 NR Description: putatative tyrosine aminotransferase
  misc_feature (1)..(93): NCBI GI NO: 8777301 NR Description: tyrosine aminotransferase-like protein
  misc_feature (1)..(93): NCBI GI NO: 11527941 NR Description: ROOTY/SUPERROOT1 [Arabidopsis thaliana]
  misc_feature (1)..(93): NCBI GI NO: 11527943 NR Description: ROOTY/SUPERROOT1 [Arabidopsis thaliana]
  misc_feature (1)..(93): NCBI GI NO: 15225387 NR Description: putative tyrosine aminotransferase
  misc_feature (1)..(93): NCBI GI NO: 15809874 NR Description: At2g20610/F23N11.7 [Arabidopsis thaliana]
  misc_feature (1)..(103): NCBI GI NO: 15224631 NR Description: putative tyrosine aminotransferase
  misc_feature (1)..(103): NCBI GI NO: 21553462 NR Description: putative tyrosine aminotransferase
MCWEKLKGVNGIACPSRPMGSMFVMVKLDLSCLQGIEDDMDFCCRLAKEESVVVLPGRVVGCEDWLRITFAIDPSSLEDGLDRLRSFCSRHSKPAAQGSAASVV

SEQ ID NO: 27365 - DNA, 1343 bp, Zea mays subsp. mays
  misc_feature (1)..(1343): Ceres Seq. ID no. 12409395
agttcccatccgccgcccgcgcacttgttccttccggcacagcacacaggacaccgtagacagattcatcgcgacgatggggctggacgtcgtggagatcgggatgggcgccgatttgagcctggatctgaggcacttcgcctccaaggccgtgcggcagagcaaggactacgcgccggcgccggcgccggacatggacgcctgcatccgccgcctcgaggaggagcggggcaagatcgagatgttcaagcgggagctgccgctctgcgcgcgcctcctcgcagacgtgatcgatgtgatgaaggaggaagcggggaaggcggtggcggaggaggacggcgccgccggggacaagagcaagtggatgagcacggcgcagctctggacgggcgattgcggccgcgaggacgcggaaccagagaagcaagacaaggagaggagctcgcctgaggccaggtctcgcgccgccggcggcgctttcttgccgctcaaggctgccgtgggctccggcgcgccggcgttcgcgccgctcggcttgagaatggacgacaaggccgccgcgcgcgccgggatgcccgacctgtgcttgctgtcgccgccggcgaccaagagcgccgccgaggagagccgacgccaggtggtggggtttgcgcaggcggcgacgagggcggccgccgccacggcgccagctgccccttcgcttagcgttggcgtccagtccccgtcgcagcaggcgaggaaggctcggcgttgctggtccacggagctgcatcgccagttcgtcgccgccttgaaccagctcggtggcccccaagttgccaccccaaagcagatcagggagctgatgaaggtggacggcctcacaaacgacgaagtgaaaagccaccttcagaaataccggctgcacaaccggagggcgccagggtccggcgtggtgagccagcccatcgtgctggtgggagggctgtggattccgcaggagcaaagcagctcgcagtccgggtctcccccacggcccgctccacttctccacctcaggcatcgcagtctcgtcggcggccaccgtcagctgcgaggaggaagacggacggtccgagagctatggctggaaatgatgcagaggctgctgctgctgctgctgctgagaggggagctgcagcctcaggaacgggaatcatcaggagggaaactgagagtagtgtagctgtctgtacacatacatagttacattacattacatacagggagtgagggagatcgggccttgagcgctcgagaccaaactgatgcttcgggtttgtacatcccaaagagatgagatgatacagttttgcggctaatcc

SEQ ID NO: 27366 - protein, 400 aa, Zea mays subsp. mays
  peptide (1)..(400): Ceres Seq. ID no. 12409396
  misc_feature (26)..(353): NCBI GI NO: 33146555 NR Description: putative cytoskeletal protein-like protein
  misc_feature (26)..(353): NCBI GI NO: 34915398 NR Description: contains ESTsAU055771
  misc_feature (97)..(334): NCBI GI NO: 34910306 NR Description: P0013F10.12
  misc_feature (37)..(115): NCBI GI NO: 34910306 NR Description: P0013F10.12
  misc_feature (65)..(352): NCBI GI NO: 18395562 NR Description: expressed protein; protein id: At2g03500
  misc_feature (64)..(179): NCBI GI NO: 18419989 NR Description: putative cytoskeletal protein
  misc_feature (239)..(307): NCBI GI NO: 18419989 NR Description: putative cytoskeletal protein
  misc_feature (65)..(352): NCBI GI NO: 25411014 NR Description: hypothetical protein At2g03500
  misc_feature (246)..(331): NCBI GI NO: 18404660 NR Description: expressed protein; protein id: At3g25790
  misc_feature (246)..(331): NCBI GI NO: 21553699 NR Description: unknown [Arabidopsis thaliana]
VPIRRPRTCSFRHSTQDTVDRFIATMGLDVVEIGMGADLSLDLRHFASKAVRQSKDYAPAPAPDMDACIRRLEEERGKIEMFKRELPLCARLLADVIDVMKEEAGKAVAEEDGAAGDKSKWMSTAQLWTGDCGREDAEPEKQDKERSSPEARSRAAGGAFLPLKAAVGSGAPAFAPLGLRMDDKAAARAGMPDLCLLSPPATKSAAEESRRQVVGFAQAATRAAAATAPAAPSLSVGVQSPSQQARKARRCWSTELHRQFVAALNQLGGPQVATPKQIRELMKVDGLTNDEVKSHLQKYRLHNRRAPGSGVVSQPIVLVGGLWIPQEQSSSQSGSPPRPAPLLHLRHRSLVGGHRQLRGGRRTVRELWLEMMQRLLLLLLLRGELQPQERESSGGKLRVV

SEQ ID NO: 27367 - protein, 375 aa, Zea mays subsp. mays
  peptide (1)..(375): Ceres Seq. ID no. 12409397
  misc_feature (1)..(328): NCBI GI NO: 33146555 NR Description: putative cytoskeletal protein-like protein
  misc_feature (1)..(328): NCBI GI NO: 34915398 NR Description: contains ESTsAU055771
  misc_feature (72)..(309): NCBI GI NO: 34910306 NR Description: P0013F10.12
  misc_feature (12)..(90): NCBI GI NO: 34910306 NR Description: P0013F10.12
  misc_feature (40)..(327): NCBI GI NO: 18395562 NR Description: expressed protein; protein id: At2g03500
  misc_feature (39)..(154): NCBI GI NO: 18419989 NR Description: putative cytoskeletal protein
  misc_feature (214)..(282): NCBI GI NO: 18419989 NR Description: putative cytoskeletal protein
  misc_feature (40)..(327): NCBI GI NO: 25411014 NR Description: hypothetical protein At2g03500
  misc_feature (221)..(306): NCBI GI NO: 18404660 NR Description: expressed protein; protein id: At3g25790
  misc_feature (221)..(306): NCBI GI NO: 21553699 NR Description: unknown [Arabidopsis thaliana]
MGLDVVEIGMGADLSLDLRHFASKAVRQSKDYAPAPAPDMDACIRRLEEERGKIEMFKRELPLCARLLADVIDVMKEEAGKAVAEEDGAAGDKSKWMSTAQLWTGDCGREDAEPEKQDKERSSPEARSRAAGGAFLPLKAAVGSGAPAFAPLGLRMDDKAAARAGMPDLCLLSPPATKSAAEESRRQVVGFAQAATRAAAATAPAAPSLSVGVQSPSQQARKARRCWSTELHRQFVAALNQLGGPQVATPKQIRELMKVDGLTNDEVKSHLQKYRLHNRRAPGSGVVSQPIVLVGGLWIPQEQSSSQSGSPPRPAPLLHLRHRSLVGGHRQLRGGRRTVRELWLEMMQRLLLLLLLRGELQPQERESSGGKLRVV

SEQ ID NO: 27368 - protein, 366 aa, Zea mays subsp. mays
  peptide (1)..(366): Ceres Seq. ID no. 12409398
  misc_feature (1)..(319): NCBI GI NO: 33146555 NR Description: putative cytoskeletal protein-like protein
  misc_feature (1)..(319): NCBI GI NO: 34915398 NR Description: contains ESTsAU055771
  misc_feature (63)..(300): NCBI GI NO: 34910306 NR Description: P0013F10.12
  misc_feature (3)..(81): NCBI GI NO: 34910306 NR Description: P0013F10.12
  misc_feature (31)..(318): NCBI GI NO: 18395562 NR Description: expressed protein; protein id: At2g03500
  misc_feature (30)..(145): NCBI GI NO: 18419989 NR Description: putative cytoskeletal protein
  misc_feature (205)..(273): NCBI GI NO: 18419989 NR Description: putative cytoskeletal protein
  misc_feature (31)..(318): NCBI GI NO: 25411014 NR Description: hypothetical protein At2g03500
  misc_feature (212)..(297): NCBI GI NO: 18404660 NR Description: expressed protein; protein id: At3g25790
  misc_feature (212)..(297): NCBI GI NO: 21553699 NR Description: unknown [Arabidopsis thaliana]
MGADLSLDLRHFASKAVRQSKDYAPAPAPDMDACIRRLEEERGKIEMFKRELPLCARLLADVIDVMKEEAGKAVAEEDGAAGDKSKWMSTAQLWTGDCGREDAEPEKQDKERSSPEARSRAAGGAFLPLKAAVGSGAPAFAPLGLRMDDKAAARAGMPDLCLLSPPATKSAAEESRRQVVGFAQAATRAAAATAPAAPSLSVGVQSPSQQARKARRCWSTELHRQFVAALNQLGGPQVATPKQIRELMKVDGLTNDEVKSHLQKYRLHNRRAPGSGVVSQPIVLVGGLWIPQEQSSSQSGSPPRPAPLLHLRHRSLVGGHRQLRGGRRTVRELWLEMMQRLLLLLLLRGELQPQERESSGGKLRVV

SEQ ID NO: 27369 - DNA, 1857 bp, Zea mays subsp. mays
  misc_feature (1)..(1857): Ceres Seq. ID no. 12413145
accaaattcccctaacccgtcggtctgctatcccatctgagctcacggcgatcctctttctcctcatcggcatgagcggcttcttggcggtggtcggcaaggtcggcacctttctgctgtgggtgctgttcctggtcttgcagaccgccaccaggatcgtcggcagcctccttgccagctcagctgagcagcaggatgaccaccatcaggaatcggcggcggcacggcgcaggtcgccgccagcctccccacatcccgaactttacgagccggcgtctgcgtcgctggcgcagctgtgggacccaccgccacttccgcaccttgcttttgctcccgctgcggatgagagctcttcgtcctccagcttacggcggcgtgccagtgcgccgctgccccgagcggatgaagactttgtggtgccatcgagcgcttactcgcgtccaacagtgggggtggctcatacacactctgtgtcagcaccaccactgagggcaatcgagacgcgggcggtgccatctaggctggtgacagccgggggtaagcggccaaggctggagaggaagtactccaagattgttgaccagtaccgatccttggatgaggttattgaagcattagcacaggctggtcttgagtcttctaatttgatcataggaattgatttcacaaagagtaatgaatggacaggaaagaattgcttcaatggtatcagcctgcataatatcagtgacaacccaaatccttatgaacaggcaatatccatcattgggaaaaccttatctgcttttgatgaggataatttaattccttgctttggttttggagacgcatctactcatgaccaagatgtatttgccttctatcctgatgaaagaccatgcaatggttttcaagaagctttagctcgatacagagagattgtacctcatcttcgcctttcgggtcctacatcattcgccccaataattgacatggccacaaccattgtggagcaaagtggtggccaataccatgttttagtaattattgctgacgggcaggtcacaagaagtgtagatactgaatttggtcagttaagcacccaggagcaaatgacagttgatgctattgtacaagcaagccaattcccattgtctataattcttgttggagttggagatggtccatgggatatgatgaaggaatttgatgacaatataccagctaggtcttttgacaatttccagtttgtcaacttcactgcgatcatgtcaaaaaagataagtcaaagcaaaaaggagacagagttcgccctttcagcactaatggaaattccattgcaatacaaggcaacattagagcttggaattttaggacgtcgaattggagagtcacctgagcggattccacttcctcctccttttgcaagttatagcacagtttcaagagcagaaccatctcgggcaaatagttatcgaagtgtgccttcacatccaagggaggagccagctgtaaattcaactatcacagcatcagttacatccccatcagctgccgaaagtagagttttagaaccccagatgtgcccagtttgcctttccaaaccccgggacatggcatttggttgtggccaccagacatgttcagaatgtggaccgcaagtcacagattgccccatctgtcgaaggcccattgacacgagagtaaaattctactaattatttttgggtggaactaggtttaactgaagcacatgccaggagtagaatccactaaaataaatctctatttgactgttaacgatgtagtgtgaattaatttaataaatcagacgtagagaaaaggaggatacttgttctttgcttgtatcctgttcct

SEQ ID NO: 27370 - protein, 564 aa, Zea mays subsp. mays
  peptide (1)..(564): Ceres Seq. ID no. 12413146
  misc_feature (112)..(564): NCBI GI NO: 15241400 NR Description: putative protein; protein id: At5g14420
  misc_feature (59)..(499): NCBI GI NO: 15232157 NR Description: unknown protein; protein id: At3g01650.1
  misc_feature (478)..(564): NCBI GI NO: 15232157 NR Description: unknown protein; protein id: At3g01650.1
  misc_feature (128)..(552): NCBI GI NO: 20804894 NR Description: P0497A05.19
  misc_feature (169)..(564): NCBI GI NO: 18408863 NR Description: F12A21
  misc_feature (169)..(564): NCBI GI NO: 30697566 NR Description: copine-related [Arabidopsis thaliana]
  misc_feature (153)..(494): NCBI GI NO: 18481708 NR Description: hypothetical protein [Sorghum bicolor]
  misc_feature (479)..(562): NCBI GI NO: 18481708 NR Description: hypothetical protein [Sorghum bicolor]
  misc_feature (185)..(482): NCBI GI NO: 18412353 NR Description: expressed protein; protein id: At1g79380
  misc_feature (495)..(564): NCBI GI NO: 18412353 NR Description: expressed protein; protein id: At1g79380
QIPLTRRSAIPSELTAILFLLIGMSGFLAVVGKVGTFLLWVLFLVLQTATRIVGSLLASSAEQQDDHHQESAAARRRSPPASPHPELYEPASASLAQLWDPPPLPHLAFAPAADESSSSSSLRRRASAPLPRADEDFVVPSSAYSRPTVGVAHTHSVSAPPLRAIETRAVPSRLVTAGGKRPRLERKYSKIVDQYRSLDEVIEALAQAGLESSNLIIGIDFTKSNEWTGKNCFNGISLHNISDNPNPYEQAISIIGKTLSAFDEDNLIPCFGFGDASTHDQDVFAFYPDERPCNGFQEALARYREIVPHLRLSGPTSFAPIIDMATTIVEQSGGQYHVLVIIADGQVTRSVDTEFGQLSTQEQMTVDAIVQASQFPLSIILVGVGDGPWDMMKEFDDNIPARSFDNFQFVNFTAIMSKKISQSKKETEFALSALMEIPLQYKATLELGILGRRIGESPERIPLPPPFASYSTVSRAEPSRANSYRSVPSHPREEPAVNSTITASVTSPSAAESRVLEPQMCPVCLSKPRDMAFGCGHQTCSECGPQVTDCPICRRPIDTRVKFY

SEQ ID NO: 27371 - protein, 541 aa, Zea mays subsp. mays
  peptide (1)..(541): Ceres Seq. ID no. 12413147
  misc_feature (89)..(541): NCBI GI NO: 15241400 NR Description: putative protein; protein id: At5g14420
  misc_feature (36)..(476): NCBI GI NO: 15232157 NR Description: unknown protein; protein id: At3g01650.1
  misc_feature (455)..(541): NCBI GI NO: 15232157 NR Description: unknown protein; protein id: At3g01650.1
  misc_feature (105)..(529): NCBI GI NO: 20804894 NR Description: P0497A05.19
  misc_feature (146)..(541): NCBI GI NO: 18408863 NR Description: F12A21
  misc_feature (146)..(541): NCBI GI NO: 30697566 NR Description: copine-related [Arabidopsis thaliana]
  misc_feature (130)..(471): NCBI GI NO: 18481708 NR Description: hypothetical protein [Sorghum bicolor]
  misc_feature (456)..(539): NCBI GI NO: 18481708 NR Description: hypothetical protein [Sorghum bicolor]
  misc_feature (162)..(459): NCBI GI NO: 18412353 NR Description: expressed protein; protein id: At1g79380
  misc_feature (472)..(541): NCBI GI NO: 18412353 NR Description: expressed protein; protein id: At1g79380
MSGFLAVVGKVGTFLLWVLFLVLQTATRIVGSLLASSAEQQDDHHQESAAARRRSPPASPHPELYEPASASLAQLWDPPPLPHLAFAPAADESSSSSSLRRRASAPLPRADEDFVVPSSAYSRPTVGVAHTHSVSAPPLRAIETRAVPSRLVTAGGKRPRLERKYSKIVDQYRSLDEVIEALAQAGLESSNLIIGIDFTKSNEWTGKNCFNGISLHNISDNPNPYEQAISIIGKTLSAFDEDNLIPCFGFGDASTHDQDVFAFYPDERPCNGFQEALARYREIVPHLRLSGPTSFAPIIDMATTIVEQSGGQYHVLVIIADGQVTRSVDTEFGQLSTQEQMTVDAIVQASQFPLSIILVGVGDGPWDMMKEFDDNIPARSFDNFQFVNFTAIMSKKISQSKKETEFALSALMEIPLQYKATLELGILGRRIGESPERIPLPPPFASYSTVSRAEPSRANSYRSVPSHPREEPAVNSTITASVTSPSAAESRVLEPQMCPVCLSKPRDMAFGCGHQTCSECGPQVTDCPICRRPIDTRVKFY

SEQ ID NO: 27372 - DNA, 1867 bp, Zea mays subsp. mays
  misc_feature (1)..(1867): Ceres Seq. ID no. 12376488
  misc_feature (1153)..(1153): n is a, c, t, g, unknown, or other
  misc_feature (1154)..(1154): n is a, c, t, g, unknown, or other
ccctttcttctttggcttggcatctccacccttcctgagttccttccttcctcgcctggcgttcccaccccttgccacctcgcccgcttccggctcctcccccctcgcccgtcctgactctggtcgcggcggagccgtcagatctgggccacgggtgccagcccagccggcgggcggcgggacggagggctgcgggatgaagtcgtcgttgaggagccggcaggagccgcggcgggtcagcaacggcgtcatcatcggcgccatgctgctatccctctgcgtcctcagcatcgtcaaggccagatactgcgccacccccttcggcaaggccgaggaccagctccaggagcagatgaactccagcatccggatggagccggaggagtcgtcgccggccaggacgcccggagaggaggaggaggaggaggacgacggagagaatggggcgtcggccaccaccaccacggcgcccgcggtgacgaaaacgccggcggccgtcgcggccggcggcaacaggggcaagggcaagccgacgtgctacatgacgagcaagcgctcggagcggtgcgacgcgtccggtgacatccgtgtggacgggaaccgctccaccatctacgtcagcgggatagaccgggagtggaagaccaagccgtatgcgcgctaccacgacccggtcgccatggcccacgtccgcgagtacaccctcaagccgctcccggaggcggcgccggcgccggcgtgcacccggaaccactccgtcccgggttttctcttctccaacggcggcttctccggcaacctgtaccacgactacacggacgtgttggtgccgctgttcatcagcacgcaccagttccggggccgggtgcagttcctgctgagcgggatgaagccgtggtgggtggccaagttcacgcccttcttccggcagctgacccggtacgacgtcatcgacgtggacaacgaccaggaggtgcactgcttcccccggatcgtggtcggcgccaccttccacaaggacatgggcgtggacccgcggcggtcgccgggccacgtctccgtggtggacttcaagcgcgcgctgcgccgcgccttcggcctgccgcgcgaggccgccacgcgcggcggcgccacggggcgcggcaagccccgnntgctgatcatctcgcgccggggctcccggcggttcctgaacgagcgggagatggcgcgcgccgcggcgggagccgggttcgaggtgcgcgtggcggagcccgaccagcacacggacacggccgcgttcgcggcgctggtgaactcggcggacgtgatggtgggcgtgcacggcgccgggctgaccaacatggtgttcctgccccgcggcgccgtgctcgtccaggttgtgccgttcggcgggctggagtggctcacgggcgtcactttcaaggaccccgccgcggacatggaggtgagctacatgggctacgacgtgacgctggaggagagctcgctgatcgaccagtaccccaggaaccaccaggtgctcaccgacccctacgccgtgcacaagcagggctgggacgcgctcaaggcggcgtacctggacaagcagaacatccggatggatctcgacaggttcagggccacgctgagggaggccatgagccggttgccgccggctccgtgaccggccgccgtgccccggcccggaggtagataggttggtgtatctatcgtccccgttgtcatgctctcaacaagttgacttaatcttcttcttcttctccgtcccccctttttatttttattatgtcactagcaagattcttttggtccattgttttgttgtgttgtttactgctgctacataaggaatcaatctcatggg

SEQ ID NO: 27373 - protein, 554 aa, Zea mays subsp. mays
  peptide (1)..(554): Ceres Seq. ID no. 12376489
  misc_feature (67)..(551): NCBI GI NO: 37535628 NR Description: unknown protein
  misc_feature (155)..(550): NCBI GI NO: 34895350 NR Description: P0494A10.29
  misc_feature (136)..(552): NCBI GI NO: 34896984 NR Description: unknown protein [Oryza sativa]
  misc_feature (77)..(553): NCBI GI NO: 34895346 NR Description: P0494A10.27
  misc_feature (176)..(550): NCBI GI NO: 15229594 NR Description: hypothetical protein; protein id: At3g18180.1
  misc_feature (176)..(550): NCBI GI NO: 9294073 NR Description: emb|CAB68144
  misc_feature (176)..(550): NCBI GI NO: 30684813 NR Description: expressed protein [Arabidopsis thaliana]
  misc_feature (133)..(550): NCBI GI NO: 34895342 NR Description: P0494A10.25
  misc_feature (18)..(550): NCBI GI NO: 34895340 NR Description: P0494A10.24
  misc_feature (111)..(550): NCBI GI NO: 34895336 NR Description: P0494A10.22
  misc_feature (384)..(384): Xaa is any aa, unknown or other
  misc_feature (385)..(385): Xaa is any aa, unknown or other
PFFFGLASPPFLSSFLPRLAFPPLATSPASGSSPLARPDSGRGGAVRSGPRVPAQPAGGGTEGCGMKSSLRSRQEPRRVSNGVIIGAMLLSLCVLSIVKARYCATPFGKAEDQLQEQMNSSIRMEPEESSPARTPGEEEEEEDDGENGASATTTTAPAVTKTPAAVAAGGNRGKGKPTCYMTSKRSERCDASGDIRVDGNRSTIYVSGIDREWKTKPYARYHDPVAMAHVREYTLKPLPEAAPAPACTRNHSVPGFLFSNGGFSGNLYHDYTDVLVPLFISTHQFRGRVQFLLSGMKPWWVAKFTPFFRQLTRYDVIDVDNDQEVHCFPRIVVGATFHKDMGVDPRRSPGHVSVVDFKRALRRAFGLPREAATRGGATGRGKPXXLIISRRGSRRFLNEREMARAAAGAGFEVRVAEPDQHTDTAAFAALVNSADVMVGVHGAGLTNMVFLPRGAVLVQVVPFGGLEWLTGVTFKDPAADMEVSYMGYDVTLEESSLIDQYPRNHQVLTDPYAVHKQGWDALKAAYLDKQNIRMDLDRFRATLREAMSRLPPAP

SEQ ID NO: 27374 - protein, 489 aa, Zea mays subsp. mays
  peptide (1)..(489): Ceres Seq. ID no. 12376490
  misc_feature (2)..(486): NCBI GI NO: 37535628 NR Description: unknown protein
  misc_feature (90)..(485): NCBI GI NO: 34895350 NR Description: P0494A10.29
  misc_feature (71)..(487): NCBI GI NO: 34896984 NR Description: unknown protein [Oryza sativa]
  misc_feature (12)..(488): NCBI GI NO: 34895346 NR Description: P0494A10.27
  misc_feature (111)..(485): NCBI GI NO: 15229594 NR Description: hypothetical protein; protein id: At3g18180.1
  misc_feature (111)..(485): NCBI GI NO: 9294073 NR Description: emb|CAB68144
  misc_feature (111)..(485): NCBI GI NO: 30684813 NR Description: expressed protein [Arabidopsis thaliana]
  misc_feature (68)..(485): NCBI GI NO: 34895342 NR Description: P0494A10.25
  misc_feature (1)..(485): NCBI GI NO: 34895340 NR Description: P0494A10.24
  misc_feature (46)..(485): NCBI GI NO: 34895336 NR Description: P0494A10.22
  misc_feature (319)..(319): Xaa is any aa, unknown or other
  misc_feature (320)..(320): Xaa is any aa, unknown or other
MKSSLRSRQEPRRVSNGVIIGAMLLSLCVLSIVKARYCATPFGKAEDQLQEQMNSSIRMEPEESSPARTPGEEEEEEDDGENGASATTTTAPAVTKTPAAVAAGGNRGKGKPTCYMTSKRSERCDASGDIRVDGNRSTIYVSGIDREWKTKPYARYHDPVAMAHVREYTLKPLPEAAPAPACTRNHSVPGFLFSNGGFSGNLYHDYTDVLVPLFISTHQFRGRVQFLLSGMKPWWVAKFTPFFRQLTRYDVIDVDNDQEVHCFPRIVVGATFHKDMGVDPRRSPGHVSVVDFKRALRRAFGLPREAATRGGATGRGKPXXLIISRRGSRRFLNEREMARAAAGAGFEVRVAEPDQHTDTAAFAALVNSADVMVGVHGAGLTNMVFLPRGAVLVQVVPFGGLEWLTGVTFKDPAADMEVSYMGYDVTLEESSLIDQYPRNHQVLTDPYAVHKQGWDALKAAYLDKQNIRMDLDRFRATLREAMSRLPPAP

SEQ ID NO: 27375 - protein, 467 aa, Zea mays subsp. mays
  peptide (1)..(467): Ceres Seq. ID no. 12376491
  misc_feature (1)..(464): NCBI GI NO: 37535628 NR Description: unknown protein
  misc_feature (68)..(463): NCBI GI NO: 34895350 NR Description: P0494A10.29
  misc_feature (49)..(465): NCBI GI NO: 34896984 NR Description: unknown protein [Oryza sativa]
  misc_feature (1)..(466): NCBI GI NO: 34895346 NR Description: P0494A10.27
  misc_feature (89)..(463): NCBI GI NO: 15229594 NR Description: hypothetical protein; protein id: At3g18180.1
  misc_feature (89)..(463): NCBI GI NO: 9294073 NR Description: emb|CAB68144
  misc_feature (89)..(463): NCBI GI NO: 30684813 NR Description: expressed protein [Arabidopsis thaliana]
  misc_feature (46)..(463): NCBI GI NO: 34895342 NR Description: P0494A10.25
  misc_feature (1)..(463): NCBI GI NO: 34895340 NR Description: P0494A10.24
  misc_feature (24)..(463): NCBI GI NO: 34895336 NR Description: P0494A10.22
  misc_feature (297)..(297): Xaa is any aa, unknown or other
  misc_feature (298)..(298): Xaa is any aa, unknown or other
MLLSLCVLSIVKARYCATPFGKAEDQLQEQMNSSIRMEPEESSPARTPGEEEEEEDDGENGASATTTTAPAVTKTPAAVAAGGNRGKGKPTCYMTSKRSERCDASGDIRVDGNRSTIYVSGIDREWKTKPYARYHDPVAMAHVREYTLKPLPEAAPAPACTRNHSVPGFLFSNGGFSGNLYHDYTDVLVPLFISTHQFRGRVQFLLSGMKPWWVAKFTPFFRQLTRYDVIDVDNDQEVHCFPRIVVGATFHKDMGVDPRRSPGHVSVVDFKRALRRAFGLPREAATRGGATGRGKPXXLIISRRGSRRFLNEREMARAAAGAGFEVRVAEPDQHTDTAAFAALVNSADVMVGVHGAGLTNMVFLPRGAVLVQVVPFGGLEWLTGVTFKDPAADMEVSYMGYDVTLEESSLIDQYPRNHQVLTDPYAVHKQGWDALKAAYLDKQNIRMDLDRFRATLREAMSRLPPAP

SEQ ID NO: 27376 - DNA, 1315 bp, Zea mays subsp. mays
  misc_feature (1)..(1315): Ceres Seq. ID no. 12409386
aatctgacatctcatcttgatccatccagctttgcctcgatcgccggccggtagccatgtcccccacggaagaagccgctggtggtggtctcgacgactatgaccgcttgagcgagctgaaggcgttcgacgacagcaaggccggcgtcaagggcctcgtggacgctggcgtcacgaccatccctgccatcttccgcggccatctccttcaggaagggccgaaggtatcgtcctctagcagtagcagcagtactagtcttagcattatcccggtcatcgacctctcggcggcggacgcagtcgcacgggaggaggtggtcgcccagttgaaggctgcagccgagacggtggggttcttccagctggtgaaccacggcgttcccagcgagctcctgtccgagatgctggcgtcggtgaggcggttcaacgaggagccccacgaggtgaagcggccctactacacgcgggacgcacgtcgcaaggtgcggttcaactccaacttcgatctgttccagtcgccggcggccaactggcgcgacacgctcttctgcgaggcagcgccggagccgccgcgggcggaggagctgccggtcgccgtcaggcacgtgatgctggagtacggcggcgcggtgcgggaggtggcggcgcgcgtgctggggctgctctcggaggccctggggctgagccccgggcacctcgcagggatggggtgcgcggagggcctcagcctggtgtgcaagtgtgcaactactacccgccgtgcccggaaccggacctcaccctgggctgcagcaggcactcggaccccagcttcctgaccgtgctgctgcaggactcgcatgcgcagggcggcctgcaggcgctcctcgcatccaggtggctggacgtgcctccggtggccggcgcgctcctggtgaacgtcggagaccttctccagctggtcagcaacgggcggttcaagagcgtggagcaccgggtggtggctaaccggagcagggacacggcgagagtgtcagtggcgtgcttctgcaacgcggacatcgcgagatccacgaggctgtatggacccatcgcggagctcatcgccgcggacgacagcgacggcgcgggaagggcgctgtacaggaacgtgacggtcccggagttcctagcgcactacgacaagaaaggcctcgacggtcgcccggcgctccaccgcttccagctgcttcaataattttacatcacatcagtcctgactctggtgatatcatgtcagtatgtcactgtgggctactccggtactctaataaagttatggatggatcagatcaat

SEQ ID NO: 27377 - protein, 253 aa, Zea mays subsp. mays
  peptide (1)..(253): Ceres Seq. ID no. 12409387
  misc_feature (16)..(225): NCBI GI NO: 40253423 NR Description: putative 2-oxoglutarate-dependent oxygenase
  misc_feature (16)..(225): NCBI GI NO: 40253431 NR Description: putative 2-oxoglutarate-dependent oxygenase
  misc_feature (16)..(228): NCBI GI NO: 40253419 NR Description: putative 2-oxoglutarate-dependent oxygenase
  misc_feature (16)..(225): NCBI GI NO: 40253427 NR Description: putative 2-oxoglutarate-dependent oxygenase
  misc_feature (1)..(228): NCBI GI NO: 29123084 NR Description: 2-oxoglutarate-dependent oxygenase [Zea mays]
  misc_feature (14)..(226): NCBI GI NO: 5031283 NR Description: unknown [Prunus armeniaca]
  misc_feature (16)..(226): NCBI GI NO: 30679748 NR Description: 2-oxoglutarate-dependent dioxygenase, putative
  misc_feature (15)..(226): NCBI GI NO: 13878119 NR Description: putative oxidoreductase [Arabidopsis thaliana]
  misc_feature (15)..(226): NCBI GI NO: 15221545 NR Description: oxidoreductase, putative; protein id: At1g06650
  misc_feature (15)..(226): NCBI GI NO: 15224576 NR Description: putative dioxygenase; protein id: At2g30840.1
MSPTEEAAGGGLDDYDRLSELKAFDDSKAGVKGLVDAGVTTIPAIFRGHLLQEGPKVSSSSSSSSTSLSIIPVIDLSAADAVAREEVVAQLKAAAETVGFFQLVNHGVPSELLSEMLASVRRFNEEPHEVKRPYYTRDARRKVRFNSNFDLFQSPAANWRDTLFCEAAPEPPRAEELPVAVRHVMLEYGGAVREVAARVLGLLSEALGLSPGHLAGMGCAEGLSLVCKCATTTRRARNRTSPWAAAGTRTPAS

SEQ ID NO: 27378 - protein, 138 aa, Zea mays subsp. mays
  peptide (1)..(138): Ceres Seq. ID no. 12409388
  misc_feature (1)..(110): NCBI GI NO: 40253423 NR Description: putative 2-oxoglutarate-dependent oxygenase
  misc_feature (1)..(110): NCBI GI NO: 40253431 NR Description: putative 2-oxoglutarate-dependent oxygenase
  misc_feature (1)..(113): NCBI GI NO: 40253419 NR Description: putative 2-oxoglutarate-dependent oxygenase
  misc_feature (1)..(110): NCBI GI NO: 40253427 NR Description: putative 2-oxoglutarate-dependent oxygenase
  misc_feature (1)..(113): NCBI GI NO: 29123084 NR Description: 2-oxoglutarate-dependent oxygenase [Zea mays]
  misc_feature (1)..(111): NCBI GI NO: 5031283 NR Description: unknown [Prunus armeniaca]
  misc_feature (1)..(111): NCBI GI NO: 30679748 NR Description: 2-oxoglutarate-dependent dioxygenase, putative
  misc_feature (1)..(111): NCBI GI NO: 13878119 NR Description: putative oxidoreductase [Arabidopsis thaliana]
  misc_feature (1)..(111): NCBI GI NO: 15221545 NR Description: oxidoreductase, putative; protein id: At1g06650
  misc_feature (1)..(111): NCBI GI NO: 15224576 NR Description: putative dioxygenase; protein id: At2g30840.1
MLASVRRFNEEPHEVKRPYYTRDARRKVRFNSNFDLFQSPAANWRDTLFCEAAPEPPRAEELPVAVRHVMLEYGGAVREVAARVLGLLSEALGLSPGHLAGMGCAEGLSLVCKCATTTRRARNRTSPWAAAGTRTPAS

SEQ ID NO: 27379 - DNA, 1898 bp, Zea mays subsp. mays
  misc_feature (1)..(1898): Ceres Seq. ID no. 12405599
gaggcgatcgcatcggagactcggagccggcaaaaccctaaggggaaggtttctgcaaggaggagggagatgcagggcgccagccacatgctcctggaggagcccttccgcctcgcctccgtcctctcccccgccaagcctaaagtattcccatcactcaccaagatagttgggacgctcgggcccaattcacactcggttgagattattcaggaatgcctcactgctggaatgtcagttgcacgatttgatttctcatggatggatgctgcgtatcaccaggagacccttgataatttgaggaaagcggcacagaatgtgaagaagttgtgccctgtaatgttggatactcttggtccagaaattcaggttcacaattccactggtgagccaattgagttgaaagctgggaatcatgttatcataactccagatatttctaaagctctctctgctgagatcctaccaattaagtttggtgatctggcaaaagctgtgaagaagggtgatactctttttatgggccaatatctcttcacaggaagtgaaacaacatctgtctggctagaagttgtggaaacttctggggaaaatgtaaattgtctagtgaagaatgcagctacacttgccggccccatattcactctgcatgcttcacaagttcacatcaatttgcccactttgagtgaatatgataaacatgtcatttcaacttggggttcatgtaacagtgttgacattatatcactttcccatacccgctctgctgaagatgtcagggagctcagggcctttttacaagcacacgcccttcctgacacacaaatatacgcgaagattgaaaattctgagggtttggataattttgatgacattctcaacgcggcagatggtatcattatttctcgaggagacctgggtattgaccttcctccagaaaacgttttcatgttccaaaagacagctattcataaatgcaatctggagggtaaacctgtgatcatcactagagttgtggacagcatgattgacaatctacgccctacccgtgcagaggcaactgatgttgcaaatgctgtcctagatggcactgatggcattttgcttggtgcggagacacttcgagggctttatcctgttgatgcagtgagtactgtggggagaatatgtgcagaagctgagactgtgtataatcagccgcttcaattcaagaaagtaatgtggcatgtaggtgacccaatgccccacgaggaatctgtggcatcagcagcggttggttctgcaatcaaagtaaaagctgctgccattgttgtgttcacattctcagggagagctgcgaggttagttgccaagtataggccaacaatgccaattttagcagttatcttcccacgtcaaggatccgatccatcaaagtggcgttcttatggcacaacacaggcaagacaatgtttcgcagtgagaggcgtgtaccctttgatggggagtactgatgaggccgaaactggtgggctaacaaaggaagagtatgggataaaacttgcgatgagctatggtcggtcggtcggcatagtgaagcctttcgacagggtgataatctttgaaaagattggtgattcttctgttgtcaagatcattgagtgtgaaggttaggcattagatgattgatacctacaaggctacaacccatgctgtagtttcatgtatcgcatgggagattacctccagttccatctcacttatttaaccaacaagtagagtacagcaagagcacaagatatcttgttagggaattttgccctcttttcagattgtcttttgatttgacgcaataaattatgatgtcacagatttatactggaattatgatttgattatgcaaatataggattgttggc

SEQ ID NO: 27380 - protein, 550 aa, Zea mays subsp. mays
  peptide (1)..(550): Ceres Seq. ID no. 12405600
  misc_feature (418)..(547): Pfam Name: Pfam Description:  Pyruvate kinase, alpha/beta domain
  misc_feature (27)..(549): NCBI GI NO: 18404169 NR Description: putative pyruvate kinase; protein id: At2g36580
  misc_feature (27)..(549): NCBI GI NO: 18409740 NR Description: pyruvate kinase - like protein
  misc_feature (27)..(549): NCBI GI NO: 21537122 NR Description: putative pyruvate kinase [Arabidopsis thaliana]
  misc_feature (27)..(549): NCBI GI NO: 23308151 NR Description: At2g36580/F1O11.21 [Arabidopsis thaliana]
  misc_feature (38)..(549): NCBI GI NO: 11260409 NR Description: pyruvate kinase-like protein
  misc_feature (61)..(549): NCBI GI NO: 20562907 NR Description: pyruvate kinase-like [Deschampsia antarctica]
  misc_feature (78)..(549): NCBI GI NO: 25287747 NR Description: probable pyruvate kinase
  misc_feature (54)..(545): NCBI GI NO: 322787 NR Description: pyruvate kinase (EC 2.7.1.40), cytosolic - potato
  misc_feature (54)..(545): NCBI GI NO: 22296820 NR Description: pyruvate kinase [Glycine max]
  misc_feature (54)..(545): NCBI GI NO: 22296818 NR Description: pyruvate kinase [Glycine max]
EAIASETRSRQNPKGKVSARRREMQGASHMLLEEPFRLASVLSPAKPKVFPSLTKIVGTLGPNSHSVEIIQECLTAGMSVARFDFSWMDAAYHQETLDNLRKAAQNVKKLCPVMLDTLGPEIQVHNSTGEPIELKAGNHVIITPDISKALSAEILPIKFGDLAKAVKKGDTLFMGQYLFTGSETTSVWLEVVETSGENVNCLVKNAATLAGPIFTLHASQVHINLPTLSEYDKHVISTWGSCNSVDIISLSHTRSAEDVRELRAFLQAHALPDTQIYAKIENSEGLDNFDDILNAADGIIISRGDLGIDLPPENVFMFQKTAIHKCNLEGKPVIITRVVDSMIDNLRPTRAEATDVANAVLDGTDGILLGAETLRGLYPVDAVSTVGRICAEAETVYNQPLQFKKVMWHVGDPMPHEESVASAAVGSAIKVKAAAIVVFTFSGRAARLVAKYRPTMPILAVIFPRQGSDPSKWRSYGTTQARQCFAVRGVYPLMGSTDEAETGGLTKEEYGIKLAMSYGRSVGIVKPFDRVIIFEKIGDSSVVKIIECEG

SEQ ID NO: 27381 - protein, 527 aa, Zea mays subsp. mays
  peptide (1)..(527): Ceres Seq. ID no. 12405601
  misc_feature (395)..(524): Pfam Name: Pfam Description:  Pyruvate kinase, alpha/beta domain
  misc_feature (4)..(526): NCBI GI NO: 18404169 NR Description: putative pyruvate kinase; protein id: At2g36580
  misc_feature (4)..(526): NCBI GI NO: 18409740 NR Description: pyruvate kinase - like protein
  misc_feature (4)..(526): NCBI GI NO: 21537122 NR Description: putative pyruvate kinase [Arabidopsis thaliana]
  misc_feature (4)..(526): NCBI GI NO: 23308151 NR Description: At2g36580/F1O11.21 [Arabidopsis thaliana]
  misc_feature (15)..(526): NCBI GI NO: 11260409 NR Description: pyruvate kinase-like protein
  misc_feature (38)..(526): NCBI GI NO: 20562907 NR Description: pyruvate kinase-like [Deschampsia antarctica]
  misc_feature (55)..(526): NCBI GI NO: 25287747 NR Description: probable pyruvate kinase
  misc_feature (31)..(522): NCBI GI NO: 322787 NR Description: pyruvate kinase (EC 2.7.1.40), cytosolic - potato
  misc_feature (31)..(522): NCBI GI NO: 22296820 NR Description: pyruvate kinase [Glycine max]
  misc_feature (31)..(522): NCBI GI NO: 22296818 NR Description: pyruvate kinase [Glycine max]
MQGASHMLLEEPFRLASVLSPAKPKVFPSLTKIVGTLGPNSHSVEIIQECLTAGMSVARFDFSWMDAAYHQETLDNLRKAAQNVKKLCPVMLDTLGPEIQVHNSTGEPIELKAGNHVIITPDISKALSAEILPIKFGDLAKAVKKGDTLFMGQYLFTGSETTSVWLEVVETSGENVNCLVKNAATLAGPIFTLHASQVHINLPTLSEYDKHVISTWGSCNSVDIISLSHTRSAEDVRELRAFLQAHALPDTQIYAKIENSEGLDNFDDILNAADGIIISRGDLGIDLPPENVFMFQKTAIHKCNLEGKPVIITRVVDSMIDNLRPTRAEATDVANAVLDGTDGILLGAETLRGLYPVDAVSTVGRICAEAETVYNQPLQFKKVMWHVGDPMPHEESVASAAVGSAIKVKAAAIVVFTFSGRAARLVAKYRPTMPILAVIFPRQGSDPSKWRSYGTTQARQCFAVRGVYPLMGSTDEAETGGLTKEEYGIKLAMSYGRSVGIVKPFDRVIIFEKIGDSSVVKIIECEG

SEQ ID NO: 27382 - protein, 521 aa, Zea mays subsp. mays
  peptide (1)..(521): Ceres Seq. ID no. 12405602
  misc_feature (389)..(518): Pfam Name: Pfam Description:  Pyruvate kinase, alpha/beta domain
  misc_feature (1)..(520): NCBI GI NO: 18404169 NR Description: putative pyruvate kinase; protein id: At2g36580
  misc_feature (1)..(520): NCBI GI NO: 18409740 NR Description: pyruvate kinase - like protein
  misc_feature (1)..(520): NCBI GI NO: 21537122 NR Description: putative pyruvate kinase [Arabidopsis thaliana]
  misc_feature (1)..(520): NCBI GI NO: 23308151 NR Description: At2g36580/F1O11.21 [Arabidopsis thaliana]
  misc_feature (9)..(520): NCBI GI NO: 11260409 NR Description: pyruvate kinase-like protein
  misc_feature (32)..(520): NCBI GI NO: 20562907 NR Description: pyruvate kinase-like [Deschampsia antarctica]
  misc_feature (49)..(520): NCBI GI NO: 25287747 NR Description: probable pyruvate kinase
  misc_feature (25)..(516): NCBI GI NO: 322787 NR Description: pyruvate kinase (EC 2.7.1.40), cytosolic - potato
  misc_feature (25)..(516): NCBI GI NO: 22296820 NR Description: pyruvate kinase [Glycine max]
  misc_feature (25)..(516): NCBI GI NO: 22296818 NR Description: pyruvate kinase [Glycine max]
MLLEEPFRLASVLSPAKPKVFPSLTKIVGTLGPNSHSVEIIQECLTAGMSVARFDFSWMDAAYHQETLDNLRKAAQNVKKLCPVMLDTLGPEIQVHNSTGEPIELKAGNHVIITPDISKALSAEILPIKFGDLAKAVKKGDTLFMGQYLFTGSETTSVWLEVVETSGENVNCLVKNAATLAGPIFTLHASQVHINLPTLSEYDKHVISTWGSCNSVDIISLSHTRSAEDVRELRAFLQAHALPDTQIYAKIENSEGLDNFDDILNAADGIIISRGDLGIDLPPENVFMFQKTAIHKCNLEGKPVIITRVVDSMIDNLRPTRAEATDVANAVLDGTDGILLGAETLRGLYPVDAVSTVGRICAEAETVYNQPLQFKKVMWHVGDPMPHEESVASAAVGSAIKVKAAAIVVFTFSGRAARLVAKYRPTMPILAVIFPRQGSDPSKWRSYGTTQARQCFAVRGVYPLMGSTDEAETGGLTKEEYGIKLAMSYGRSVGIVKPFDRVIIFEKIGDSSVVKIIECEG

SEQ ID NO: 27383 - DNA, 1589 bp, Zea mays subsp. mays
  misc_feature (1)..(1589): Ceres Seq. ID no. 12352373
tttttttcgaaaaccggttttccccactccacaccaccaccaccaccattgacgacttgactacaaagcccagatccattcctcggggtcgggcggccgccaatcccgccgcataccgctggccgagtcctcgtcggcgccggacggggtgaagtgaaggccgactgggagaattttgtggatcttatctggtctccatcatggaacaagacggcacgacgaacctggctgtcactgaggctgtgcgctcggtgcagctgctcaagatcgacggctactgcgccaccgctaccatgaaatcatcggagttcatcaaattccgatggcacatcgatggccacgagtgggaggtccgtttctatcctgattactggtacttcttcgaggacgaggactgcttcagcacttatggcgacgacgatcactccgagtgggtaggtctgaagctcatccttgtcagtgaaccccagagggacgacgacaaggtgagggtgaacctgagctgccggcttgtatgccccagccccaccagccagcggcggcatctcggtacctgctggtccgaagagaagagggtgtcccatgtgtttgccagcaactcgaaatgctcgcctgaacttctcctcatcctgaagcacgagctaccatcgtcaggttatctcgtggacgattcactgaccgtggaatgcacggtcaccgtgctacgcgacttggacgccgccacggataaggcgctgtcgtccctgccagtgccgccaccctcggacctacaccagcacctcggcgacctcctgcagagcgaggacggagcggacgtcacgttccgtgtctccggggagtccttcgccgcccacagggccatactcgccgcaaggtcccctgtttttaaggccgagttcttcggaggcatggaggaacgcagctccgcttctgtggaggtcaaaggcatggaggctgctgtgttcaggtccatgcttcgcttcatctataccgacacggctccagagctcgacggtgcccaggaccaggagcctgaggcggcggtggccatggctcagcacctactggtagctgctgacaggtatgggctgaacagactgaagctcatgtgcgaatgcaagctctctggcggcatcgacatcggcacagcggccgcgacgttggctctcgccgagcagcacaactgctcgctgctcaaagccaagtgccttgagttcgtcaccaggtcgcctgagactctcgatgctatcctggcgactgacggctacgagcatctggtggcaagctgcccctcggtgctggctgaactgctgagggctgcgcgtggaaggaagatctgagctggacgatgatttcatattatggtttgcctaagatgtgtgcgaactaaaaaccatgcatgatgaactagtagtgcttgcagttgatttcctgcccctcctttcagtttgacctgcgcttgtcatgcatgtattgtatgcacatacatgagacgggcagctagcattttctgtggttcgatctcgtctcggctttgtgcctgccatttgggggcttaattgtaccggttgccgtttctcgttcttcgc

SEQ ID NO: 27384 - protein, 379 aa, Zea mays subsp. mays
  peptide (1)..(379): Ceres Seq. ID no. 12352374
  misc_feature (194)..(312): Pfam Name: Pfam Description:  BTB/POZ domain
  misc_feature (133)..(371): NCBI GI NO: 37534476 NR Description: hypothetical protein
  misc_feature (67)..(371): NCBI GI NO: 37534474 NR Description: hypothetical protein
  misc_feature (147)..(371): NCBI GI NO: 4680338 NR Description: hypothetical protein [Oryza sativa subsp. indica]
  misc_feature (147)..(371): NCBI GI NO: 4680501 NR Description: hypothetical protein [Oryza sativa]
  misc_feature (148)..(379): NCBI GI NO: 37534478 NR Description: hypothetical protein
  misc_feature (20)..(371): NCBI GI NO: 37534534 NR Description: putative speckle-type protein
  misc_feature (120)..(370): NCBI GI NO: 38636858 NR Description: zinc finger POZ domain protein-like
  misc_feature (11)..(371): NCBI GI NO: 37534542 NR Description: putative speckle-type protein
  misc_feature (152)..(371): NCBI GI NO: 37534482 NR Description: hypothetical protein
  misc_feature (168)..(371): NCBI GI NO: 37534508 NR Description: putative speckle-type protein
MEQDGTTNLAVTEAVRSVQLLKIDGYCATATMKSSEFIKFRWHIDGHEWEVRFYPDYWYFFEDEDCFSTYGDDDHSEWVGLKLILVSEPQRDDDKVRVNLSCRLVCPSPTSQRRHLGTCWSEEKRVSHVFASNSKCSPELLLILKHELPSSGYLVDDSLTVECTVTVLRDLDAATDKALSSLPVPPPSDLHQHLGDLLQSEDGADVTFRVSGESFAAHRAILAARSPVFKAEFFGGMEERSSASVEVKGMEAAVFRSMLRFIYTDTAPELDGAQDQEPEAAVAMAQHLLVAADRYGLNRLKLMCECKLSGGIDIGTAAATLALAEQHNCSLLKAKCLEFVTRSPETLDAILATDGYEHLVASCPSVLAELLRAARGRKI

SEQ ID NO: 27385 - protein, 348 aa, Zea mays subsp. mays
  peptide (1)..(348): Ceres Seq. ID no. 12352375
  misc_feature (163)..(281): Pfam Name: Pfam Description:  BTB/POZ domain
  misc_feature (102)..(340): NCBI GI NO: 37534476 NR Description: hypothetical protein
  misc_feature (36)..(340): NCBI GI NO: 37534474 NR Description: hypothetical protein
  misc_feature (116)..(340): NCBI GI NO: 4680338 NR Description: hypothetical protein [Oryza sativa subsp. indica]
  misc_feature (116)..(340): NCBI GI NO: 4680501 NR Description: hypothetical protein [Oryza sativa]
  misc_feature (117)..(348): NCBI GI NO: 37534478 NR Description: hypothetical protein
  misc_feature (1)..(340): NCBI GI NO: 37534534 NR Description: putative speckle-type protein
  misc_feature (89)..(339): NCBI GI NO: 38636858 NR Description: zinc finger POZ domain protein-like
  misc_feature (1)..(340): NCBI GI NO: 37534542 NR Description: putative speckle-type protein
  misc_feature (121)..(340): NCBI GI NO: 37534482 NR Description: hypothetical protein
  misc_feature (137)..(340): NCBI GI NO: 37534508 NR Description: putative speckle-type protein
MKSSEFIKFRWHIDGHEWEVRFYPDYWYFFEDEDCFSTYGDDDHSEWVGLKLILVSEPQRDDDKVRVNLSCRLVCPSPTSQRRHLGTCWSEEKRVSHVFASNSKCSPELLLILKHELPSSGYLVDDSLTVECTVTVLRDLDAATDKALSSLPVPPPSDLHQHLGDLLQSEDGADVTFRVSGESFAAHRAILAARSPVFKAEFFGGMEERSSASVEVKGMEAAVFRSMLRFIYTDTAPELDGAQDQEPEAAVAMAQHLLVAADRYGLNRLKLMCECKLSGGIDIGTAAATLALAEQHNCSLLKAKCLEFVTRSPETLDAILATDGYEHLVASCPSVLAELLRAARGRKI

SEQ ID NO: 27386 - DNA, 1591 bp, Zea mays subsp. mays
  misc_feature (1)..(1591): Ceres Seq. ID no. 12409382
aaccgcaggttcgggagtactccggaacccgccgccgcatccacacgacgccacgactgacgacggagagccccggtctccttccacggctccaccgccaccaccccgcataaaagtagggaagagagccttgcagcgagaaccgtatcgatctattctcgtctgaagcaattcgcccctgtcgtgagcagaaccctacagctcgtattcgcctcatctcgcagcagcagcagaagaacaagggtatggcgaaggatgggggtcccgactggaacggcctgctcaagtggagcctcgcccacggcgacggcaccaacccgccgcgtgctctcagcgaggaagacagaaaatggttcatggatgctatgcaagccaacacggtagatgttgtgaagaggatgaaggagatcactcaggtgatgaaaactccagaagatgtcttgcagtctcagggcgtgacccctgagaacatcgaagatatgttggatgagctacaggagcatgttgaatccattgacatggcaaatgatctacattctattggtgggctggatcctctacttggttacttgaaaaattcaaatgctggcatccgagcaaaggcagcagaagttgttagtacaattgtgcagaataatcccaagagtcagcaacttgtcatggaatccaatgggctagagccactgttgacgaacttcaaatcagatccaagtacaaatgcacgcacaaaagctttaggagccatatcttctctaattcgtcataaccagcctggagtttccgcatttcgattgggaaatggctatgctggattgaaggatgctgttggttccgatgatgccagactccaaaggaaagctctcaatctcatacaatacttgctgcacaactacaaggcagacaggagtgttgccacagagcttggtcttccgaagctgatgatgcaccttgtgtccagcgatgattccttagtgcgtgaagctgctctaggcggcctccttgagttggcgcgggacaagacatctggtaacgcgctacctgaccaagaaaagctgaaagacatgctcaagcagccgaatagaagggatcagcgcaatggacactgacgatctccacgctgctcgcgaggagcggcagctggtggattcactctggaaggagtgctacaacgaaccttcgtctctcagggagaagggcctcgtcgtgcttccgggagaggatgctccccaacagccgccaccagacgttgcagggaagatgtttgagccaccgcttcgtgcgtgggcggctgcaagacctgctcaggaagatgactctgactctggcagcggaaagaaggatccgccattgctgcttaagttttgacggccttcttatgccgatactagttcttaggctccaccatgggtgttgaaagctgaaagatcagatctgatggatgcctgaccttcttcgaacctcagttgtggttcttgtaatttgcaccgcatttctgttctgagtatgttttatgagaagactgggaagatgacagacagatactgtatcacgtgatgctcgtaaattaacactacatgcgaattctcttgct

SEQ ID NO: 27387 - protein, 286 aa, Zea mays subsp. mays
  peptide (1)..(286): Ceres Seq. ID no. 12409383
  misc_feature (131)..(172): Pfam Name: Pfam Description:  Armadillo/beta-catenin-like repeat
  misc_feature (1)..(275): NCBI GI NO: 34897412 NR Description: putative Hsp70 binding protein
  misc_feature (1)..(276): NCBI GI NO: 21553998 NR Description: unknown [Arabidopsis thaliana]
  misc_feature (1)..(276): NCBI GI NO: 18398480 NR Description: expressed protein; protein id: At3g09350
  misc_feature (31)..(276): NCBI GI NO: 6478927 NR Description: hypothetical protein [Arabidopsis thaliana]
  misc_feature (1)..(30): NCBI GI NO: 6478927 NR Description: hypothetical protein [Arabidopsis thaliana]
  misc_feature (4)..(280): NCBI GI NO: 15232329 NR Description: putative protein; protein id: At3g53800
  misc_feature (4)..(280): NCBI GI NO: 26449490 NR Description: unknown protein [Arabidopsis thaliana]
  misc_feature (1)..(275): NCBI GI NO: 15241689 NR Description: putative protein; protein id: At5g02150.1
  misc_feature (11)..(276): NCBI GI NO: 29436427 NR Description: Similar to RIKEN cDNA 1500019G21 gene
  misc_feature (11)..(276): NCBI GI NO: 12667701 NR Description: Hsp70 binding protein [Danio rerio]
MAKDGGPDWNGLLKWSLAHGDGTNPPRALSEEDRKWFMDAMQANTVDVVKRMKEITQVMKTPEDVLQSQGVTPENIEDMLDELQEHVESIDMANDLHSIGGLDPLLGYLKNSNAGIRAKAAEVVSTIVQNNPKSQQLVMESNGLEPLLTNFKSDPSTNARTKALGAISSLIRHNQPGVSAFRLGNGYAGLKDAVGSDDARLQRKALNLIQYLLHNYKADRSVATELGLPKLMMHLVSSDDSLVREAALGGLLELARDKTSGNALPDQEKLKDMLKQPNRRDQRNGH

SEQ ID NO: 27388 - protein, 249 aa, Zea mays subsp. mays
  peptide (1)..(249): Ceres Seq. ID no. 12409384
  misc_feature (94)..(135): Pfam Name: Pfam Description:  Armadillo/beta-catenin-like repeat
  misc_feature (1)..(238): NCBI GI NO: 34897412 NR Description: putative Hsp70 binding protein
  misc_feature (1)..(239): NCBI GI NO: 21553998 NR Description: unknown [Arabidopsis thaliana]
  misc_feature (1)..(239): NCBI GI NO: 18398480 NR Description: expressed protein; protein id: At3g09350
  misc_feature (1)..(239): NCBI GI NO: 6478927 NR Description: hypothetical protein [Arabidopsis thaliana]
  misc_feature (1)..(243): NCBI GI NO: 15232329 NR Description: putative protein; protein id: At3g53800
  misc_feature (1)..(243): NCBI GI NO: 26449490 NR Description: unknown protein [Arabidopsis thaliana]
  misc_feature (1)..(238): NCBI GI NO: 15241689 NR Description: putative protein; protein id: At5g02150.1
  misc_feature (1)..(239): NCBI GI NO: 29436427 NR Description: Similar to RIKEN cDNA 1500019G21 gene
  misc_feature (1)..(239): NCBI GI NO: 12667701 NR Description: Hsp70 binding protein [Danio rerio]
  misc_feature (1)..(224): NCBI GI NO: 13195602 NR Description: RIKEN cDNA 1500019G21 [Mus musculus]
MDAMQANTVDVVKRMKEITQVMKTPEDVLQSQGVTPENIEDMLDELQEHVESIDMANDLHSIGGLDPLLGYLKNSNAGIRAKAAEVVSTIVQNNPKSQQLVMESNGLEPLLTNFKSDPSTNARTKALGAISSLIRHNQPGVSAFRLGNGYAGLKDAVGSDDARLQRKALNLIQYLLHNYKADRSVATELGLPKLMMHLVSSDDSLVREAALGGLLELARDKTSGNALPDQEKLKDMLKQPNRRDQRNGH

SEQ ID NO: 27389 - protein, 246 aa, Zea mays subsp. mays
  peptide (1)..(246): Ceres Seq. ID no. 12409385
  misc_feature (91)..(132): Pfam Name: Pfam Description:  Armadillo/beta-catenin-like repeat
  misc_feature (1)..(235): NCBI GI NO: 34897412 NR Description: putative Hsp70 binding protein
  misc_feature (1)..(236): NCBI GI NO: 21553998 NR Description: unknown [Arabidopsis thaliana]
  misc_feature (1)..(236): NCBI GI NO: 18398480 NR Description: expressed protein; protein id: At3g09350
  misc_feature (1)..(236): NCBI GI NO: 6478927 NR Description: hypothetical protein [Arabidopsis thaliana]
  misc_feature (1)..(240): NCBI GI NO: 15232329 NR Description: putative protein; protein id: At3g53800
  misc_feature (1)..(240): NCBI GI NO: 26449490 NR Description: unknown protein [Arabidopsis thaliana]
  misc_feature (1)..(235): NCBI GI NO: 15241689 NR Description: putative protein; protein id: At5g02150.1
  misc_feature (1)..(236): NCBI GI NO: 29436427 NR Description: Similar to RIKEN cDNA 1500019G21 gene
  misc_feature (1)..(236): NCBI GI NO: 12667701 NR Description: Hsp70 binding protein [Danio rerio]
  misc_feature (1)..(221): NCBI GI NO: 13195602 NR Description: RIKEN cDNA 1500019G21 [Mus musculus]
MQANTVDVVKRMKEITQVMKTPEDVLQSQGVTPENIEDMLDELQEHVESIDMANDLHSIGGLDPLLGYLKNSNAGIRAKAAEVVSTIVQNNPKSQQLVMESNGLEPLLTNFKSDPSTNARTKALGAISSLIRHNQPGVSAFRLGNGYAGLKDAVGSDDARLQRKALNLIQYLLHNYKADRSVATELGLPKLMMHLVSSDDSLVREAALGGLLELARDKTSGNALPDQEKLKDMLKQPNRRDQRNGH

SEQ ID NO: 27390 - DNA, 1489 bp, Zea mays subsp. mays
  misc_feature (1)..(1489): Ceres Seq. ID no. 12407941
gaaaaatggcacaagcacacagctcatcagttcttcttcgtcgtcttggctagctgcctagctagctagctagttcctcactcctctccgagaaccccctttttcatctctctctctcgcctagctcctttcgcgatgttatcttctctgctggcctcacaactcgagagagactcgtgaaaagaatccagatatataaagagatcgagggcagctagcttaattattagcatgtcgatgagcttcttgagcatggtggaggcggagctgccgccgggggttccggttccacccgagggacgacgagctcatctgcgactacctcgcgcccaagctcggcgccaagcccggcttctccggctgccgcccgcccatggtcgacgtcgacctcaacaaggtcgagccatgggacctccccgtggcggcgtcggtggggccgcgggagtggtacttcttcagcctcaaggaccgcaagtacgcgacggggcagcggacgaaccgggccacggtgtccgggtactggaaggcgacggggaaggaccgacccgtggtggcggcgcggcgaggcgcgctggtggggatgcgcaagacgctcgtgttctaccaggggagggcgcccaagggcaggaagacggagtgggtgatgcacgagtacaggatggagccagctgctcctcttcttgatcaccaaccctcctcatccaactccaaggatgaagattgggtgctgtgcagagtcatctgcaagaagaaactggcagcaggaggccgcgcaggagggggaagctcaaggagcctggtcgccagcaacggcggccgcgagaccgcgccagccaccccgccgccgccgccgctgccacctcgcatggacacggacgccaccctagcacagctccaggccgccatgcacgccaccgccggcgcgctcgagcaggtgccctgcttctccagcttcaataacaacactactgccagctctagagctgctgccgcagcagcagcagcagcgcagccatgctacctgcccagcatggccacaggcggcagccacggcacgacgagctactacctggaccacgcgatgctgccgcctgagctaggtggctgcttcgatcctctccacggcgacaagagctgctcaaggcggtgctgggccagctcggcggcgacgcggtggcgccgggcctgcacctgcagcacgagatggccgccggcgctgtcgtcgcttcgtccgcttggatgaatcacttctaggggacattagttcagcgaacctaagtatgtgattggttgcgtatattatgggaaatacatacatacatatatacataattgtgtggtgaaacatttgtgtgtgaggcaaggagtagagcatctgagcatgcgtcattttttctgttgctgccgatcgatttggacgagaaggccatgaggcaaggagtaaactctgtaatataatggctgctcaagtgtgtgtacattcagatgc

SEQ ID NO: 27391 - protein, 289 aa, Zea mays subsp. mays
  peptide (1)..(289): Ceres Seq. ID no. 12407942
  misc_feature (1)..(97): Pfam Name: NAM Pfam Description: No apical meristem
  misc_feature (1)..(234): NCBI GI NO: 15222818 NR Description: NAC1; protein id: At1g56010
  misc_feature (1)..(127): NCBI GI NO: 15148912 NR Description: NAC domain protein NAC1 [Phaseolus vulgaris]
  misc_feature (17)..(166): NCBI GI NO: 38344327 NR Description: OSJNBa0058K23.9
  misc_feature (1)..(15): NCBI GI NO: 38344327 NR Description: OSJNBa0058K23.9
  misc_feature (17)..(162): NCBI GI NO: 5679845 NR Description: l1332.9 [Oryza sativa (indica cultivar-group)]
  misc_feature (1)..(15): NCBI GI NO: 5679845 NR Description: l1332.9 [Oryza sativa (indica cultivar-group)]
  misc_feature (17)..(162): NCBI GI NO: 5852096 NR Description: zwh19.1 [Oryza sativa (indica cultivar-group)]
  misc_feature (1)..(15): NCBI GI NO: 5852096 NR Description: zwh19.1 [Oryza sativa (indica cultivar-group)]
  misc_feature (1)..(192): NCBI GI NO: 38636961 NR Description: putative NAC domain protein NAC1
  misc_feature (1)..(130): NCBI GI NO: 15795128 NR Description: NAM (no apical meristem) protein-like
MVDVDLNKVEPWDLPVAASVGPREWYFFSLKDRKYATGQRTNRATVSGYWKATGKDRPVVAARRGALVGMRKTLVFYQGRAPKGRKTEWVMHEYRMEPAAPLLDHQPSSSNSKDEDWVLCRVICKKKLAAGGRAGGGSSRSLVASNGGRETAPATPPPPPLPPRMDTDATLAQLQAAMHATAGALEQVPCFSSFNNNTTASSRAAAAAAAAAQPCYLPSMATGGSHGTTSYYLDHAMLPPELGGCFDPLHGDKSCSRRCWASSAATRWRRACTCSTRWPPALSSLRPLG

SEQ ID NO: 27392 - protein, 220 aa, Zea mays subsp. mays
  peptide (1)..(220): Ceres Seq. ID no. 12407943
  misc_feature (1)..(165): NCBI GI NO: 15222818 NR Description: NAC1; protein id: At1g56010
  misc_feature (1)..(58): NCBI GI NO: 15148912 NR Description: NAC domain protein NAC1 [Phaseolus vulgaris]
  misc_feature (1)..(97): NCBI GI NO: 38344327 NR Description: OSJNBa0058K23.9
  misc_feature (1)..(93): NCBI GI NO: 5679845 NR Description: l1332.9 [Oryza sativa (indica cultivar-group)]
  misc_feature (1)..(93): NCBI GI NO: 5852096 NR Description: zwh19.1 [Oryza sativa (indica cultivar-group)]
  misc_feature (1)..(123): NCBI GI NO: 38636961 NR Description: putative NAC domain protein NAC1
  misc_feature (1)..(61): NCBI GI NO: 15795128 NR Description: NAM (no apical meristem) protein-like
  misc_feature (1)..(179): NCBI GI NO: 15238882 NR Description: CUC2 (dbj|BAA19529.1); protein id: At5g53950.1
  misc_feature (1)..(126): NCBI GI NO: 1279640 NR Description: NAM [Petunia x hybrida]
  misc_feature (1)..(124): NCBI GI NO: 27529810 NR Description: OsNAC2 protein [Oryza sativa]
MRKTLVFYQGRAPKGRKTEWVMHEYRMEPAAPLLDHQPSSSNSKDEDWVLCRVICKKKLAAGGRAGGGSSRSLVASNGGRETAPATPPPPPLPPRMDTDATLAQLQAAMHATAGALEQVPCFSSFNNNTTASSRAAAAAAAAAQPCYLPSMATGGSHGTTSYYLDHAMLPPELGGCFDPLHGDKSCSRRCWASSAATRWRRACTCSTRWPPALSSLRPLG

SEQ ID NO: 27393 - protein, 199 aa, Zea mays subsp. mays
  peptide (1)..(199): Ceres Seq. ID no. 12407944
  misc_feature (1)..(144): NCBI GI NO: 15222818 NR Description: NAC1; protein id: At1g56010
  misc_feature (1)..(37): NCBI GI NO: 15148912 NR Description: NAC domain protein NAC1 [Phaseolus vulgaris]
  misc_feature (1)..(76): NCBI GI NO: 38344327 NR Description: OSJNBa0058K23.9
  misc_feature (1)..(72): NCBI GI NO: 5679845 NR Description: l1332.9 [Oryza sativa (indica cultivar-group)]
  misc_feature (1)..(72): NCBI GI NO: 5852096 NR Description: zwh19.1 [Oryza sativa (indica cultivar-group)]
  misc_feature (1)..(102): NCBI GI NO: 38636961 NR Description: putative NAC domain protein NAC1
  misc_feature (1)..(40): NCBI GI NO: 15795128 NR Description: NAM (no apical meristem) protein-like
  misc_feature (1)..(158): NCBI GI NO: 15238882 NR Description: CUC2 (dbj|BAA19529.1); protein id: At5g53950.1
  misc_feature (1)..(105): NCBI GI NO: 1279640 NR Description: NAM [Petunia x hybrida]
  misc_feature (1)..(103): NCBI GI NO: 27529810 NR Description: OsNAC2 protein [Oryza sativa]
MHEYRMEPAAPLLDHQPSSSNSKDEDWVLCRVICKKKLAAGGRAGGGSSRSLVASNGGRETAPATPPPPPLPPRMDTDATLAQLQAAMHATAGALEQVPCFSSFNNNTTASSRAAAAAAAAAQPCYLPSMATGGSHGTTSYYLDHAMLPPELGGCFDPLHGDKSCSRRCWASSAATRWRRACTCSTRWPPALSSLRPLG

SEQ ID NO: 27394 - DNA, 1238 bp, Zea mays subsp. mays
  misc_feature (1)..(1238): Ceres Seq. ID no. 12387069
attccctcgctcgcggccttgtacagcatactgtccttgcggcgctgctggctccgccgggtgttgggtcaacgttctcccgtccccccgagcgcagtctcgcgtggttctcccgtcccccgaggcccgagcgtagtctctctcttttgccgtggttctccagtcctccctcatccgctctctttctttctctcgtggcgagtggtaacgacgtcaggtgctcaggtcttgttcaggcccttcgccggcgacgagcacacagcaaatggatacaggagctcaagctatgttcatcatcagtcttgtgctctggtgtactacaagctttgccttggatgatgctgctgctacaaggattccaattgtgggcacattacctctgtcaatgaaagaaaatccgcaattatgccaactttgtgaggagtttgcatcagaggccctcttctatttaaatgaaaatgagacccagactgaaatcattgatacactacaccaagcttgttcaaagtttggctcttttaagctggagtgcacgaggttggtggattattatgtccctcttttcttcacaaaaattgcttcattaagccctgaagaattttgtgcatcagcaagtttttgtggggaggtaacattcattcgtcttccaagacatgaagatacttgcaccctttgccatgaggttgtcgatgaggttgttactaatcttgaagatccaggcatggagcttaagataattgagatacttctgaaaggatgcaataatgcagaggattatgtacaaaagtgcaagaggttgataatccaaaatgcacctatcataatggagaatattaagaagttcctcgagaagagagatttttgcaattctatccatgtctgtggaagtaaatccgttcgcgctggatcacaagtcctcagaagcctttcttcagcctgaagccctgaacttgcacggattgttatgatcatgcaacagatattagtgtaaaaacaagtccaggcgccgctatgtgagtcccgtgtgacatcgactgtacagatttggctgtgtacatgttaaaggaaaacacaactgaggcacaaacctcttctgtttacgggtcatgagcagggtgtgtatttgaactgtatatcattataccttggattggatgtcatgttgctctatatttatacgtaaccgagttttgtaactttggagaagtaatgtatatgatgccaaagcttgatcttcc

SEQ ID NO: 27395 - protein, 224 aa, Zea mays subsp. mays
  peptide (1)..(224): Ceres Seq. ID no. 12387070
  misc_feature (46)..(83): Pfam Name: Pfam Description:  Saposin-like type B, region 1
  misc_feature (44)..(223): NCBI GI NO: 34896130 NR Description: P0701D05.19
  misc_feature (39)..(211): NCBI GI NO: 15231028 NR Description: putative protein; protein id: At3g51730
  misc_feature (50)..(207): NCBI GI NO: 6942199 NR Description: putative protein [Vitis riparia]
  misc_feature (40)..(224): NCBI GI NO: 15241065 NR Description: putative protein; protein id: At5g01800
  misc_feature (42)..(212): NCBI GI NO: 7511780 NR Description: P109 protein - silkworm
MDTGAQAMFIISLVLWCTTSFALDDAAATRIPIVGTLPLSMKENPQLCQLCEEFASEALFYLNENETQTEIIDTLHQACSKFGSFKLECTRLVDYYVPLFFTKIASLSPEEFCASASFCGEVTFIRLPRHEDTCTLCHEVVDEVVTNLEDPGMELKIIEILLKGCNNAEDYVQKCKRLIIQNAPIIMENIKKFLEKRDFCNSIHVCGSKSVRAGSQVLRSLSSA

SEQ ID NO: 27396 - protein, 217 aa, Zea mays subsp. mays
  peptide (1)..(217): Ceres Seq. ID no. 12387071
  misc_feature (39)..(76): Pfam Name: Pfam Description:  Saposin-like type B, region 1
  misc_feature (37)..(216): NCBI GI NO: 34896130 NR Description: P0701D05.19
  misc_feature (32)..(204): NCBI GI NO: 15231028 NR Description: putative protein; protein id: At3g51730
  misc_feature (43)..(200): NCBI GI NO: 6942199 NR Description: putative protein [Vitis riparia]
  misc_feature (33)..(217): NCBI GI NO: 15241065 NR Description: putative protein; protein id: At5g01800
  misc_feature (35)..(205): NCBI GI NO: 7511780 NR Description: P109 protein - silkworm
MFIISLVLWCTTSFALDDAAATRIPIVGTLPLSMKENPQLCQLCEEFASEALFYLNENETQTEIIDTLHQACSKFGSFKLECTRLVDYYVPLFFTKIASLSPEEFCASASFCGEVTFIRLPRHEDTCTLCHEVVDEVVTNLEDPGMELKIIEILLKGCNNAEDYVQKCKRLIIQNAPIIMENIKKFLEKRDFCNSIHVCGSKSVRAGSQVLRSLSSA

SEQ ID NO: 27397 - protein, 184 aa, Zea mays subsp. mays
  peptide (1)..(184): Ceres Seq. ID no. 12387072
  misc_feature (6)..(43): Pfam Name: Pfam Description:  Saposin-like type B, region 1
  misc_feature (4)..(183): NCBI GI NO: 34896130 NR Description: P0701D05.19
  misc_feature (1)..(171): NCBI GI NO: 15231028 NR Description: putative protein; protein id: At3g51730
  misc_feature (10)..(167): NCBI GI NO: 6942199 NR Description: putative protein [Vitis riparia]
  misc_feature (1)..(184): NCBI GI NO: 15241065 NR Description: putative protein; protein id: At5g01800
  misc_feature (2)..(172): NCBI GI NO: 7511780 NR Description: P109 protein - silkworm
MKENPQLCQLCEEFASEALFYLNENETQTEIIDTLHQACSKFGSFKLECTRLVDYYVPLFFTKIASLSPEEFCASASFCGEVTFIRLPRHEDTCTLCHEVVDEVVTNLEDPGMELKIIEILLKGCNNAEDYVQKCKRLIIQNAPIIMENIKKFLEKRDFCNSIHVCGSKSVRAGSQVLRSLSSA

SEQ ID NO: 27398 - DNA, 1337 bp, Zea mays subsp. mays
  misc_feature (1)..(1337): Ceres Seq. ID no. 12409361
aactgataaaaggaccatggtactcgcaaagcgataggaagccaccgaaggagagaattggatagcagagagtttgcgtgtggaagcagagatggggtccggcatgagccgcggccggcggcgcggtttcggcgcaggggcgtcgggagggatgctgccactgctggcgcttcaggttctgatcgagtacggccgcgcgggcgcctctcggccgcccgtgacggcggcgttgctcgccggcaacgcgctcatctatctccgtcccggggcgctcgacgggatcctgccctctgtcacacgcgtctccttcaatccgcggctcatcgtcgagaatggcgacttggtgcgcttcttcttgtcaccattctaccacttgagcgaaagccacctgttctacaatatgacatcgctcctatggaagggtattcagcttgaaacatccatgggtagtgtcgagttcgcttccatggttgctgcattgcttgggctgtcacagggcatcgcgctgctcttgtccaaaggcctactcttgcttggtgattatactgcgtactacgaccaatacgcggttgggttctctggtgttctgtttgccatgaaggttgtgctgaacgcctggtcagaagattttgtctatctgcatgggatggtcattccggcgaaatacgctgcctgggctgagttgatcctcatccaggtcttcattcctggcacatcttttcttggccatctcagtggaatacttgctggattggtttacctttggctgaagcgggcgttgaatgggccagatcccctcactcttctggtgtcaagcattaccaaagtcgtgacctggccagtaagatttgcgcagaatcttctatggtctgcccatccacagggacgctttagaggccggggcagggttgggcgccggcaatcagcaagagatactcctcgaggtctatggagatgcccagcctgcacctatgacaactcagtttccacagatatctgtgagatgtgcagcactgcacgagaggaccatgatttttcgctgaggcagtatcatcaggctggaggtactggagaactcacagttgatgagatacgccgaaggaggctgcaaagattcggtagatgatgtaaatccattgttatcagcacactttgtgcggcgctgaacgaagctctatatgagtatgtatgatagctccattcctctgctacatagcgtaggcatatttggttcttctcgtgatggagaatgctttacattattgaattgtttctcatttttgaaggagacagttactgatgtaattttaggtacttcaaagccatagaagtatagt

SEQ ID NO: 27399 - protein, 344 aa, Zea mays subsp. mays
  peptide (1)..(344): Ceres Seq. ID no. 12409362
  misc_feature (284)..(312): Pfam Name: Pfam Description:  Zn-finger in Ran binding protein and others
  misc_feature (1)..(344): NCBI GI NO: 34902516 NR Description: P0581F09.16
  misc_feature (13)..(342): NCBI GI NO: 9294149 NR Description: gene_id:MKP6.17~unknown protein
  misc_feature (13)..(342): NCBI GI NO: 30684602 NR Description: expressed protein [Arabidopsis thaliana]
  misc_feature (35)..(193): NCBI GI NO: 18419592 NR Description: unknown [Narcissus pseudonarcissus]
  misc_feature (16)..(223): NCBI GI NO: 33300639 NR Description: hypothetical protein DKFZp547E052 [Homo sapiens]
  misc_feature (5)..(223): NCBI GI NO: 16041108 NR Description: hypothetical protein [Macaca fascicularis]
  misc_feature (16)..(223): NCBI GI NO: 26325686 NR Description: unnamed protein product [Mus musculus]
  misc_feature (16)..(223): NCBI GI NO: 34876979 NR Description: hypothetical protein XP_237331 [Rattus norvegicus]
  misc_feature (41)..(260): NCBI GI NO: 11357444 NR Description: hypothetical protein F14P22
  misc_feature (41)..(223): NCBI GI NO: 18410961 NR Description: putative protein; protein id: At3g58460
MGSGMSRGRRRGFGAGASGGMLPLLALQVLIEYGRAGASRPPVTAALLAGNALIYLRPGALDGILPSVTRVSFNPRLIVENGDLVRFFLSPFYHLSESHLFYNMTSLLWKGIQLETSMGSVEFASMVAALLGLSQGIALLLSKGLLLLGDYTAYYDQYAVGFSGVLFAMKVVLNAWSEDFVYLHGMVIPAKYAAWAELILIQVFIPGTSFLGHLSGILAGLVYLWLKRALNGPDPLTLLVSSITKVVTWPVRFAQNLLWSAHPQGRFRGRGRVGRRQSARDTPRGLWRCPACTYDNSVSTDICEMCSTAREDHDFSLRQYHQAGGTGELTVDEIRRRRLQRFGR

SEQ ID NO: 27400 - protein, 340 aa, Zea mays subsp. mays
  peptide (1)..(340): Ceres Seq. ID no. 12409363
  misc_feature (280)..(308): Pfam Name: Pfam Description:  Zn-finger in Ran binding protein and others
  misc_feature (1)..(340): NCBI GI NO: 34902516 NR Description: P0581F09.16
  misc_feature (9)..(338): NCBI GI NO: 9294149 NR Description: gene_id:MKP6.17~unknown protein
  misc_feature (9)..(338): NCBI GI NO: 30684602 NR Description: expressed protein [Arabidopsis thaliana]
  misc_feature (31)..(189): NCBI GI NO: 18419592 NR Description: unknown [Narcissus pseudonarcissus]
  misc_feature (12)..(219): NCBI GI NO: 33300639 NR Description: hypothetical protein DKFZp547E052 [Homo sapiens]
  misc_feature (1)..(219): NCBI GI NO: 16041108 NR Description: hypothetical protein [Macaca fascicularis]
  misc_feature (12)..(219): NCBI GI NO: 26325686 NR Description: unnamed protein product [Mus musculus]
  misc_feature (12)..(219): NCBI GI NO: 34876979 NR Description: hypothetical protein XP_237331 [Rattus norvegicus]
  misc_feature (37)..(256): NCBI GI NO: 11357444 NR Description: hypothetical protein F14P22
  misc_feature (37)..(219): NCBI GI NO: 18410961 NR Description: putative protein; protein id: At3g58460
MSRGRRRGFGAGASGGMLPLLALQVLIEYGRAGASRPPVTAALLAGNALIYLRPGALDGILPSVTRVSFNPRLIVENGDLVRFFLSPFYHLSESHLFYNMTSLLWKGIQLETSMGSVEFASMVAALLGLSQGIALLLSKGLLLLGDYTAYYDQYAVGFSGVLFAMKVVLNAWSEDFVYLHGMVIPAKYAAWAELILIQVFIPGTSFLGHLSGILAGLVYLWLKRALNGPDPLTLLVSSITKVVTWPVRFAQNLLWSAHPQGRFRGRGRVGRRQSARDTPRGLWRCPACTYDNSVSTDICEMCSTAREDHDFSLRQYHQAGGTGELTVDEIRRRRLQRFGR

SEQ ID NO: 27401 - protein, 324 aa, Zea mays subsp. mays
  peptide (1)..(324): Ceres Seq. ID no. 12409364
  misc_feature (264)..(292): Pfam Name: Pfam Description:  Zn-finger in Ran binding protein and others
  misc_feature (1)..(324): NCBI GI NO: 34902516 NR Description: P0581F09.16
  misc_feature (1)..(322): NCBI GI NO: 9294149 NR Description: gene_id:MKP6.17~unknown protein
  misc_feature (1)..(322): NCBI GI NO: 30684602 NR Description: expressed protein [Arabidopsis thaliana]
  misc_feature (15)..(173): NCBI GI NO: 18419592 NR Description: unknown [Narcissus pseudonarcissus]
  misc_feature (1)..(203): NCBI GI NO: 33300639 NR Description: hypothetical protein DKFZp547E052 [Homo sapiens]
  misc_feature (1)..(203): NCBI GI NO: 16041108 NR Description: hypothetical protein [Macaca fascicularis]
  misc_feature (1)..(203): NCBI GI NO: 26325686 NR Description: unnamed protein product [Mus musculus]
  misc_feature (1)..(203): NCBI GI NO: 34876979 NR Description: hypothetical protein XP_237331 [Rattus norvegicus]
  misc_feature (21)..(240): NCBI GI NO: 11357444 NR Description: hypothetical protein F14P22
  misc_feature (21)..(203): NCBI GI NO: 18410961 NR Description: putative protein; protein id: At3g58460
MLPLLALQVLIEYGRAGASRPPVTAALLAGNALIYLRPGALDGILPSVTRVSFNPRLIVENGDLVRFFLSPFYHLSESHLFYNMTSLLWKGIQLETSMGSVEFASMVAALLGLSQGIALLLSKGLLLLGDYTAYYDQYAVGFSGVLFAMKVVLNAWSEDFVYLHGMVIPAKYAAWAELILIQVFIPGTSFLGHLSGILAGLVYLWLKRALNGPDPLTLLVSSITKVVTWPVRFAQNLLWSAHPQGRFRGRGRVGRRQSARDTPRGLWRCPACTYDNSVSTDICEMCSTAREDHDFSLRQYHQAGGTGELTVDEIRRRRLQRFGR

SEQ ID NO: 27402 - DNA, 770 bp, Zea mays subsp. mays
  misc_feature (1)..(770): Ceres Seq. ID no. 12343798
gcgcttcagcagcagcggcttccactgtagtcccaagccggcgtgaccattccaaatcttccgcacccatctctcgccgcctcgcctgcaccggagactggccctagtgcccgcgcgcctgcgaggtatcgaacacccaaagatggcaatggcaaccttcacatcatccccagttctctgcagcttcaggaccatcgaacagaagaaggcccctctgctgaacaacagcacaaaacggccgcttcacttgggcttcccaaggagcgtgccgacgtcgccgagcttgagagagaggctagacctgcgcgtcgccgctgtctacaaggtgaagctcctcggccccgaagggcaggagagcgtgctcgacgtgccagaggacagctacatcctggacgcggccgaggaggccggtctcgacctgccctactcctgccgcgccggcgcgtgctccacgtgcgccggcaagctcctggagggctccgtcgaccaggcagaccagtcgttcctcgacgaggcgcaggtcggtgccgggtacgcgctcacctgcgtcgcgtacccgacgtctgactgcgtcatccagacgcacagggaggaagacttgtactagcccgggccggtccccgggcatggatcaacccagggccggccctgagggtgtgcagggtatgccaccgctcagggcccccaatatcagtagggccccgtatgtctagataatgtccaaatacatatatgttacaggtaaatctatattctcgtttttttgttgt

SEQ ID NO: 27403 - protein, 154 aa, Zea mays subsp. mays
  peptide (1)..(154): Ceres Seq. ID no. 12343799
  misc_feature (62)..(141): Pfam Name: Pfam Description:  2Fe-2S iron-sulfur cluster binding domain
  misc_feature (3)..(154): NCBI GI NO: 38346336 NR Description: OSJNBa0073L04.7
  misc_feature (1)..(154): NCBI GI NO: 119958 NR Description: Ferredoxin III, chloroplast precursor (Fd III)
  misc_feature (1)..(154): NCBI GI NO: 40714664 NR Description: putative ferredoxin
  misc_feature (3)..(153): NCBI GI NO: 2129915 NR Description: ferredoxin
  misc_feature (3)..(154): NCBI GI NO: 7430754 NR Description: ferredoxin [2Fe-2S], root - rice
  misc_feature (58)..(154): NCBI GI NO: 65771 NR Description: ferredoxin [2Fe-2S] - Fischerella sp
  misc_feature (58)..(154): NCBI GI NO: 3334451 NR Description: Ferredoxin
  misc_feature (58)..(154): NCBI GI NO: 119917 NR Description: Ferredoxin I
  misc_feature (58)..(154): NCBI GI NO: 120035 NR Description: Ferredoxin
  misc_feature (58)..(154): NCBI GI NO: 16331399 NR Description: ferredoxin [Synechocystis sp. PCC 6803]
MAMATFTSSPVLCSFRTIEQKKAPLLNNSTKRPLHLGFPRSVPTSPSLRERLDLRVAAVYKVKLLGPEGQESVLDVPEDSYILDAAEEAGLDLPYSCRAGACSTCAGKLLEGSVDQADQSFLDEAQVGAGYALTCVAYPTSDCVIQTHREEDLY

SEQ ID NO: 27404 - protein, 152 aa, Zea mays subsp. mays
  peptide (1)..(152): Ceres Seq. ID no. 12343800
  misc_feature (60)..(139): Pfam Name: Pfam Description:  2Fe-2S iron-sulfur cluster binding domain
  misc_feature (1)..(152): NCBI GI NO: 38346336 NR Description: OSJNBa0073L04.7
  misc_feature (1)..(152): NCBI GI NO: 119958 NR Description: Ferredoxin III, chloroplast precursor (Fd III)
  misc_feature (1)..(152): NCBI GI NO: 40714664 NR Description: putative ferredoxin
  misc_feature (1)..(151): NCBI GI NO: 2129915 NR Description: ferredoxin
  misc_feature (1)..(152): NCBI GI NO: 7430754 NR Description: ferredoxin [2Fe-2S], root - rice
  misc_feature (56)..(152): NCBI GI NO: 65771 NR Description: ferredoxin [2Fe-2S] - Fischerella sp
  misc_feature (56)..(152): NCBI GI NO: 3334451 NR Description: Ferredoxin
  misc_feature (56)..(152): NCBI GI NO: 119917 NR Description: Ferredoxin I
  misc_feature (56)..(152): NCBI GI NO: 120035 NR Description: Ferredoxin
  misc_feature (56)..(152): NCBI GI NO: 16331399 NR Description: ferredoxin [Synechocystis sp. PCC 6803]
MATFTSSPVLCSFRTIEQKKAPLLNNSTKRPLHLGFPRSVPTSPSLRERLDLRVAAVYKVKLLGPEGQESVLDVPEDSYILDAAEEAGLDLPYSCRAGACSTCAGKLLEGSVDQADQSFLDEAQVGAGYALTCVAYPTSDCVIQTHREEDLY

SEQ ID NO: 27405 - DNA, 1264 bp, Zea mays subsp. mays
  misc_feature (1)..(1264): Ceres Seq. ID no. 12409354
aattagttcctcgatcgattatcaccagcatctcacttcgttcagatatatatagcaagtctaagtcttagtttttgcttttggaacatctctctaatttcacgattgagcgtacgtgcgcacaaacaaacaaacaaacaaacaatatatgggttcttccaatgatgtcacggcgattcctctaatcgatgttgccccacttgtcaaaaagattgatgatccagacatggcaaatgataaggatttgctacgagttgttctaacgttggactatgcttgcaaggaggttggattcttttatgtgaaaggccacggcatttgtgagatgctaatgagggaagtgagggatgtgtcacacaaattctttcagcttccacatgaggaaaagatgaagattaagatgacacgtcaaagtgggtatagagggtatcaaaagctaggagagaatgttaccaaggaaaaacgtgatatgcacgaagcagtcaattgcttgactcctattgcacctggcaaatacggagaccttggtaaaacacttgaaggagacaatctgtggcctgaatacccatcaaatttgaaggtagtgctggaaaactatatcagccttgtcaaagatctgtcaaggaagatcatgcgaggtatagctttggcattgggtgggcctgctgatgcctttgaaaggggaatagcaggagatccttactgggctctcaggctggttagctaccctgtttcaagcagtgatgagaaacgcactgatgatactgggatgatgggatcgcacacagactacggacttgttacactggttaaccaggatgatgacatttgtgcccttgaggtccaaaatcgttccggtgtgtggatacgtgccaacccgattcctgaaacctttctttgcaacatcggtgacatgctccaggtctggtcaaatggaatttaccaacccacagttcatagagtcatcaacagctcccatcaacgccgcgtttctgctgtgtttttctatgagaccgattttgatgctgccgtagagcccgttgagttgtgcgtggagaaaacaggcggcgtcgccaagtatgacaaggtcgtgtatggggagcgtctggttcggaaggccttctgctgctttggccatttatagggctggagaataagttatattgctactgtgaaaacaaagggcatactatatgcattgcacacacaatgatctgttgttaaacctatgtgatatatattgtgaaataaaggaacacttatt

SEQ ID NO: 27406 - protein, 331 aa, Zea mays subsp. mays
  peptide (1)..(331): Ceres Seq. ID no. 12409355
  misc_feature (184)..(288): Pfam Name: II Pfam Description: 2OG-Fe
  misc_feature (4)..(329): NCBI GI NO: 6984228 NR Description: putative flavonol synthase-like protein
  misc_feature (4)..(323): NCBI GI NO: 18409039 NR Description: flavonol synthase - like protein
  misc_feature (4)..(323): NCBI GI NO: 21554579 NR Description: flavonol synthase-like protein
  misc_feature (10)..(331): NCBI GI NO: 11255891 NR Description: hypothetical protein T9C5
  misc_feature (10)..(331): NCBI GI NO: 19423910 NR Description: unknown protein [Arabidopsis thaliana]
  misc_feature (10)..(331): NCBI GI NO: 22331716 NR Description: oxidoreductase
  misc_feature (13)..(331): NCBI GI NO: 15229181 NR Description: putative protein; protein id: At3g49630.1
  misc_feature (4)..(323): NCBI GI NO: 11255902 NR Description: flavonol synthase-like protein
  misc_feature (6)..(300): NCBI GI NO: 23130050 NR Description: hypothetical protein [Nostoc punctiforme]
  misc_feature (9)..(299): NCBI GI NO: 15599386 NR Description: probable iron/ascorbate oxidoreductase
MGSSNDVTAIPLIDVAPLVKKIDDPDMANDKDLLRVVLTLDYACKEVGFFYVKGHGICEMLMREVRDVSHKFFQLPHEEKMKIKMTRQSGYRGYQKLGENVTKEKRDMHEAVNCLTPIAPGKYGDLGKTLEGDNLWPEYPSNLKVVLENYISLVKDLSRKIMRGIALALGGPADAFERGIAGDPYWALRLVSYPVSSSDEKRTDDTGMMGSHTDYGLVTLVNQDDDICALEVQNRSGVWIRANPIPETFLCNIGDMLQVWSNGIYQPTVHRVINSSHQRRVSAVFFYETDFDAAVEPVELCVEKTGGVAKYDKVVYGERLVRKAFCCFGHL

SEQ ID NO: 27407 - protein, 305 aa, Zea mays subsp. mays
  peptide (1)..(305): Ceres Seq. ID no. 12409356
  misc_feature (158)..(262): Pfam Name: II Pfam Description: 2OG-Fe
  misc_feature (1)..(303): NCBI GI NO: 6984228 NR Description: putative flavonol synthase-like protein
  misc_feature (1)..(297): NCBI GI NO: 18409039 NR Description: flavonol synthase - like protein
  misc_feature (1)..(297): NCBI GI NO: 21554579 NR Description: flavonol synthase-like protein
  misc_feature (1)..(305): NCBI GI NO: 11255891 NR Description: hypothetical protein T9C5
  misc_feature (1)..(305): NCBI GI NO: 22331716 NR Description: oxidoreductase
  misc_feature (1)..(305): NCBI GI NO: 19423910 NR Description: unknown protein [Arabidopsis thaliana]
  misc_feature (1)..(305): NCBI GI NO: 15229181 NR Description: putative protein; protein id: At3g49630.1
  misc_feature (1)..(297): NCBI GI NO: 11255902 NR Description: flavonol synthase-like protein
  misc_feature (1)..(274): NCBI GI NO: 23130050 NR Description: hypothetical protein [Nostoc punctiforme]
  misc_feature (1)..(273): NCBI GI NO: 15599386 NR Description: probable iron/ascorbate oxidoreductase
MANDKDLLRVVLTLDYACKEVGFFYVKGHGICEMLMREVRDVSHKFFQLPHEEKMKIKMTRQSGYRGYQKLGENVTKEKRDMHEAVNCLTPIAPGKYGDLGKTLEGDNLWPEYPSNLKVVLENYISLVKDLSRKIMRGIALALGGPADAFERGIAGDPYWALRLVSYPVSSSDEKRTDDTGMMGSHTDYGLVTLVNQDDDICALEVQNRSGVWIRANPIPETFLCNIGDMLQVWSNGIYQPTVHRVINSSHQRRVSAVFFYETDFDAAVEPVELCVEKTGGVAKYDKVVYGERLVRKAFCCFGHL

SEQ ID NO: 27408 - protein, 272 aa, Zea mays subsp. mays
  peptide (1)..(272): Ceres Seq. ID no. 12409357
  misc_feature (125)..(229): Pfam Name: II Pfam Description: 2OG-Fe
  misc_feature (1)..(270): NCBI GI NO: 6984228 NR Description: putative flavonol synthase-like protein
  misc_feature (1)..(264): NCBI GI NO: 18409039 NR Description: flavonol synthase - like protein
  misc_feature (1)..(264): NCBI GI NO: 21554579 NR Description: flavonol synthase-like protein
  misc_feature (1)..(272): NCBI GI NO: 11255891 NR Description: hypothetical protein T9C5
  misc_feature (1)..(272): NCBI GI NO: 19423910 NR Description: unknown protein [Arabidopsis thaliana]
  misc_feature (1)..(272): NCBI GI NO: 22331716 NR Description: oxidoreductase
  misc_feature (1)..(272): NCBI GI NO: 15229181 NR Description: putative protein; protein id: At3g49630.1
  misc_feature (1)..(264): NCBI GI NO: 11255902 NR Description: flavonol synthase-like protein
  misc_feature (1)..(241): NCBI GI NO: 23130050 NR Description: hypothetical protein [Nostoc punctiforme]
  misc_feature (1)..(240): NCBI GI NO: 15599386 NR Description: probable iron/ascorbate oxidoreductase
MLMREVRDVSHKFFQLPHEEKMKIKMTRQSGYRGYQKLGENVTKEKRDMHEAVNCLTPIAPGKYGDLGKTLEGDNLWPEYPSNLKVVLENYISLVKDLSRKIMRGIALALGGPADAFERGIAGDPYWALRLVSYPVSSSDEKRTDDTGMMGSHTDYGLVTLVNQDDDICALEVQNRSGVWIRANPIPETFLCNIGDMLQVWSNGIYQPTVHRVINSSHQRRVSAVFFYETDFDAAVEPVELCVEKTGGVAKYDKVVYGERLVRKAFCCFGHL

SEQ ID NO: 27409 - DNA, 1569 bp, Zea mays subsp. mays
  misc_feature (1)..(1569): Ceres Seq. ID no. 12365538
agggctctagcatccccaatcccatcggtcagcctcatccatccgcagggcgccggcggcgggagtcttgccggccacatcgtcgccgatttcaccgatccgagctccggcctcttagccatggaatctccacgaactctggaagccctcaccaacgacctcgtggtggagatattcctccggatcggctcccctgccgacctcgttcgcgcctccgccgcctgcgtcgccctctgccgtctcatcgccaacccctccttcttgcgccggtaccgctccgtccacccgccgctacttctcggcctcctcgacccttatggcgatatcgaacccaccgagacaccccatccctccgctgctctcgctggcgccgtcgctcgcgccgctgacctccgcttcggcgagtattttcctagcagcaagttatccggctattgtgtctctgacgtccgagacggtcatgtcctcctcaccatcacgccctaccttgaggacgacgaggatgagaagttggtgccagacctcgcggtgtgcgaccccctggcccgtgtatgcctgcgactgccccccataccagacgaccttctcgcctccgtccaggttcagcagcaagatctcgtacattatagttgcgatacattccttgtcccttcaggagatgaagaagatgtcacttcttttagagtgatcgtcatgatgagatctacacagatgctagtcgcttttatcttctcttcaaccactggtgattggagtgctggttcacctttcagcctgggttctctgagaataccatacgacaacattccgagttatgcttatggctgcttctactggaaagtcgagtctgagaacaggttgctcacgctcaacatgagcagtatggagttctcagtcgttgacctcccacctgggcccgataggagtttcgtcatcatggtggaggcaggcgaaagcaggcttgggatgtttagtctaattaaccatggtaccactctctgttatgccattaggcaaattgggagcgagaagtccaatcagttggagatggacagtgtgatccctttacctgagggttatatttactttcgcattcacggttcatatgaaggacacattctcatatttggatacgcgtttagtgaagacgcatgcttcgcacttgagatcaagactatgaagattgagagagtctgtcggaagtggcgtggtttctgtccttattttgtgttcctgccatccatgtcacaaaggaggatataatgtggactgaattcacatccaggtttggggcttcttccaatccattctgctggtgtggagttgagctaggtgatggcacaggccctcatgtagatgtagcacatctgcaacactgtcccatgttatcctcctagtctgtcgtattgtctagcttacattagtagctactgaaactttagttatatctatatttttaagttctcccgactgtaatttaagatgtgacaaaggcgtctttagtgtatcaagagccaacttttataagccggctctgtgtgctgcgaaatcacgtgtttgctagtctag

SEQ ID NO: 27410 - protein, 420 aa, Zea mays subsp. mays
  peptide (1)..(420): Ceres Seq. ID no. 12365539
  misc_feature (36)..(392): NCBI GI NO: 34393354 NR Description: hypothetical protein
  misc_feature (41)..(347): NCBI GI NO: 34393352 NR Description: hypothetical protein
  misc_feature (39)..(256): NCBI GI NO: 34393351 NR Description: hypothetical protein
  misc_feature (45)..(377): NCBI GI NO: 37530886 NR Description: hypothetical protein
  misc_feature (47)..(304): NCBI GI NO: 32480316 NR Description: OSJNBa0042D13.1
  misc_feature (44)..(399): NCBI GI NO: 37530888 NR Description: hypothetical protein
  misc_feature (40)..(356): NCBI GI NO: 34901902 NR Description: OSJNBa0036M16.17
  misc_feature (50)..(303): NCBI GI NO: 37530982 NR Description: unknown protein
RALASPIPSVSLIHPQGAGGGSLAGHIVADFTDPSSGLLAMESPRTLEALTNDLVVEIFLRIGSPADLVRASAACVALCRLIANPSFLRRYRSVHPPLLLGLLDPYGDIEPTETPHPSAALAGAVARAADLRFGEYFPSSKLSGYCVSDVRDGHVLLTITPYLEDDEDEKLVPDLAVCDPLARVCLRLPPIPDDLLASVQVQQQDLVHYSCDTFLVPSGDEEDVTSFRVIVMMRSTQMLVAFIFSSTTGDWSAGSPFSLGSLRIPYDNIPSYAYGCFYWKVESENRLLTLNMSSMEFSVVDLPPGPDRSFVIMVEAGESRLGMFSLINHGTTLCYAIRQIGSEKSNQLEMDSVIPLPEGYIYFRIHGSYEGHILIFGYAFSEDACFALEIKTMKIERVCRKWRGFCPYFVFLPSMSQRRI

SEQ ID NO: 27411 - protein, 380 aa, Zea mays subsp. mays
  peptide (1)..(380): Ceres Seq. ID no. 12365540
  misc_feature (1)..(352): NCBI GI NO: 34393354 NR Description: hypothetical protein
  misc_feature (1)..(307): NCBI GI NO: 34393352 NR Description: hypothetical protein
  misc_feature (1)..(216): NCBI GI NO: 34393351 NR Description: hypothetical protein
  misc_feature (5)..(337): NCBI GI NO: 37530886 NR Description: hypothetical protein
  misc_feature (7)..(264): NCBI GI NO: 32480316 NR Description: OSJNBa0042D13.1
  misc_feature (4)..(359): NCBI GI NO: 37530888 NR Description: hypothetical protein
  misc_feature (1)..(316): NCBI GI NO: 34901902 NR Description: OSJNBa0036M16.17
  misc_feature (10)..(263): NCBI GI NO: 37530982 NR Description: unknown protein
MESPRTLEALTNDLVVEIFLRIGSPADLVRASAACVALCRLIANPSFLRRYRSVHPPLLLGLLDPYGDIEPTETPHPSAALAGAVARAADLRFGEYFPSSKLSGYCVSDVRDGHVLLTITPYLEDDEDEKLVPDLAVCDPLARVCLRLPPIPDDLLASVQVQQQDLVHYSCDTFLVPSGDEEDVTSFRVIVMMRSTQMLVAFIFSSTTGDWSAGSPFSLGSLRIPYDNIPSYAYGCFYWKVESENRLLTLNMSSMEFSVVDLPPGPDRSFVIMVEAGESRLGMFSLINHGTTLCYAIRQIGSEKSNQLEMDSVIPLPEGYIYFRIHGSYEGHILIFGYAFSEDACFALEIKTMKIERVCRKWRGFCPYFVFLPSMSQRRI

SEQ ID NO: 27412 - DNA, 1328 bp, Zea mays subsp. mays
  misc_feature (1)..(1328): Ceres Seq. ID no. 12409352
aaaacccatctcgcccccactcgtatccgcagagtactaaacatcaccagggaaggaggttgcgagttgcgaccgggggccggccgacccagccaaagtacgctaccactcttgctgcaccgaccgcgagggtgcaacaacgacttacatatatataaatatccgcgccgcagctagctagctagctagcagagcagcccggccgaagccgtgtagcctagcctcctcacatatagcagcagcaggacgagatcgtcgatcgatcgatggtgtctctgcagccctcatcagcggcgccgctcctgccggaggccgccaccgcgaacaagctcccgccgtggctctccctcgtcggcagcgtcgtcgcctcctccaccggtaccgcggccaccagcaagaagcggaagcgggacggcagcggcggcggcggcgacgaggacgaccgtggcgaggtcgtggacgggatcgagctcaatttcgacgccgcgccgctgccccccgagtggcaacgctgcctcgacatcaagtcggggcagatccactactacaacacgaggacgcagaagcggacgtgcaaggaccccagggggcacgacgggcagccggactaccgcgccgaagaaggccaggaggaggaggaggactccgcgaattattgcgcgccgccagggctggacctggagctgaacctcacgttcgagccgcgccgcgtgctcgccgcccacgggaagacgacgaagagggccaagcagcagcccgcggaggaggaggaggaggccgaggacgacgacgacagcgacagcagcagtagcagtagggagatggtggctggcgtgtgcgtgcggtgccacatgctggtgatgatgtgccgcgccagcccggcgtgccccaactgcaagttcctgcacccacccagccgcgccacgccgcctccgccgccgctcaagctcggcctccagctgctctgctgcagggactagctagagaccaaagcgtcccaacgacccatggatgggctggctccccagcaggcatgcgtgcaccagtagaacgcgcgcacgtgtgtcgcacgcatgtgcaaggaagacacagcgtaatattcaatcagaggcaggatggtgtggtagctagctagaggagttgatcagtagtggcggcgcctatgcccgtggccgaccgatcggctgtgcgtgcgtacgtacgtacggttcgccaaggggtatatcgtgtcataatgttattactcatgtggcgatggatggatggtggtggtgtagatatcataaagtgcatgcatagcataaatgtagctcggaactttcggcgtt

SEQ ID NO: 27413 - protein, 237 aa, Zea mays subsp. mays
  peptide (1)..(237): Ceres Seq. ID no. 12409353
  misc_feature (154)..(216): NCBI GI NO: 15236641 NR Description: hypothetical protein; protein id: At4g08910.1
  misc_feature (172)..(234): NCBI GI NO: 25372722 NR Description: unknown protein T11I11.11
  misc_feature (172)..(234): NCBI GI NO: 30699311 NR Description: expressed protein [Arabidopsis thaliana]
  misc_feature (174)..(234): NCBI GI NO: 30687784 NR Description: expressed protein [Arabidopsis thaliana]
MVSLQPSSAAPLLPEAATANKLPPWLSLVGSVVASSTGTAATSKKRKRDGSGGGGDEDDRGEVVDGIELNFDAAPLPPEWQRCLDIKSGQIHYYNTRTQKRTCKDPRGHDGQPDYRAEEGQEEEEDSANYCAPPGLDLELNLTFEPRRVLAAHGKTTKRAKQQPAEEEEEAEDDDDSDSSSSSREMVAGVCVRCHMLVMMCRASPACPNCKFLHPPSRATPPPPPLKLGLQLLCCRD

SEQ ID NO: 27414 - DNA, 1627 bp, Zea mays subsp. mays
  misc_feature (1)..(1627): Ceres Seq. ID no. 12412663
cttcgtccattccgatcactcgctgctcccctctctcgccggagcgagccccgggccggatggcggcggcagcagcagctcctcccgcctccgcgatcgcgtgatggacgccgacgccgacgccgccgcgatccgccgatggacgacgccggaagggcaccaccacccgcgccagcggcggtgaccgtctccgccaccgccgcacccgcgcctaccccgccctccgccacggccgccgccgacaagtcctccctcgaccccgacgcgctttatgaagaggggatgtggcaacagatggccatgaacagcggtgccacaatgcaacctgggtcatatcctgagcgaccaggtgaaccggactgcacttactacctcaggactggattgtgtcgatttggcatgagctgcaggttcaatcatcctccggataggaatctggctattgcctctgccagaatgaagggagaatatcctgagagagtgggacagccagagtgtcagtattatctgaagaccggaacatgcaagtttggtcctacatgcaaatttcaccatcccagggaaaaggccggaattgcagggagggtgcagctaaacacattaggatatccacttctcccgaatgaaaaggagtgtgcgtattatttaaaaacaggacaatgtaaatatgcaaatacttgtaaattccaccacccagaacttttcaatgtggtgccttcgtcacgtggttcacctatttatacttctgtacattcctctgcaagcgctggtccacagtcatatactggaactatgtcaagctggacttttccacgagcttcttttataccaagccctaggtggcaaagtccttcaaattatgcaccaatggttgtacctcatggccttgtccaagtgccgagctggaattcatatcctggtcagctgcagtcacctggggctcaacaaacttatggaagttcacaacaaggcgaagctagtgcaggaaatcagggaatgctatcaccctatagatccagttcatttcctgtgcctcaatatgcgttgcagagagataatgtatttcctgagagacccgatgaaccagaatgccaatattacatgaagacaggagattgtaaatttggtgcagtgtgcaagttccatcatccccgtgtgagatcacagccccctccggattgtgtcttaagtccaatgggtcttccaatacgtccaggtgaagaactttgcaaattctattctcgttatggcatctgcaagttcggcgccaactgtaaatttgatcatcctacaatggctgctccaatgggagtttatgcatatggtttctctgggtctgcttctgtcgcacccgcttcaactaatgcacctatgacgcgacatcttcttggatctccatcaggttctggatatatgtcttaggtgtcttttttttcagttgacctactttgatgtataaaatccacggcatcgcctcaggcgctgtgaatgtttctcctaacttcccgccgggatgaagttctgtaaattgagttgctgctggagatgtacagcccccccccccccccccccctccccaattaatccagaactttgggaataactgttggaacctaataaacttcag

SEQ ID NO: 27415 - protein, 473 aa, Zea mays subsp. mays
  peptide (1)..(473): Ceres Seq. ID no. 12412664
  misc_feature (359)..(385): Pfam Name: and similar Pfam Description: Zinc finger C-x8-C-x5-C-x3-H type
  misc_feature (67)..(458): NCBI GI NO: 34906988 NR Description: putative zinc finger protein
  misc_feature (88)..(473): NCBI GI NO: 11288368 NR Description: zinc finger protein [imported] - garden pea
  misc_feature (78)..(462): NCBI GI NO: 18396338 NR Description: zinc finger protein 1 (zfn1); protein id:At3g02830
  misc_feature (78)..(462): NCBI GI NO: 11288371 NR Description: zinc finger protein 1
  misc_feature (95)..(462): NCBI GI NO: 6728979 NR Description: zinc finger protein 1 (zfn1)
  misc_feature (70)..(469): NCBI GI NO: 30690809 NR Description: expressed protein [Arabidopsis thaliana]
  misc_feature (111)..(469): NCBI GI NO: 25409067 NR Description: hypothetical protein At2g47850
  misc_feature (104)..(447): NCBI GI NO: 34902926 NR Description: putative zinc finger protein
  misc_feature (95)..(473): NCBI GI NO: 15230715 NR Description: hypothetical protein; protein id: At3g06410.1
  misc_feature (78)..(467): NCBI GI NO: 15238861 NR Description: zinc finger -like protein; protein id: At5g18550.1
LRPFRSLAAPLSRRSEPRAGWRRQQQLLPPPRSRDGRRRRRRRDPPMDDAGRAPPPAPAAVTVSATAAPAPTPPSATAAADKSSLDPDALYEEGMWQQMAMNSGATMQPGSYPERPGEPDCTYYLRTGLCRFGMSCRFNHPPDRNLAIASARMKGEYPERVGQPECQYYLKTGTCKFGPTCKFHHPREKAGIAGRVQLNTLGYPLLPNEKECAYYLKTGQCKYANTCKFHHPELFNVVPSSRGSPIYTSVHSSASAGPQSYTGTMSSWTFPRASFIPSPRWQSPSNYAPMVVPHGLVQVPSWNSYPGQLQSPGAQQTYGSSQQGEASAGNQGMLSPYRSSSFPVPQYALQRDNVFPERPDEPECQYYMKTGDCKFGAVCKFHHPRVRSQPPPDCVLSPMGLPIRPGEELCKFYSRYGICKFGANCKFDHPTMAAPMGVYAYGFSGSASVAPASTNAPMTRHLLGSPSGSGYMS

SEQ ID NO: 27416 - protein, 427 aa, Zea mays subsp. mays
  peptide (1)..(427): Ceres Seq. ID no. 12412665
  misc_feature (313)..(339): Pfam Name: and similar Pfam Description: Zinc finger C-x8-C-x5-C-x3-H type
  misc_feature (21)..(412): NCBI GI NO: 34906988 NR Description: putative zinc finger protein
  misc_feature (42)..(427): NCBI GI NO: 11288368 NR Description: zinc finger protein [imported] - garden pea
  misc_feature (32)..(416): NCBI GI NO: 18396338 NR Description: zinc finger protein 1 (zfn1); protein id:At3g02830
  misc_feature (32)..(416): NCBI GI NO: 11288371 NR Description: zinc finger protein 1
  misc_feature (49)..(416): NCBI GI NO: 6728979 NR Description: zinc finger protein 1 (zfn1)
  misc_feature (24)..(423): NCBI GI NO: 30690809 NR Description: expressed protein [Arabidopsis thaliana]
  misc_feature (65)..(423): NCBI GI NO: 25409067 NR Description: hypothetical protein At2g47850
  misc_feature (58)..(401): NCBI GI NO: 34902926 NR Description: putative zinc finger protein
  misc_feature (49)..(427): NCBI GI NO: 15230715 NR Description: hypothetical protein; protein id: At3g06410.1
  misc_feature (32)..(421): NCBI GI NO: 15238861 NR Description: zinc finger -like protein; protein id: At5g18550.1
MDDAGRAPPPAPAAVTVSATAAPAPTPPSATAAADKSSLDPDALYEEGMWQQMAMNSGATMQPGSYPERPGEPDCTYYLRTGLCRFGMSCRFNHPPDRNLAIASARMKGEYPERVGQPECQYYLKTGTCKFGPTCKFHHPREKAGIAGRVQLNTLGYPLLPNEKECAYYLKTGQCKYANTCKFHHPELFNVVPSSRGSPIYTSVHSSASAGPQSYTGTMSSWTFPRASFIPSPRWQSPSNYAPMVVPHGLVQVPSWNSYPGQLQSPGAQQTYGSSQQGEASAGNQGMLSPYRSSSFPVPQYALQRDNVFPERPDEPECQYYMKTGDCKFGAVCKFHHPRVRSQPPPDCVLSPMGLPIRPGEELCKFYSRYGICKFGANCKFDHPTMAAPMGVYAYGFSGSASVAPASTNAPMTRHLLGSPSGSGYMS

SEQ ID NO: 27417 - protein, 379 aa, Zea mays subsp. mays
  peptide (1)..(379): Ceres Seq. ID no. 12412666
  misc_feature (265)..(291): Pfam Name: and similar Pfam Description: Zinc finger C-x8-C-x5-C-x3-H type
  misc_feature (1)..(364): NCBI GI NO: 34906988 NR Description: putative zinc finger protein
  misc_feature (1)..(379): NCBI GI NO: 11288368 NR Description: zinc finger protein [imported] - garden pea
  misc_feature (1)..(368): NCBI GI NO: 18396338 NR Description: zinc finger protein 1 (zfn1); protein id:At3g02830
  misc_feature (1)..(368): NCBI GI NO: 11288371 NR Description: zinc finger protein 1
  misc_feature (1)..(368): NCBI GI NO: 6728979 NR Description: zinc finger protein 1 (zfn1)
  misc_feature (1)..(375): NCBI GI NO: 30690809 NR Description: expressed protein [Arabidopsis thaliana]
  misc_feature (17)..(375): NCBI GI NO: 25409067 NR Description: hypothetical protein At2g47850
  misc_feature (10)..(353): NCBI GI NO: 34902926 NR Description: putative zinc finger protein
  misc_feature (1)..(379): NCBI GI NO: 15230715 NR Description: hypothetical protein; protein id: At3g06410.1
  misc_feature (1)..(373): NCBI GI NO: 15238861 NR Description: zinc finger -like protein; protein id: At5g18550.1
MWQQMAMNSGATMQPGSYPERPGEPDCTYYLRTGLCRFGMSCRFNHPPDRNLAIASARMKGEYPERVGQPECQYYLKTGTCKFGPTCKFHHPREKAGIAGRVQLNTLGYPLLPNEKECAYYLKTGQCKYANTCKFHHPELFNVVPSSRGSPIYTSVHSSASAGPQSYTGTMSSWTFPRASFIPSPRWQSPSNYAPMVVPHGLVQVPSWNSYPGQLQSPGAQQTYGSSQQGEASAGNQGMLSPYRSSSFPVPQYALQRDNVFPERPDEPECQYYMKTGDCKFGAVCKFHHPRVRSQPPPDCVLSPMGLPIRPGEELCKFYSRYGICKFGANCKFDHPTMAAPMGVYAYGFSGSASVAPASTNAPMTRHLLGSPSGSGYMS

SEQ ID NO: 27418 - DNA, 1628 bp, Zea mays subsp. mays
  misc_feature (1)..(1628): Ceres Seq. ID no. 13636255
actagctgctctggctcccccgaggcaatcgagtaatcgacgaaggccaccaccacctccacaccactttgcctcgagaaggttccaccaagcctctcggctagggtttggggactttgggggcgatcgcaatggagggacgcggcgcggaacaagcacccgaggcggcggcggaggtgaaaaatccgaggtgcttcatggacgtcaccatcggcggcgagatggaggggaggatcgttgtagagctctacgcttccgtggtaccgcggacggcggagaacttccgcgcgctctgcacaggggagaaaggcatcggcgccgccagcgggcaagccgcttcactttaagggctcatgcttccaccgtgttattaaagggtttatgattcaagggggagacacaactgctggagacggaactgggggatagtcaatttatgggtccaaatttgaggacgagaattttgttttaaagcatgagaggaaaggaatgctttcaatggctaattctggtcccaacacaaatggttctcagtttttcatcactactacacggacacctcatttagacgggaaacatgttgtttttggtagagtgatgaaaggaatgggggtagttcgctctattgagcatgtttctgtcggagaagctgactgccccactcttgaagttaaaattgttgattgtggggagcttcctgaaggtgctgatgatggagttgtaaactttttcaaagatggtgatacgtacccagattggcccaatgatcttgaagagaagcctgctgaggtttcatggtggatggatgctgtggagtctgctaaagcttatgggaatgacaatttcaagaaacaggactacaaggcagctctcagaaagtacaggaaagctctgcgctacttggatctttgctgggagaaagaagagatagatgaagataagagcacagcactgcggaagaccaagtcaataatactcactaatagctccgcatgcaaattaaagttaggagattcaagtggggctttattagacgcagattttgcactgcgtgaaagggagggaaatgctaaagcttttttccgacaaggacaggcacacattgcacttaatgacattgatgcagccgtggagagctttaaacaggcattggagttggagccaaatgatgctggaatcaaaagagagctggctgctgcaaagaagaagattgctgacagaagagatcaggagcggaaggcatttgctaggattttccaatcttctggaaagtctgacaagagcaacgaagagaataattgatctacagttcctttcccccgtctgaaactttgcttagcttaaatctggggcacattggaacaggagtctcatgggagtctgctctgcaaaaaaacgcagattactgatctttagatagaaggaaacatagtggggggaaaggaagcttttgttttcttgtactacagaagtagcaattcgtgcttttgtcccggtcttagtttattcaggaaacggacattgaatttaaatgtgcaatttttagacccaacctgacgattcacatcttttgtgggtagttcgcccgtttcactttcgtggtgttttcttgtagccttttgtctgct

SEQ ID NO: 27419 - protein, 270 aa, Zea mays subsp. mays
  peptide (1)..(270): Ceres Seq. ID no. 13636256
  misc_feature (108)..(141): Pfam Name: Pfam Description:  TPR Domain
  misc_feature (1)..(256): NCBI GI NO: 18397936 NR Description: cyclophilin-40 [Arabidopsis thaliana]
  misc_feature (1)..(244): NCBI GI NO: 25411671 NR Description: hypothetical protein At2g15790
  misc_feature (1)..(256): NCBI GI NO: 34857103 NR Description: similar to peptidylprolyl isomerase D
  misc_feature (1)..(256): NCBI GI NO: 13385854 NR Description: peptidylprolyl isomerase D (cyclophilin D)
  misc_feature (1)..(256): NCBI GI NO: 27806463 NR Description: peptidylprolyl isomerase D (cyclophilin D)
  misc_feature (1)..(256): NCBI GI NO: 27687349 NR Description: similar to peptidylprolyl isomerase D
  misc_feature (1)..(256): NCBI GI NO: 4826932 NR Description: peptidylprolyl isomerase D (cyclophilin D); hCyP40
  misc_feature (1)..(256): NCBI GI NO: 38174405 NR Description: Unknown (protein for MGC:75854)
  misc_feature (1)..(256): NCBI GI NO: 32405118 NR Description: hypothetical protein
  misc_feature (1)..(258): NCBI GI NO: 40741736 NR Description: hypothetical protein AN4583.2
MLSMANSGPNTNGSQFFITTTRTPHLDGKHVVFGRVMKGMGVVRSIEHVSVGEADCPTLEVKIVDCGELPEGADDGVVNFFKDGDTYPDWPNDLEEKPAEVSWWMDAVESAKAYGNDNFKKQDYKAALRKYRKALRYLDLCWEKEEIDEDKSTALRKTKSIILTNSSACKLKLGDSSGALLDADFALREREGNAKAFFRQGQAHIALNDIDAAVESFKQALELEPNDAGIKRELAAAKKKIADRRDQERKAFARIFQSSGKSDKSNEENN

SEQ ID NO: 27420 - protein, 267 aa, Zea mays subsp. mays
  peptide (1)..(267): Ceres Seq. ID no. 13636257
  misc_feature (105)..(138): Pfam Name: Pfam Description:  TPR Domain
  misc_feature (1)..(253): NCBI GI NO: 18397936 NR Description: cyclophilin-40 [Arabidopsis thaliana]
  misc_feature (1)..(241): NCBI GI NO: 25411671 NR Description: hypothetical protein At2g15790
  misc_feature (1)..(253): NCBI GI NO: 34857103 NR Description: similar to peptidylprolyl isomerase D
  misc_feature (1)..(253): NCBI GI NO: 13385854 NR Description: peptidylprolyl isomerase D (cyclophilin D)
  misc_feature (1)..(253): NCBI GI NO: 27806463 NR Description: peptidylprolyl isomerase D (cyclophilin D)
  misc_feature (1)..(253): NCBI GI NO: 27687349 NR Description: similar to peptidylprolyl isomerase D
  misc_feature (1)..(253): NCBI GI NO: 4826932 NR Description: peptidylprolyl isomerase D (cyclophilin D); hCyP40
  misc_feature (1)..(253): NCBI GI NO: 38174405 NR Description: Unknown (protein for MGC:75854)
  misc_feature (1)..(253): NCBI GI NO: 32405118 NR Description: hypothetical protein
  misc_feature (1)..(255): NCBI GI NO: 40741736 NR Description: hypothetical protein AN4583.2
MANSGPNTNGSQFFITTTRTPHLDGKHVVFGRVMKGMGVVRSIEHVSVGEADCPTLEVKIVDCGELPEGADDGVVNFFKDGDTYPDWPNDLEEKPAEVSWWMDAVESAKAYGNDNFKKQDYKAALRKYRKALRYLDLCWEKEEIDEDKSTALRKTKSIILTNSSACKLKLGDSSGALLDADFALREREGNAKAFFRQGQAHIALNDIDAAVESFKQALELEPNDAGIKRELAAAKKKIADRRDQERKAFARIFQSSGKSDKSNEENN

SEQ ID NO: 27421 - protein, 234 aa, Zea mays subsp. mays
  peptide (1)..(234): Ceres Seq. ID no. 13636258
  misc_feature (72)..(105): Pfam Name: Pfam Description:  TPR Domain
  misc_feature (1)..(220): NCBI GI NO: 18397936 NR Description: cyclophilin-40 [Arabidopsis thaliana]
  misc_feature (1)..(208): NCBI GI NO: 25411671 NR Description: hypothetical protein At2g15790
  misc_feature (1)..(220): NCBI GI NO: 34857103 NR Description: similar to peptidylprolyl isomerase D
  misc_feature (1)..(220): NCBI GI NO: 13385854 NR Description: peptidylprolyl isomerase D (cyclophilin D)
  misc_feature (1)..(220): NCBI GI NO: 27806463 NR Description: peptidylprolyl isomerase D (cyclophilin D)
  misc_feature (1)..(220): NCBI GI NO: 27687349 NR Description: similar to peptidylprolyl isomerase D
  misc_feature (1)..(220): NCBI GI NO: 4826932 NR Description: peptidylprolyl isomerase D (cyclophilin D); hCyP40
  misc_feature (1)..(220): NCBI GI NO: 38174405 NR Description: Unknown (protein for MGC:75854)
  misc_feature (1)..(220): NCBI GI NO: 32405118 NR Description: hypothetical protein
  misc_feature (1)..(222): NCBI GI NO: 40741736 NR Description: hypothetical protein AN4583.2
MKGMGVVRSIEHVSVGEADCPTLEVKIVDCGELPEGADDGVVNFFKDGDTYPDWPNDLEEKPAEVSWWMDAVESAKAYGNDNFKKQDYKAALRKYRKALRYLDLCWEKEEIDEDKSTALRKTKSIILTNSSACKLKLGDSSGALLDADFALREREGNAKAFFRQGQAHIALNDIDAAVESFKQALELEPNDAGIKRELAAAKKKIADRRDQERKAFARIFQSSGKSDKSNEENN

SEQ ID NO: 27422 - DNA, 1301 bp, Zea mays subsp. mays
  misc_feature (1)..(1301): Ceres Seq. ID no. 12382069
cagcttctggaaccttcctttcgctatacgacctgagttcgcttcaggcagccgccgctctctctctctcccgcgtccgtcccaccttcgcaagccagccacctccctgagaggcctgaccgtgatttcggcgtggcatccaaaggcggtcaagattcgagaggccggaggaaccaagcgtagggcctccgaccccacgtcgtcgtccgcgcgcgccgcccgccgccgcagggagatgggggccgattactacaaggtcctcggcgtcgaccgcggcgccagcgacgacgacctcaagaaggcctatcggaagctcgccatgcgatggcaccccgacaagaactccaccaataagaaggaggcagaaaccaagttcaaggagatctctgtggcatacgaggtccttagcgatcccaagaaacgtgcaatctatgatcagctaggggaagaagggctcaaggggcagccgcccccaggagcaggaggtcctggcacatctcccttcttccctggcggggctcattccaccgctcaccattttaacccgaggagcgcggacgatatatttaaagagttctttggatcccctggcatgggtggcatgagaacggaaccaggatttcaaaggtcaatgtttggcaacgatatcttctcttcgcgcttccgcgctgagggttccaccagtatgcagcagccattgcgcaaggcagctgcaattgagaatccacttccagtcggccttgcagatctctacaagggtgtgacaaaaaagatgaaaatctcaagagagactattgatgccagcgggagaatctcaaacacagaggatattctgacaatacaagtaaaggctggttggaagaagggaacaaggattacatttcctgacaagggaaatgaagctccaaatatgaaacctgctgatattgttttcatcattgatgagaagccccatgatgttttcactcgggagggaaatgatcttgtcgtgactgagaagatctcactggtggaagcactgactggctataccgcacgtgtcactacgcttgacgggcggagcctatcattgcacatcaactcaataatccatccaaagtacgaagaggtgatgcctggagagggcatgccagtgcccaaggaccccacaaagaagggaaatctgcggattaagttcaacataatgttcccctctaggctgacttctgatcagaaggccgggatcaagaggctattgggttcttaggccgccacctcaaatgacatcttctttatgatgaaagttgtttgtgaatattgcc

SEQ ID NO: 27423 - protein, 414 aa, Zea mays subsp. mays
  peptide (1)..(414): Ceres Seq. ID no. 12382070
  misc_feature (290)..(412): Pfam Name: Pfam Description:  DnaJ C terminal region
  misc_feature (79)..(414): NCBI GI NO: 34904486 NR Description: putative heat shock protein 40
  misc_feature (79)..(413): NCBI GI NO: 15225377 NR Description: putative heat shock protein; protein id:At2g20560
  misc_feature (79)..(414): NCBI GI NO: 6179940 NR Description: DnaJ-like protein [Nicotiana tabacum]
  misc_feature (79)..(413): NCBI GI NO: 15235310 NR Description: heat-shock protein; protein id: At4g28480
  misc_feature (79)..(412): NCBI GI NO: 15240968 NR Description: heat shock protein 40-like; protein id:At5g01390
  misc_feature (79)..(414): NCBI GI NO: 11863723 NR Description: DnaJ like protein [Lycopersicon esculentum]
  misc_feature (79)..(414): NCBI GI NO: 15231987 NR Description: putative heat shock protein; protein id:At3g08910
  misc_feature (79)..(414): NCBI GI NO: 21618097 NR Description: putative heat shock protein [Arabidopsis thaliana]
  misc_feature (79)..(413): NCBI GI NO: 15228294 NR Description: heat shock protein-like protein
  misc_feature (79)..(412): NCBI GI NO: 15239455 NR Description: heat-shock protein - like; protein id: At5g25530.1
SFWNLPFAIRPEFASGSRRSLSLPRPSHLRKPATSLRGLTVISAWHPKAVKIREAGGTKRRASDPTSSSARAARRRREMGADYYKVLGVDRGASDDDLKKAYRKLAMRWHPDKNSTNKKEAETKFKEISVAYEVLSDPKKRAIYDQLGEEGLKGQPPPGAGGPGTSPFFPGGAHSTAHHFNPRSADDIFKEFFGSPGMGGMRTEPGFQRSMFGNDIFSSRFRAEGSTSMQQPLRKAAAIENPLPVGLADLYKGVTKKMKISRETIDASGRISNTEDILTIQVKAGWKKGTRITFPDKGNEAPNMKPADIVFIIDEKPHDVFTREGNDLVVTEKISLVEALTGYTARVTTLDGRSLSLHINSIIHPKYEEVMPGEGMPVPKDPTKKGNLRIKFNIMFPSRLTSDQKAGIKRLLGS

SEQ ID NO: 27424 - protein, 336 aa, Zea mays subsp. mays
  peptide (1)..(336): Ceres Seq. ID no. 12382071
  misc_feature (212)..(334): Pfam Name: Pfam Description:  DnaJ C terminal region
  misc_feature (1)..(336): NCBI GI NO: 34904486 NR Description: putative heat shock protein 40
  misc_feature (1)..(335): NCBI GI NO: 15225377 NR Description: putative heat shock protein; protein id:At2g20560
  misc_feature (1)..(336): NCBI GI NO: 6179940 NR Description: DnaJ-like protein [Nicotiana tabacum]
  misc_feature (1)..(335): NCBI GI NO: 15235310 NR Description: heat-shock protein; protein id: At4g28480
  misc_feature (1)..(334): NCBI GI NO: 15240968 NR Description: heat shock protein 40-like; protein id:At5g01390
  misc_feature (1)..(336): NCBI GI NO: 11863723 NR Description: DnaJ like protein [Lycopersicon esculentum]
  misc_feature (1)..(336): NCBI GI NO: 15231987 NR Description: putative heat shock protein; protein id:At3g08910
  misc_feature (1)..(336): NCBI GI NO: 21618097 NR Description: putative heat shock protein [Arabidopsis thaliana]
  misc_feature (1)..(335): NCBI GI NO: 15228294 NR Description: heat shock protein-like protein
  misc_feature (1)..(334): NCBI GI NO: 15239455 NR Description: heat-shock protein - like; protein id: At5g25530.1
MGADYYKVLGVDRGASDDDLKKAYRKLAMRWHPDKNSTNKKEAETKFKEISVAYEVLSDPKKRAIYDQLGEEGLKGQPPPGAGGPGTSPFFPGGAHSTAHHFNPRSADDIFKEFFGSPGMGGMRTEPGFQRSMFGNDIFSSRFRAEGSTSMQQPLRKAAAIENPLPVGLADLYKGVTKKMKISRETIDASGRISNTEDILTIQVKAGWKKGTRITFPDKGNEAPNMKPADIVFIIDEKPHDVFTREGNDLVVTEKISLVEALTGYTARVTTLDGRSLSLHINSIIHPKYEEVMPGEGMPVPKDPTKKGNLRIKFNIMFPSRLTSDQKAGIKRLLGS

SEQ ID NO: 27425 - protein, 308 aa, Zea mays subsp. mays
  peptide (1)..(308): Ceres Seq. ID no. 12382072
  misc_feature (184)..(306): Pfam Name: Pfam Description:  DnaJ C terminal region
  misc_feature (1)..(308): NCBI GI NO: 34904486 NR Description: putative heat shock protein 40
  misc_feature (1)..(307): NCBI GI NO: 15225377 NR Description: putative heat shock protein; protein id:At2g20560
  misc_feature (1)..(308): NCBI GI NO: 6179940 NR Description: DnaJ-like protein [Nicotiana tabacum]
  misc_feature (1)..(307): NCBI GI NO: 15235310 NR Description: heat-shock protein; protein id: At4g28480
  misc_feature (1)..(306): NCBI GI NO: 15240968 NR Description: heat shock protein 40-like; protein id:At5g01390
  misc_feature (1)..(308): NCBI GI NO: 11863723 NR Description: DnaJ like protein [Lycopersicon esculentum]
  misc_feature (1)..(308): NCBI GI NO: 15231987 NR Description: putative heat shock protein; protein id:At3g08910
  misc_feature (1)..(308): NCBI GI NO: 21618097 NR Description: putative heat shock protein [Arabidopsis thaliana]
  misc_feature (1)..(307): NCBI GI NO: 15228294 NR Description: heat shock protein-like protein
  misc_feature (1)..(306): NCBI GI NO: 15239455 NR Description: heat-shock protein - like; protein id: At5g25530.1
MRWHPDKNSTNKKEAETKFKEISVAYEVLSDPKKRAIYDQLGEEGLKGQPPPGAGGPGTSPFFPGGAHSTAHHFNPRSADDIFKEFFGSPGMGGMRTEPGFQRSMFGNDIFSSRFRAEGSTSMQQPLRKAAAIENPLPVGLADLYKGVTKKMKISRETIDASGRISNTEDILTIQVKAGWKKGTRITFPDKGNEAPNMKPADIVFIIDEKPHDVFTREGNDLVVTEKISLVEALTGYTARVTTLDGRSLSLHINSIIHPKYEEVMPGEGMPVPKDPTKKGNLRIKFNIMFPSRLTSDQKAGIKRLLGS

SEQ ID NO: 27426 - DNA, 1516 bp, Zea mays subsp. mays
  misc_feature (1)..(1516): Ceres Seq. ID no. 13498727
  misc_feature (142)..(142): n is a, c, t, g, unknown, or other
aaacgccgcctactccgcgctcctccaaaccaaactgaaccctatcctagcacgagtgcacgacggtggcagcaggagatggtggggacggcggaaggcggcgcggagagggcggtgcggcggtgggtggacgccgccggcngggcgcctgcgtcctggacggcgggctggccacggagctcgaggccaacggcgccgacctcaacgacccgctctggagcgccaagtgcctcctctcctccccgcacctcatccgcaaggtccatatggactacctagaagccggggcgaacattataatcacagcatcgtatcaggctactatccaagggtttgaatcaaagggcttttcaaaagaacaaagtgaaaacttgttaacaaagagtgttcagattgcactggaagcccgtgagatgttcttgaaggaacatttggagaaatccactcctatacagcatcctattctggttgcagcagctctagggagttatggggcttatcttgctgatggctctgagtacagtggggattatggtgaagctggtacgaaagagttcctgaaggactttcatcggcggaggcttcaggttcttgctgaagcaggcccggatttgattgcttttgaaacgatccccaacaaattggaagctcaggcatatgttgaactccttgaggaatgtaacattaatatcccttcatggctttccttcaactcaaaagatggagtgcatgttgtgagtggtgattcgttaattgaatgcgctactattgctgacaagtgtgcaaaggttggtgcagtcgggataaattgcacacctccaagatttattcatggactgatactctccattcgaaaggtcacagacaagcctattctgatatatcccaacagtggtgaaagatatgatggtgaaaaaaaggagtgggtggaatccactggtgtgtcagatggtgattttgtttcgtacgtaaatgaatggtgcaaagatggggctgcgcttatcgggggctgctgcaggacaactccaaacactatcagggccatacacagaactcttaaccaaggctgccacaagcatcagttacctgtaggctgtagcatagatctgtgctccactcctaatgctctcctcccagcagtaccttgagctgtatccccgagattccttaaccagcgcgaaccaatatactgttgcgtgttctcctgcaaatgagatgttctgcacctatgtttgtaatgttgtatttctgggtttttaagctatccaacttggagatacaaccggtgaggaagcagcaacaataggtagttctacttctgagtgaggaaaaacaacttgcggctgagttaatgaagcttagtagctaccaccgttgtatgacagttgctcagagatgttatcttcattaagtgcttatattaccgctagttccctgtgaaatttgttaaaccattatatgtaagttttgtttgacaagactgcatctcctgaaactaagatcttagtttcctgct

SEQ ID NO: 27427 - protein, 293 aa, Zea mays subsp. mays
  peptide (1)..(293): Ceres Seq. ID no. 13498728
  misc_feature (1)..(266): Pfam Name: Pfam Description:  Homocysteine S-methyltransferase
  misc_feature (1)..(275): NCBI GI NO: 10732789 NR Description: homocysteine S-methyltransferase-3 [Zea mays]
  misc_feature (1)..(274): NCBI GI NO: 10732787 NR Description: homocysteine S-methyltransferase-2 [Zea mays]
  misc_feature (1)..(265): NCBI GI NO: 37534456 NR Description: putative homocysteine S-methyltransferase-2
  misc_feature (1)..(264): NCBI GI NO: 15229396 NR Description: homocysteine S-methyltransferase AtHMT-2
  misc_feature (1)..(264): NCBI GI NO: 25453566 NR Description: homocysteine S-methyltransferase (EC 2
  misc_feature (1)..(266): NCBI GI NO: 10732791 NR Description: homocysteine S-methyltransferase-4 [Zea mays]
  misc_feature (1)..(267): NCBI GI NO: 6094303 NR Description: Selenocysteine methyltransferase
  misc_feature (1)..(265): NCBI GI NO: 18403505 NR Description: selenocysteine methyltransferase -related
  misc_feature (1)..(265): NCBI GI NO: 21593147 NR Description: putative selenocysteine methyltransferase
  misc_feature (1)..(138): NCBI GI NO: 34909958 NR Description: putative homocysteine S-methyltransferase-4
MDYLEAGANIIITASYQATIQGFESKGFSKEQSENLLTKSVQIALEAREMFLKEHLEKSTPIQHPILVAAALGSYGAYLADGSEYSGDYGEAGTKEFLKDFHRRRLQVLAEAGPDLIAFETIPNKLEAQAYVELLEECNINIPSWLSFNSKDGVHVVSGDSLIECATIADKCAKVGAVGINCTPPRFIHGLILSIRKVTDKPILIYPNSGERYDGEKKEWVESTGVSDGDFVSYVNEWCKDGAALIGGCCRTTPNTIRAIHRTLNQGCHKHQLPVGCSIDLCSTPNALLPAVP

SEQ ID NO: 27428 - protein, 244 aa, Zea mays subsp. mays
  peptide (1)..(244): Ceres Seq. ID no. 13498729
  misc_feature (1)..(217): Pfam Name: Pfam Description:  Homocysteine S-methyltransferase
  misc_feature (1)..(226): NCBI GI NO: 10732789 NR Description: homocysteine S-methyltransferase-3 [Zea mays]
  misc_feature (1)..(225): NCBI GI NO: 10732787 NR Description: homocysteine S-methyltransferase-2 [Zea mays]
  misc_feature (1)..(216): NCBI GI NO: 37534456 NR Description: putative homocysteine S-methyltransferase-2
  misc_feature (1)..(215): NCBI GI NO: 15229396 NR Description: homocysteine S-methyltransferase AtHMT-2
  misc_feature (1)..(215): NCBI GI NO: 25453566 NR Description: homocysteine S-methyltransferase (EC 2
  misc_feature (1)..(217): NCBI GI NO: 10732791 NR Description: homocysteine S-methyltransferase-4 [Zea mays]
  misc_feature (1)..(218): NCBI GI NO: 6094303 NR Description: Selenocysteine methyltransferase
  misc_feature (1)..(216): NCBI GI NO: 18403505 NR Description: selenocysteine methyltransferase -related
  misc_feature (1)..(216): NCBI GI NO: 21593147 NR Description: putative selenocysteine methyltransferase
  misc_feature (1)..(89): NCBI GI NO: 34909958 NR Description: putative homocysteine S-methyltransferase-4
MFLKEHLEKSTPIQHPILVAAALGSYGAYLADGSEYSGDYGEAGTKEFLKDFHRRRLQVLAEAGPDLIAFETIPNKLEAQAYVELLEECNINIPSWLSFNSKDGVHVVSGDSLIECATIADKCAKVGAVGINCTPPRFIHGLILSIRKVTDKPILIYPNSGERYDGEKKEWVESTGVSDGDFVSYVNEWCKDGAALIGGCCRTTPNTIRAIHRTLNQGCHKHQLPVGCSIDLCSTPNALLPAVP

SEQ ID NO: 27429 - DNA, 1047 bp, Zea mays subsp. mays
  misc_feature (1)..(1047): Ceres Seq. ID no. 12565996
agagttggcctccaccgtcaagtcaccaaccacccagagactcaccagtcaccaccccaggccagccgccacgtttagccgggctaaacaaacacgggcgcacaatcggaactcgctgcactgcttggaatccaacgagccaatcattcaaatcctccccggaaccgcgttgagcagggcacggtcgattggatctagggtgagggtccgtcgccgaagaaactcgcaggcggtcacgaggaggcggcgggggagggcgggggagatggcctcggaggagatgacggcgacggaggtggctgcgctgctggacttgaagccgcacccggagggcggcttctacaccgagaccttccgcgacggctccatcacgctcaccacgtcccagctcccgccccactacaaggtaaaccgtgctgttagcaccgcaatctatttcctacttcccgcagggagtgtttcccgtctccaccgcattccctgtgctgaaacctggcacttctacaagggagagcctgtcacggtcttcgagcttcacgacgacggtcacattgaccttactgtcattggcccacaccttgaggcaggccagcgcccccagtataccgtgccaccgaacgtgtggtttgggtcgttccccacactagacgtcgagtcgttcgcatctgatggcagcgttcttgtcaagtctcggaagagggaccctgagctgcattactcccttgttggctgcacctgtgcccctggcttccagtacgaggattttgaaatggccaaatttgaggacgtgagatccatcgctcccaaggctgaacctttcctcaagtttcttattccctctaccgattaactccagagcagcctcagatgattgtggatgggttctcagcgactttctatactgcatactgtacggatggtgtttctagtgtgattccatgagagttctgctttcacgacagtgtagacagtaaactgtacctttgtggtggcaccggttgaaacgtttggtgcattgaaacagaataacagctggtcttgatgttg

SEQ ID NO: 27430 - protein, 282 aa, Zea mays subsp. mays
  peptide (1)..(282): Ceres Seq. ID no. 12565997
  misc_feature (96)..(259): Pfam Name: DUF985 Pfam Description: Protein of unknown function
  misc_feature (89)..(277): NCBI GI NO: 26449699 NR Description: unknown protein [Arabidopsis thaliana]
  misc_feature (89)..(277): NCBI GI NO: 25402881 NR Description: protein F14D16.29
  misc_feature (89)..(175): NCBI GI NO: 18394699 NR Description: expressed protein; protein id: At1g19130
  misc_feature (96)..(216): NCBI GI NO: 39995284 NR Description: conserved hypothetical protein
  misc_feature (239)..(263): NCBI GI NO: 39995284 NR Description: conserved hypothetical protein
  misc_feature (103)..(211): NCBI GI NO: 16329452 NR Description: hypothetical protein [Synechocystis sp. PCC 6803]
  misc_feature (239)..(277): NCBI GI NO: 16329452 NR Description: hypothetical protein [Synechocystis sp. PCC 6803]
  misc_feature (98)..(224): NCBI GI NO: 22986010 NR Description: hypothetical protein [Burkholderia fungorum]
  misc_feature (234)..(280): NCBI GI NO: 22986010 NR Description: hypothetical protein [Burkholderia fungorum]
  misc_feature (103)..(227): NCBI GI NO: 18310898 NR Description: conserved hypothetical protein
ELASTVKSPTTQRLTSHHPRPAATFSRAKQTRAHNRNSLHCLESNEPIIQILPGTALSRARSIGSRVRVRRRRNSQAVTRRRRGRAGEMASEEMTATEVAALLDLKPHPEGGFYTETFRDGSITLTTSQLPPHYKVNRAVSTAIYFLLPAGSVSRLHRIPCAETWHFYKGEPVTVFELHDDGHIDLTVIGPHLEAGQRPQYTVPPNVWFGSFPTLDVESFASDGSVLVKSRKRDPELHYSLVGCTCAPGFQYEDFEMAKFEDVRSIAPKAEPFLKFLIPSTD

SEQ ID NO: 27431 - protein, 194 aa, Zea mays subsp. mays
  peptide (1)..(194): Ceres Seq. ID no. 12565998
  misc_feature (8)..(171): Pfam Name: DUF985 Pfam Description: Protein of unknown function
  misc_feature (1)..(189): NCBI GI NO: 26449699 NR Description: unknown protein [Arabidopsis thaliana]
  misc_feature (1)..(189): NCBI GI NO: 25402881 NR Description: protein F14D16.29
  misc_feature (1)..(87): NCBI GI NO: 18394699 NR Description: expressed protein; protein id: At1g19130
  misc_feature (8)..(128): NCBI GI NO: 39995284 NR Description: conserved hypothetical protein
  misc_feature (151)..(175): NCBI GI NO: 39995284 NR Description: conserved hypothetical protein
  misc_feature (15)..(123): NCBI GI NO: 16329452 NR Description: hypothetical protein [Synechocystis sp. PCC 6803]
  misc_feature (151)..(189): NCBI GI NO: 16329452 NR Description: hypothetical protein [Synechocystis sp. PCC 6803]
  misc_feature (10)..(136): NCBI GI NO: 22986010 NR Description: hypothetical protein [Burkholderia fungorum]
  misc_feature (146)..(192): NCBI GI NO: 22986010 NR Description: hypothetical protein [Burkholderia fungorum]
  misc_feature (15)..(139): NCBI GI NO: 18310898 NR Description: conserved hypothetical protein
MASEEMTATEVAALLDLKPHPEGGFYTETFRDGSITLTTSQLPPHYKVNRAVSTAIYFLLPAGSVSRLHRIPCAETWHFYKGEPVTVFELHDDGHIDLTVIGPHLEAGQRPQYTVPPNVWFGSFPTLDVESFASDGSVLVKSRKRDPELHYSLVGCTCAPGFQYEDFEMAKFEDVRSIAPKAEPFLKFLIPSTD

SEQ ID NO: 27432 - protein, 189 aa, Zea mays subsp. mays
  peptide (1)..(189): Ceres Seq. ID no. 12565999
  misc_feature (3)..(166): Pfam Name: DUF985 Pfam Description: Protein of unknown function
  misc_feature (1)..(184): NCBI GI NO: 26449699 NR Description: unknown protein [Arabidopsis thaliana]
  misc_feature (1)..(184): NCBI GI NO: 25402881 NR Description: protein F14D16.29
  misc_feature (1)..(82): NCBI GI NO: 18394699 NR Description: expressed protein; protein id: At1g19130
  misc_feature (3)..(123): NCBI GI NO: 39995284 NR Description: conserved hypothetical protein
  misc_feature (146)..(170): NCBI GI NO: 39995284 NR Description: conserved hypothetical protein
  misc_feature (10)..(118): NCBI GI NO: 16329452 NR Description: hypothetical protein [Synechocystis sp. PCC 6803]
  misc_feature (146)..(184): NCBI GI NO: 16329452 NR Description: hypothetical protein [Synechocystis sp. PCC 6803]
  misc_feature (5)..(131): NCBI GI NO: 22986010 NR Description: hypothetical protein [Burkholderia fungorum]
  misc_feature (141)..(187): NCBI GI NO: 22986010 NR Description: hypothetical protein [Burkholderia fungorum]
  misc_feature (10)..(134): NCBI GI NO: 18310898 NR Description: conserved hypothetical protein
MTATEVAALLDLKPHPEGGFYTETFRDGSITLTTSQLPPHYKVNRAVSTAIYFLLPAGSVSRLHRIPCAETWHFYKGEPVTVFELHDDGHIDLTVIGPHLEAGQRPQYTVPPNVWFGSFPTLDVESFASDGSVLVKSRKRDPELHYSLVGCTCAPGFQYEDFEMAKFEDVRSIAPKAEPFLKFLIPSTD

SEQ ID NO: 27433 - DNA, 1214 bp, Zea mays subsp. mays
  misc_feature (1)..(1214): Ceres Seq. ID no. 12387065
aaactgcatcagagcacgaccacactacccacccacctccactactgacgaccgattcccagaaagctcgatctagcgcgcgcggctgcagagtgcagacgacgacgtacaccatggcgcggcggtccctggccctgctgctcgcgtcgtcgctcgccctgatggcggccgccgtcgcatcggcggactcgtggctctacgacaagttcaacacggacggcaccgtccgcacccagtacgacgcgtcggggcaggaggtggcgatgctcagcctggaccgcagctccggcgccggcttcaactccaagaagcagtacctgtacggcgagttcagcgtccagatgaagctcatccccggcaactccgccggcaccgtctcgtgcttctacctctcgtcgggcgacggcgacgggcacgacgagatcgacatggagttcatgggcaacgcgagcgggcagccggtggtgctgaacacgaacgtgtgggccagcggcgacggcaagaaggagcaccagttcgacctctggttcgacccctccgccgactaccacacctacaccatcatctggaacccgaccaacatcctgttcaaggtggacggcgacgtgatccggtgcttcaagcgctacgccgacctgccgtacccgagcgcgaggcccatggcgctgcacgccacgctgtgggacggcagctactgggccaccgagaagggcaaggtgccggtggactggtccgccgcgcccttcgtcgtctcctaccggggctactcggccaacgcctgcgtcagcggcggggcctgcggcggcggcggcgacgacgggtggatgagcaagcagcccgacgacgccgagtggggcaccgtccggtgggccgagagcaactacatgcgctacaactactgcgacgacggctggcggttcccccagggcctcccgcccgagtgcagccgcagctaagctagctgattccgccggttttcgtacgctcggcggcgtccgctgacgacacacgccttgttggtttgttcttgctggacatcatacatctctatatgcatgattcttgttctgttattgttaaatcgtgattacaatacttgtaattgtaaagaagtgtgtgggcacgggagtatatcactgtagttttaatttgcttgtaaagaaaagaagggtttttttacttgtgacgcgggagctagcgactgcgtcctgttc

SEQ ID NO: 27434 - protein, 317 aa, Zea mays subsp. mays
  peptide (1)..(317): Ceres Seq. ID no. 12387066
  misc_feature (66)..(244): Pfam Name: Pfam Description:  Glycosyl hydrolases family 16
  misc_feature (38)..(316): NCBI GI NO: 7447410 NR Description: xyloglucan endo-1,4-beta-D-glucanase (EC 3
  misc_feature (38)..(316): NCBI GI NO: 40253521 NR Description: putative end-xyloglucan transferase
  misc_feature (38)..(316): NCBI GI NO: 7447415 NR Description: xyloglucan endotransglycosylase (EC 2
  misc_feature (38)..(316): NCBI GI NO: 14330334 NR Description: Xet2 protein [Festuca pratensis]
  misc_feature (38)..(294): NCBI GI NO: 7447411 NR Description: end-xyloglucan transferase (EC 2.4.1.-) - rice
  misc_feature (44)..(315): NCBI GI NO: 7447403 NR Description: xyloglucan endo-1,4-beta-D-glucanase (EC 3
  misc_feature (66)..(314): NCBI GI NO: 8886865 NR Description: xyloglucan endotransglycosylase XET1
  misc_feature (45)..(317): NCBI GI NO: 2129936 NR Description: xyloglucan endo-1,4-beta-D-glucanase (EC 3
  misc_feature (38)..(315): NCBI GI NO: 29500891 NR Description: putative xyloglucan endotransglycosylase
  misc_feature (43)..(315): NCBI GI NO: 8886867 NR Description: xyloglucan endotransglycosylase XET2
TASEHDHTTHPPPLLTTDSQKARSSARGCRVQTTTYTMARRSLALLLASSLALMAAAVASADSWLYDKFNTDGTVRTQYDASGQEVAMLSLDRSSGAGFNSKKQYLYGEFSVQMKLIPGNSAGTVSCFYLSSGDGDGHDEIDMEFMGNASGQPVVLNTNVWASGDGKKEHQFDLWFDPSADYHTYTIIWNPTNILFKVDGDVIRCFKRYADLPYPSARPMALHATLWDGSYWATEKGKVPVDWSAAPFVVSYRGYSANACVSGGACGGGGDDGWMSKQPDDAEWGTVRWAESNYMRYNYCDDGWRFPQGLPPECSRS

SEQ ID NO: 27435 - protein, 280 aa, Zea mays subsp. mays
  peptide (1)..(280): Ceres Seq. ID no. 12387067
  misc_feature (29)..(207): Pfam Name: Pfam Description:  Glycosyl hydrolases family 16
  misc_feature (1)..(279): NCBI GI NO: 7447410 NR Description: xyloglucan endo-1,4-beta-D-glucanase (EC 3
  misc_feature (1)..(279): NCBI GI NO: 40253521 NR Description: putative end-xyloglucan transferase
  misc_feature (1)..(279): NCBI GI NO: 7447415 NR Description: xyloglucan endotransglycosylase (EC 2
  misc_feature (1)..(279): NCBI GI NO: 14330334 NR Description: Xet2 protein [Festuca pratensis]
  misc_feature (1)..(257): NCBI GI NO: 7447411 NR Description: end-xyloglucan transferase (EC 2.4.1.-) - rice
  misc_feature (7)..(278): NCBI GI NO: 7447403 NR Description: xyloglucan endo-1,4-beta-D-glucanase (EC 3
  misc_feature (29)..(277): NCBI GI NO: 8886865 NR Description: xyloglucan endotransglycosylase XET1
  misc_feature (8)..(280): NCBI GI NO: 2129936 NR Description: xyloglucan endo-1,4-beta-D-glucanase (EC 3
  misc_feature (1)..(278): NCBI GI NO: 29500891 NR Description: putative xyloglucan endotransglycosylase
  misc_feature (6)..(278): NCBI GI NO: 8886867 NR Description: xyloglucan endotransglycosylase XET2
MARRSLALLLASSLALMAAAVASADSWLYDKFNTDGTVRTQYDASGQEVAMLSLDRSSGAGFNSKKQYLYGEFSVQMKLIPGNSAGTVSCFYLSSGDGDGHDEIDMEFMGNASGQPVVLNTNVWASGDGKKEHQFDLWFDPSADYHTYTIIWNPTNILFKVDGDVIRCFKRYADLPYPSARPMALHATLWDGSYWATEKGKVPVDWSAAPFVVSYRGYSANACVSGGACGGGGDDGWMSKQPDDAEWGTVRWAESNYMRYNYCDDGWRFPQGLPPECSRS

SEQ ID NO: 27436 - protein, 264 aa, Zea mays subsp. mays
  peptide (1)..(264): Ceres Seq. ID no. 12387068
  misc_feature (13)..(191): Pfam Name: Pfam Description:  Glycosyl hydrolases family 16
  misc_feature (1)..(263): NCBI GI NO: 7447410 NR Description: xyloglucan endo-1,4-beta-D-glucanase (EC 3
  misc_feature (1)..(263): NCBI GI NO: 40253521 NR Description: putative end-xyloglucan transferase
  misc_feature (1)..(263): NCBI GI NO: 7447415 NR Description: xyloglucan endotransglycosylase (EC 2
  misc_feature (1)..(263): NCBI GI NO: 14330334 NR Description: Xet2 protein [Festuca pratensis]
  misc_feature (1)..(241): NCBI GI NO: 7447411 NR Description: end-xyloglucan transferase (EC 2.4.1.-) - rice
  misc_feature (1)..(262): NCBI GI NO: 7447403 NR Description: xyloglucan endo-1,4-beta-D-glucanase (EC 3
  misc_feature (13)..(261): NCBI GI NO: 8886865 NR Description: xyloglucan endotransglycosylase XET1
  misc_feature (1)..(264): NCBI GI NO: 2129936 NR Description: xyloglucan endo-1,4-beta-D-glucanase (EC 3
  misc_feature (1)..(262): NCBI GI NO: 29500891 NR Description: putative xyloglucan endotransglycosylase
  misc_feature (1)..(262): NCBI GI NO: 8886867 NR Description: xyloglucan endotransglycosylase XET2
MAAAVASADSWLYDKFNTDGTVRTQYDASGQEVAMLSLDRSSGAGFNSKKQYLYGEFSVQMKLIPGNSAGTVSCFYLSSGDGDGHDEIDMEFMGNASGQPVVLNTNVWASGDGKKEHQFDLWFDPSADYHTYTIIWNPTNILFKVDGDVIRCFKRYADLPYPSARPMALHATLWDGSYWATEKGKVPVDWSAAPFVVSYRGYSANACVSGGACGGGGDDGWMSKQPDDAEWGTVRWAESNYMRYNYCDDGWRFPQGLPPECSRS

SEQ ID NO: 27437 - DNA, 1186 bp, Zea mays subsp. mays
  misc_feature (1)..(1186): Ceres Seq. ID no. 12435025
  misc_feature (549)..(549): n is a, c, t, g, unknown, or other
  misc_feature (859)..(859): n is a, c, t, g, unknown, or other
  misc_feature (609)..(609): n is a, c, t, g, unknown, or other
  misc_feature (563)..(563): n is a, c, t, g, unknown, or other
  misc_feature (710)..(710): n is a, c, t, g, unknown, or other
  misc_feature (724)..(724): n is a, c, t, g, unknown, or other
  misc_feature (608)..(608): n is a, c, t, g, unknown, or other
  misc_feature (551)..(551): n is a, c, t, g, unknown, or other
aacaacgcgcactcgcgcagcagacactgcccatcaggatttcgcaaaagcaacaaaacccacgtcgagggtagaagaggcctgcaaatttccgaagagctcgcggaaatggcgacggtgctgccgcttgccgccgcctcggcctcgcccacgccgaggacttgcatctccggcggcccagttcccgcgcgattccttgggactcgcatgcgtctccgcatccacatcccaccgcggggcgttgcctgcgccctccgaaggagacccaccaagtacaagactaaaatccagagtgaggaggatgtggtggctgcagaagatgtcatggatgatgatgacgacgaggatggtgcactggaagcacttttcaagcagctggaagaagatcttgacaatgatgatttatctgtcgatgataatgatatatcagaagaagatatggcaaggtttgaaaaggagttggcagaagcaattgaagatgtcagtggtgttgatgactcagcgggggattcgttgctgagctctggcgactatggtattgatgagcancnagatggaagcgnacgggtagagctgaaaacctggcaactccggagattggctcgtgnnctgaaaataggccggcgtaaaactagtattaagaatcttgcaggggagctaggcctagataggggtttggttattgaaatgctccgcaatccaccaccgangcttctactcatgnctgattctttgcctgatgaagtcccttctaaatctgaagtgaaggaaatagaaacccctagtacgaccactgttgacgaggttgataccagtgaaatcaaaccacagttggagcttccagtgcacgtcatgagtncagaatggtctgcaagaaaaagactgaaaaaggtgcaacttgagaccttagaaagagtctacctgcgaagcaaacggcccacgaatacaatggtcagcagcatagttcaagtgacaaaccttccgcgaaagaccattgttaagtggtttgaggatagaagggagcaagatggagtccctgaccatcgtgctgcattcaagagatccctatctgagattggtgctagttcataacttcttcagtataagcatttgttacggtgtttacttggaaccattacaaacatgtaaatatgagctttgaaattatgacaagttttgcaagctc

SEQ ID NO: 27438 - protein, 363 aa, Zea mays subsp. mays
  peptide (1)..(363): Ceres Seq. ID no. 12435026
  misc_feature (78)..(362): NCBI GI NO: 29367497 NR Description: unknown [Oryza sativa (japonica cultivar-group)]
  misc_feature (106)..(353): NCBI GI NO: 8953389 NR Description: putative protein [Arabidopsis thaliana]
  misc_feature (106)..(353): NCBI GI NO: 30683552 NR Description: expressed protein [Arabidopsis thaliana]
  misc_feature (183)..(183): Xaa is any aa, unknown or other
  misc_feature (184)..(184): Xaa is any aa, unknown or other
  misc_feature (188)..(188): Xaa is any aa, unknown or other
  misc_feature (203)..(203): Xaa is any aa, unknown or other
  misc_feature (237)..(237): Xaa is any aa, unknown or other
  misc_feature (242)..(242): Xaa is any aa, unknown or other
  misc_feature (287)..(287): Xaa is any aa, unknown or other
NNAHSRSRHCPSGFRKSNKTHVEGRRGLQISEELAEMATVLPLAAASASPTPRTCISGGPVPARFLGTRMRLRIHIPPRGVACALRRRPTKYKTKIQSEEDVVAAEDVMDDDDDEDGALEALFKQLEEDLDNDDLSVDDNDISEEDMARFEKELAEAIEDVSGVDDSAGDSLLSSGDYGIDEXXDGSXRVELKTWQLRRLARXLKIGRRKTSIKNLAGELGLDRGLVIEMLRNPPPXLLLMXDSLPDEVPSKSEVKEIETPSTTTVDEVDTSEIKPQLELPVHVMSXEWSARKRLKKVQLETLERVYLRSKRPTNTMVSSIVQVTNLPRKTIVKWFEDRREQDGVPDHRAAFKRSLSEIGASS

SEQ ID NO: 27439 - protein, 327 aa, Zea mays subsp. mays
  peptide (1)..(327): Ceres Seq. ID no. 12435027
  misc_feature (42)..(326): NCBI GI NO: 29367497 NR Description: unknown [Oryza sativa (japonica cultivar-group)]
  misc_feature (70)..(317): NCBI GI NO: 8953389 NR Description: putative protein [Arabidopsis thaliana]
  misc_feature (70)..(317): NCBI GI NO: 30683552 NR Description: expressed protein [Arabidopsis thaliana]
  misc_feature (147)..(147): Xaa is any aa, unknown or other
  misc_feature (148)..(148): Xaa is any aa, unknown or other
  misc_feature (152)..(152): Xaa is any aa, unknown or other
  misc_feature (167)..(167): Xaa is any aa, unknown or other
  misc_feature (201)..(201): Xaa is any aa, unknown or other
  misc_feature (206)..(206): Xaa is any aa, unknown or other
  misc_feature (251)..(251): Xaa is any aa, unknown or other
MATVLPLAAASASPTPRTCISGGPVPARFLGTRMRLRIHIPPRGVACALRRRPTKYKTKIQSEEDVVAAEDVMDDDDDEDGALEALFKQLEEDLDNDDLSVDDNDISEEDMARFEKELAEAIEDVSGVDDSAGDSLLSSGDYGIDEXXDGSXRVELKTWQLRRLARXLKIGRRKTSIKNLAGELGLDRGLVIEMLRNPPPXLLLMXDSLPDEVPSKSEVKEIETPSTTTVDEVDTSEIKPQLELPVHVMSXEWSARKRLKKVQLETLERVYLRSKRPTNTMVSSIVQVTNLPRKTIVKWFEDRREQDGVPDHRAAFKRSLSEIGASS

SEQ ID NO: 27440 - protein, 294 aa, Zea mays subsp. mays
  peptide (1)..(294): Ceres Seq. ID no. 12435028
  misc_feature (9)..(293): NCBI GI NO: 29367497 NR Description: unknown [Oryza sativa (japonica cultivar-group)]
  misc_feature (37)..(284): NCBI GI NO: 8953389 NR Description: putative protein [Arabidopsis thaliana]
  misc_feature (37)..(284): NCBI GI NO: 30683552 NR Description: expressed protein [Arabidopsis thaliana]
  misc_feature (114)..(114): Xaa is any aa, unknown or other
  misc_feature (115)..(115): Xaa is any aa, unknown or other
  misc_feature (119)..(119): Xaa is any aa, unknown or other
  misc_feature (134)..(134): Xaa is any aa, unknown or other
  misc_feature (168)..(168): Xaa is any aa, unknown or other
  misc_feature (173)..(173): Xaa is any aa, unknown or other
  misc_feature (218)..(218): Xaa is any aa, unknown or other
MRLRIHIPPRGVACALRRRPTKYKTKIQSEEDVVAAEDVMDDDDDEDGALEALFKQLEEDLDNDDLSVDDNDISEEDMARFEKELAEAIEDVSGVDDSAGDSLLSSGDYGIDEXXDGSXRVELKTWQLRRLARXLKIGRRKTSIKNLAGELGLDRGLVIEMLRNPPPXLLLMXDSLPDEVPSKSEVKEIETPSTTTVDEVDTSEIKPQLELPVHVMSXEWSARKRLKKVQLETLERVYLRSKRPTNTMVSSIVQVTNLPRKTIVKWFEDRREQDGVPDHRAAFKRSLSEIGASS

SEQ ID NO: 27441 - DNA, 1289 bp, Zea mays subsp. mays
  misc_feature (1)..(1289): Ceres Seq. ID no. 12344120
aagagagagaaaacgaaacgccgctccctcgcctcatcccttccctcctcctgcatcctacctccctggtacccgtcacgttcaccacgttcgcccgctcattcaccggcggcgtcgcccagctcggcctcccgccgcccacggaggccaggtccccgggccgcccgctcggtccgccacagaggcaaggcatggtggcgtctttagacaatgtgaggggcttgactttagccatgtcatctagtgcattcattggttctagctttgtgatcaagaaagttggattgaagaaggctggggataatggggtgcgtgcagcttctggaggcttctcatatctatatgagccgttatggtggttgggaatgataactatgattctaggcgaggtagccaattttgcagcatatgcatttgcccctgccgtacttgttactcctctaggagctctaagcatcatatttagtgcagtgctcgcacacttcattctgaaagaaaatttgcacatgtttggcgttgttggttgcatactatgtgttgttggttctgttggtatagttttgcatgccccaaaggagagaaaaattgattctatgaaggaaatatggcatcttgcaacacagccaggttttattgtttattcatgcgtggcagtggcctgcgttctttttttgatatttcgggttgttgagcgctctgggcacagattgatgcttgtttacatagcaatctgttcattaatgggatctcttacggttatcagtgtaaaagcagttgccattgctctaaagctatcatttggtggatcaaatcaattcatctacgtccagacatggttcttcatagtagtagtcactatttgctgcttggtgcaattaaactacttaaacaaggctctggactcgttcaacacggctgtggtttctcctgtatactacgtgatgttcaccattcttaccattgttgcaaatatgatcatgtacaaggactgggcctcgcagactgcaacgcagatcgcaacacagctatgtgggtttgtgaccattgtcgcggggacttttctgcttcacaagactagggatatgggaaatccaccaccaccaccacctgaccaaatgtgcctgcaagaagccggggaatgtgctccacggtcaatgaccagttctagctgaacacactaagatgtcaaaatctcacagcctctatggactgaattggaattttgagctatatggtgacctttgtagatatattaggaaggagtaaagattggagtgcccagcagttgg

SEQ ID NO: 27442 - protein, 389 aa, Zea mays subsp. mays
  peptide (1)..(389): Ceres Seq. ID no. 12344121
  misc_feature (67)..(363): Pfam Name: DUF803 Pfam Description: Protein of unknown function
  misc_feature (64)..(363): NCBI GI NO: 21742149 NR Description: OSJNBa0069D17.4
  misc_feature (67)..(363): NCBI GI NO: 18414079 NR Description: expressed protein; protein id: At4g13800
  misc_feature (67)..(363): NCBI GI NO: 21593618 NR Description: unknown [Arabidopsis thaliana]
  misc_feature (67)..(363): NCBI GI NO: 15229534 NR Description: unknown protein; protein id: At3g23870.1
  misc_feature (62)..(368): NCBI GI NO: 20161440 NR Description: B1065E10.15
  misc_feature (62)..(361): NCBI GI NO: 18409942 NR Description: expressed protein; protein id: At1g71900
  misc_feature (62)..(361): NCBI GI NO: 25406128 NR Description: unknown protein F17M19.5
  misc_feature (62)..(361): NCBI GI NO: 18399280 NR Description: expressed protein; protein id: At1g34470
  misc_feature (69)..(360): NCBI GI NO: 30681265 NR Description: expressed protein [Arabidopsis thaliana]
  misc_feature (69)..(379): NCBI GI NO: 26449939 NR Description: unknown protein [Arabidopsis thaliana]
ERENETPLPRLIPSLLLHPTSLVPVTFTTFARSFTGGVAQLGLPPPTEARSPGRPLGPPQRQGMVASLDNVRGLTLAMSSSAFIGSSFVIKKVGLKKAGDNGVRAASGGFSYLYEPLWWLGMITMILGEVANFAAYAFAPAVLVTPLGALSIIFSAVLAHFILKENLHMFGVVGCILCVVGSVGIVLHAPKERKIDSMKEIWHLATQPGFIVYSCVAVACVLFLIFRVVERSGHRLMLVYIAICSLMGSLTVISVKAVAIALKLSFGGSNQFIYVQTWFFIVVVTICCLVQLNYLNKALDSFNTAVVSPVYYVMFTILTIVANMIMYKDWASQTATQIATQLCGFVTIVAGTFLLHKTRDMGNPPPPPPDQMCLQEAGECAPRSMTSSS

SEQ ID NO: 27443 - protein, 326 aa, Zea mays subsp. mays
  peptide (1)..(326): Ceres Seq. ID no. 12344122
  misc_feature (4)..(300): Pfam Name: DUF803 Pfam Description: Protein of unknown function
  misc_feature (1)..(300): NCBI GI NO: 21742149 NR Description: OSJNBa0069D17.4
  misc_feature (4)..(300): NCBI GI NO: 18414079 NR Description: expressed protein; protein id: At4g13800
  misc_feature (4)..(300): NCBI GI NO: 21593618 NR Description: unknown [Arabidopsis thaliana]
  misc_feature (4)..(300): NCBI GI NO: 15229534 NR Description: unknown protein; protein id: At3g23870.1
  misc_feature (1)..(305): NCBI GI NO: 20161440 NR Description: B1065E10.15
  misc_feature (1)..(298): NCBI GI NO: 18409942 NR Description: expressed protein; protein id: At1g71900
  misc_feature (1)..(298): NCBI GI NO: 25406128 NR Description: unknown protein F17M19.5
  misc_feature (1)..(298): NCBI GI NO: 18399280 NR Description: expressed protein; protein id: At1g34470
  misc_feature (6)..(297): NCBI GI NO: 30681265 NR Description: expressed protein [Arabidopsis thaliana]
  misc_feature (6)..(316): NCBI GI NO: 26449939 NR Description: unknown protein [Arabidopsis thaliana]
MVASLDNVRGLTLAMSSSAFIGSSFVIKKVGLKKAGDNGVRAASGGFSYLYEPLWWLGMITMILGEVANFAAYAFAPAVLVTPLGALSIIFSAVLAHFILKENLHMFGVVGCILCVVGSVGIVLHAPKERKIDSMKEIWHLATQPGFIVYSCVAVACVLFLIFRVVERSGHRLMLVYIAICSLMGSLTVISVKAVAIALKLSFGGSNQFIYVQTWFFIVVVTICCLVQLNYLNKALDSFNTAVVSPVYYVMFTILTIVANMIMYKDWASQTATQIATQLCGFVTIVAGTFLLHKTRDMGNPPPPPPDQMCLQEAGECAPRSMTSSS

SEQ ID NO: 27444 - protein, 312 aa, Zea mays subsp. mays
  peptide (1)..(312): Ceres Seq. ID no. 12344123
  misc_feature (1)..(286): Pfam Name: DUF803 Pfam Description: Protein of unknown function
  misc_feature (1)..(286): NCBI GI NO: 21742149 NR Description: OSJNBa0069D17.4
  misc_feature (1)..(286): NCBI GI NO: 18414079 NR Description: expressed protein; protein id: At4g13800
  misc_feature (1)..(286): NCBI GI NO: 21593618 NR Description: unknown [Arabidopsis thaliana]
  misc_feature (1)..(286): NCBI GI NO: 15229534 NR Description: unknown protein; protein id: At3g23870.1
  misc_feature (1)..(291): NCBI GI NO: 20161440 NR Description: B1065E10.15
  misc_feature (1)..(284): NCBI GI NO: 18409942 NR Description: expressed protein; protein id: At1g71900
  misc_feature (1)..(284): NCBI GI NO: 25406128 NR Description: unknown protein F17M19.5
  misc_feature (1)..(284): NCBI GI NO: 18399280 NR Description: expressed protein; protein id: At1g34470
  misc_feature (1)..(283): NCBI GI NO: 30681265 NR Description: expressed protein [Arabidopsis thaliana]
  misc_feature (1)..(302): NCBI GI NO: 26449939 NR Description: unknown protein [Arabidopsis thaliana]
MSSSAFIGSSFVIKKVGLKKAGDNGVRAASGGFSYLYEPLWWLGMITMILGEVANFAAYAFAPAVLVTPLGALSIIFSAVLAHFILKENLHMFGVVGCILCVVGSVGIVLHAPKERKIDSMKEIWHLATQPGFIVYSCVAVACVLFLIFRVVERSGHRLMLVYIAICSLMGSLTVISVKAVAIALKLSFGGSNQFIYVQTWFFIVVVTICCLVQLNYLNKALDSFNTAVVSPVYYVMFTILTIVANMIMYKDWASQTATQIATQLCGFVTIVAGTFLLHKTRDMGNPPPPPPDQMCLQEAGECAPRSMTSSS

SEQ ID NO: 27445 - DNA, 932 bp, Zea mays subsp. mays
  misc_feature (1)..(932): Ceres Seq. ID no. 12405069
gatcggcacagccacaacctccttctccaatactctctccctcgccgccggccacctccgcctcctcccacgcgccacctccgcctcctcccacgcgccacctccgcctcctcccacgcgccacctccgcgacaaaccactgaaggagggagaggactcgctcatatcgtccgatggaggaggactcgatcaaggggatgatctccgcgatatcctgggtgcccaggggcgccgccaagagcgtgcccgtcgttgccgacccgcccactcaggaggagatcgccgaggccatgaagaccttcgacctgggcagagactccgggagcgacgctgacgaggatgatgatgctgccaccatggaactcgacggtgcggcggaaacggtggaggaggttgatgaggctgcccgagccaaggccgtagccaaggcgctctgcaagggctctagcaaggcggacgacgtcgctgatgagctccgcgaactcaacatggacgcgtacgatgatgaagatgaagaggtcgatattttcggctctgggctgggggacttgtactatccgagcaacgcaatggacccatatctgaagaagaacaatgaggatgatgaggaggacgacgatgatgatgaggaaatcgaagataagatgatcatgcctactgattttgttattgtctgcacatagtgaggacgatatcttctctcttcaggtcaacattcttgaagaaacaaatgatggtgaacaaaatatctttgtgcatcatgacgttcctctcgctgattttccgctatgcacagcttggatggattttaatctgaaaggtggtgaaaaagggaattttgtagccgttggaaccatggatcctgccatagaaatatgggacttagatatggttgatgaagtgcaaccgcacatggtgctaggaggacttcc

SEQ ID NO: 27446 - protein, 169 aa, Zea mays subsp. mays
  peptide (1)..(169): Ceres Seq. ID no. 12405070
  misc_feature (9)..(166): NCBI GI NO: 20161737 NR Description: B1033B05.3
  misc_feature (9)..(168): NCBI GI NO: 18415195 NR Description: Expressed protein; protein id: At4g18905
  misc_feature (1)..(114): NCBI GI NO: 7485426 NR Description: hypothetical protein F13C5
  misc_feature (114)..(168): NCBI GI NO: 7485426 NR Description: hypothetical protein F13C5
  misc_feature (31)..(115): NCBI GI NO: 7485426 NR Description: hypothetical protein F13C5
  misc_feature (113)..(168): NCBI GI NO: 7485426 NR Description: hypothetical protein F13C5
  misc_feature (31)..(168): NCBI GI NO: 18415193 NR Description: putative protein; protein id: At4g18900.1
  misc_feature (38)..(168): NCBI GI NO: 15236974 NR Description: putative protein; protein id: At4g35370.1
  misc_feature (6)..(167): NCBI GI NO: 40746560 NR Description: hypothetical protein AN0310.2
  misc_feature (6)..(167): NCBI GI NO: 29436469 NR Description: Unknown (protein for MGC:56486) [Danio rerio]
MEEDSIKGMISAISWVPRGAAKSVPVVADPPTQEEIAEAMKTFDLGRDSGSDADEDDDAATMELDGAAETVEEVDEAARAKAVAKALCKGSSKADDVADELRELNMDAYDDEDEEVDIFGSGLGDLYYPSNAMDPYLKKNNEDDEEDDDDDEEIEDKMIMPTDFVIVCT

SEQ ID NO: 27447 - protein, 161 aa, Zea mays subsp. mays
  peptide (1)..(161): Ceres Seq. ID no. 12405071
  misc_feature (1)..(158): NCBI GI NO: 20161737 NR Description: B1033B05.3
  misc_feature (1)..(160): NCBI GI NO: 18415195 NR Description: Expressed protein; protein id: At4g18905
  misc_feature (1)..(106): NCBI GI NO: 7485426 NR Description: hypothetical protein F13C5
  misc_feature (106)..(160): NCBI GI NO: 7485426 NR Description: hypothetical protein F13C5
  misc_feature (23)..(107): NCBI GI NO: 7485426 NR Description: hypothetical protein F13C5
  misc_feature (105)..(160): NCBI GI NO: 7485426 NR Description: hypothetical protein F13C5
  misc_feature (23)..(160): NCBI GI NO: 18415193 NR Description: putative protein; protein id: At4g18900.1
  misc_feature (30)..(160): NCBI GI NO: 15236974 NR Description: putative protein; protein id: At4g35370.1
  misc_feature (1)..(159): NCBI GI NO: 40746560 NR Description: hypothetical protein AN0310.2
  misc_feature (1)..(159): NCBI GI NO: 29436469 NR Description: Unknown (protein for MGC:56486) [Danio rerio]
MISAISWVPRGAAKSVPVVADPPTQEEIAEAMKTFDLGRDSGSDADEDDDAATMELDGAAETVEEVDEAARAKAVAKALCKGSSKADDVADELRELNMDAYDDEDEEVDIFGSGLGDLYYPSNAMDPYLKKNNEDDEEDDDDDEEIEDKMIMPTDFVIVCT

SEQ ID NO: 27448 - protein, 130 aa, Zea mays subsp. mays
  peptide (1)..(130): Ceres Seq. ID no. 12405072
  misc_feature (1)..(127): NCBI GI NO: 20161737 NR Description: B1033B05.3
  misc_feature (1)..(129): NCBI GI NO: 18415195 NR Description: Expressed protein; protein id: At4g18905
  misc_feature (1)..(75): NCBI GI NO: 7485426 NR Description: hypothetical protein F13C5
  misc_feature (75)..(129): NCBI GI NO: 7485426 NR Description: hypothetical protein F13C5
  misc_feature (1)..(76): NCBI GI NO: 7485426 NR Description: hypothetical protein F13C5
  misc_feature (74)..(129): NCBI GI NO: 7485426 NR Description: hypothetical protein F13C5
  misc_feature (1)..(129): NCBI GI NO: 18415193 NR Description: putative protein; protein id: At4g18900.1
  misc_feature (1)..(129): NCBI GI NO: 15236974 NR Description: putative protein; protein id: At4g35370.1
  misc_feature (1)..(128): NCBI GI NO: 40746560 NR Description: hypothetical protein AN0310.2
  misc_feature (1)..(128): NCBI GI NO: 29436469 NR Description: Unknown (protein for MGC:56486) [Danio rerio]
MKTFDLGRDSGSDADEDDDAATMELDGAAETVEEVDEAARAKAVAKALCKGSSKADDVADELRELNMDAYDDEDEEVDIFGSGLGDLYYPSNAMDPYLKKNNEDDEEDDDDDEEIEDKMIMPTDFVIVCT

SEQ ID NO: 27449 - DNA, 1399 bp, Zea mays subsp. mays
  misc_feature (1)..(1399): Ceres Seq. ID no. 12369116
aatcccttggagccagcaactccactcctgagtcctcacctcgtgctgcccgcgccatttccacctcccactgtcctttcgtccagtccccagccctgcagcccaaccgtggaggttctggaaggcggtgtatcccttctagaaccttctcgagatgcagagcgccgcggctttccggccgtgccccactcggctgctggtgagcagcccttgtcgccccctcctctcggcccgcccgcttcgtgtctccgccgctggcgccgtcgctaccagaagcagcgccgtgggccctcgcggtctggggctcgggctgctgccagcctcgcccgatcgggatggcaagtgccgccagcgacaggtgtcatgcagcgcggccggggatgctgtggcggccccgaaggcggaagaaggaggcgggctcatgaagacgctgtggctcggctcgctcttcggcctctggtacctgttcaacatctacttcaacatctataacaagcaggtactcaaggttttcccataccctataaacatcacagaagttcaatttgctgtcggaactgtagcagctctgttcatgtggatcactggtattattaagaggccaaagatttctggagcacagcttgtagccatcctacctctggctattgttcatactatgggcaatctcttcaccaacatgagccttgggaaagttgcagtgtcatttacgcacaccatcaaggctatggagcctttcttttctgttattctttctgcaattttccttggcgagttacctactatttgggtagtatcatctcttcttccaattgttggtggtgttgcattggcatctcttactgaggcatcctttaactgggctggcttttggagtgcaatggcttcaaatgttacctttcaatcccgaaatgtattgagcaagaagctcatggttaagaaagaggaatccttggacaaccttaatctcttctctatcattacagtgatgtcatttttccttttggcccctgttaccttctttacagaaggtgtcaaaattactcctacatttttgcaatctgctggtctgaatgtaaaccaagtccttacaaggtgtcttttcgctggactgtgtttccatgcataccaacaggtgtcttacatgattttggcgatggtgtctcctgtcactcattctgtgggcaactgtgttaaacgtgttgtggtcattgtaacatcagtgctgttcttcaggacacctgtttctcctatcaactctctcggtactgcgattgcacttgccggagttttcctgtactcacagctcaagcgacttaagcccaagccgaagacggcttaaatagggattgtattttccatctctttgtgttaatggagttaaacacttctatgttgc

SEQ ID NO: 27450 - protein, 395 aa, Zea mays subsp. mays
  peptide (1)..(395): Ceres Seq. ID no. 12369117
  misc_feature (104)..(229): Pfam Name: Pfam Description:  Integral membrane protein DUF6
  misc_feature (1)..(395): NCBI GI NO: 29647427 NR Description: putative phosphoenolpyruvate/phosphate translocator
  misc_feature (1)..(395): NCBI GI NO: 13991929 NR Description: phosphoenolpyruvate/phosphate translocator
  misc_feature (1)..(395): NCBI GI NO: 7489743 NR Description: glucose-6-phosphate/ phosphate-translocatorprecursor homolog
  misc_feature (1)..(395): NCBI GI NO: 7489742 NR Description: glucose-6-phosphate/ phosphate-translocatorprecursor homolog
  misc_feature (3)..(394): NCBI GI NO: 7489171 NR Description: phosphate/ phosphoenolpyruvate translocator TABPPT10precursor
  misc_feature (1)..(395): NCBI GI NO: 7489170 NR Description: phosphate/ phosphoenolpyruvate translocatorprecursor
  misc_feature (77)..(395): NCBI GI NO: 1706110 NR Description: Triose phosphate/phosphate translocator
  misc_feature (77)..(395): NCBI GI NO: 15242801 NR Description: phosphate/ phosphoenolpyruvate translocatorprecursor
  misc_feature (77)..(395): NCBI GI NO: 21554233 NR Description: phosphate/ phosphoenolpyruvate translocatorprecursor
  misc_feature (77)..(395): NCBI GI NO: 1778141 NR Description: phosphate/ phosphoenolpyruvate translocatorprecursor
MQSAAAFRPCPTRLLVSSPCRPLLSARPLRVSAAGAVATRSSAVGPRGLGLGLLPASPDRDGKCRQRQVSCSAAGDAVAAPKAEEGGGLMKTLWLGSLFGLWYLFNIYFNIYNKQVLKVFPYPINITEVQFAVGTVAALFMWITGIIKRPKISGAQLVAILPLAIVHTMGNLFTNMSLGKVAVSFTHTIKAMEPFFSVILSAIFLGELPTIWVVSSLLPIVGGVALASLTEASFNWAGFWSAMASNVTFQSRNVLSKKLMVKKEESLDNLNLFSIITVMSFFLLAPVTFFTEGVKITPTFLQSAGLNVNQVLTRCLFAGLCFHAYQQVSYMILAMVSPVTHSVGNCVKRVVVIVTSVLFFRTPVSPINSLGTAIALAGVFLYSQLKRLKPKPKTA

SEQ ID NO: 27451 - protein, 306 aa, Zea mays subsp. mays
  peptide (1)..(306): Ceres Seq. ID no. 12369118
  misc_feature (15)..(140): Pfam Name: Pfam Description:  Integral membrane protein DUF6
  misc_feature (1)..(306): NCBI GI NO: 29647427 NR Description: putative phosphoenolpyruvate/phosphate translocator
  misc_feature (1)..(306): NCBI GI NO: 13991929 NR Description: phosphoenolpyruvate/phosphate translocator
  misc_feature (1)..(306): NCBI GI NO: 7489743 NR Description: glucose-6-phosphate/ phosphate-translocatorprecursor homolog
  misc_feature (1)..(306): NCBI GI NO: 7489742 NR Description: glucose-6-phosphate/ phosphate-translocatorprecursor homolog
  misc_feature (1)..(305): NCBI GI NO: 7489171 NR Description: phosphate/ phosphoenolpyruvate translocator TABPPT10precursor
  misc_feature (1)..(306): NCBI GI NO: 7489170 NR Description: phosphate/ phosphoenolpyruvate translocatorprecursor
  misc_feature (1)..(306): NCBI GI NO: 1706110 NR Description: Triose phosphate/phosphate translocator
  misc_feature (1)..(306): NCBI GI NO: 15242801 NR Description: phosphate/ phosphoenolpyruvate translocatorprecursor
  misc_feature (1)..(306): NCBI GI NO: 21554233 NR Description: phosphate/ phosphoenolpyruvate translocatorprecursor
  misc_feature (1)..(306): NCBI GI NO: 1778141 NR Description: phosphate/ phosphoenolpyruvate translocatorprecursor
MKTLWLGSLFGLWYLFNIYFNIYNKQVLKVFPYPINITEVQFAVGTVAALFMWITGIIKRPKISGAQLVAILPLAIVHTMGNLFTNMSLGKVAVSFTHTIKAMEPFFSVILSAIFLGELPTIWVVSSLLPIVGGVALASLTEASFNWAGFWSAMASNVTFQSRNVLSKKLMVKKEESLDNLNLFSIITVMSFFLLAPVTFFTEGVKITPTFLQSAGLNVNQVLTRCLFAGLCFHAYQQVSYMILAMVSPVTHSVGNCVKRVVVIVTSVLFFRTPVSPINSLGTAIALAGVFLYSQLKRLKPKPKTA

SEQ ID NO: 27452 - protein, 255 aa, Zea mays subsp. mays
  peptide (1)..(255): Ceres Seq. ID no. 12369119
  misc_feature (1)..(89): Pfam Name: Pfam Description:  Integral membrane protein DUF6
  misc_feature (1)..(255): NCBI GI NO: 29647427 NR Description: putative phosphoenolpyruvate/phosphate translocator
  misc_feature (1)..(255): NCBI GI NO: 13991929 NR Description: phosphoenolpyruvate/phosphate translocator
  misc_feature (1)..(255): NCBI GI NO: 7489743 NR Description: glucose-6-phosphate/ phosphate-translocatorprecursor homolog
  misc_feature (1)..(255): NCBI GI NO: 7489742 NR Description: glucose-6-phosphate/ phosphate-translocatorprecursor homolog
  misc_feature (1)..(254): NCBI GI NO: 7489171 NR Description: phosphate/ phosphoenolpyruvate translocator TABPPT10precursor
  misc_feature (1)..(255): NCBI GI NO: 7489170 NR Description: phosphate/ phosphoenolpyruvate translocatorprecursor
  misc_feature (1)..(255): NCBI GI NO: 1706110 NR Description: Triose phosphate/phosphate translocator
  misc_feature (1)..(255): NCBI GI NO: 15242801 NR Description: phosphate/ phosphoenolpyruvate translocatorprecursor
  misc_feature (1)..(255): NCBI GI NO: 21554233 NR Description: phosphate/ phosphoenolpyruvate translocatorprecursor
  misc_feature (1)..(255): NCBI GI NO: 1778141 NR Description: phosphate/ phosphoenolpyruvate translocatorprecursor
MWITGIIKRPKISGAQLVAILPLAIVHTMGNLFTNMSLGKVAVSFTHTIKAMEPFFSVILSAIFLGELPTIWVVSSLLPIVGGVALASLTEASFNWAGFWSAMASNVTFQSRNVLSKKLMVKKEESLDNLNLFSIITVMSFFLLAPVTFFTEGVKITPTFLQSAGLNVNQVLTRCLFAGLCFHAYQQVSYMILAMVSPVTHSVGNCVKRVVVIVTSVLFFRTPVSPINSLGTAIALAGVFLYSQLKRLKPKPKTA

SEQ ID NO: 27453 - DNA, 934 bp, Zea mays subsp. mays
  misc_feature (1)..(934): Ceres Seq. ID no. 12408029
ctcgcggtcgcagctagcgaaccctaatggagatcgctgaggccctgcaggcctacacgggcctcacacccgcggccgccgccaccatcctcgccctcatggtggccacctacctcctcgtctcctccctcttcgtcgcccccgcccccgcccccgccccactttccaagccgccccagcagcagcgcgagggggagaaggcacaggaggaggaggaggaagaaccgatgcctttcgtgtatccggaccccgtggaggtgggcgagctcacgctcgagcagctcagtgcgtatgacggcaaggacccagccaagcagatcctcattgccatccggggccaggtctacgacgtctcccgcgggaggctcttttatggccctcagggaccatattccttgtttgccgggagggatgcaacccgggccctggcattgatgtcatttgacccaaacgacctcaccggggatctggacggcctaagcgccgatgagctggaggtgttgcaagattgggaggaaaaattcaagtagaggtatccgagggtgggccaccttgcctgtcaagacgcgacagacagtggtcagaccaccgctgggcttcatcacgaggaaggggacgcctaaaactccactggtttgcctcgtcgtcctctcctctgtttttttttttttacttgctggatttcaccctgtagatctgatgtgcgcacttgtgggtgacgcagctgtcgtcgtcgtttgctgtatatgtatgtacgtgtgcggtgtgcctactgactaatgcacgcacctgctgtcccatttcttttggatctgtagcggctataaggaaattttgagcctaaaaaaaactggaggctttaggaacagcccatgttcgactcttggttgtatacgcgtgatttgtgtcatgatttgtggctttgttgttcatc

SEQ ID NO: 27454 - protein, 167 aa, Zea mays subsp. mays
  peptide (1)..(167): Ceres Seq. ID no. 12408030
  misc_feature (80)..(167): Pfam Name: Pfam Description:  Cytochrome b5-like Heme/Steroid binding domain
  misc_feature (3)..(167): NCBI GI NO: 37535798 NR Description: putative steroid membrane binding protein
  misc_feature (3)..(167): NCBI GI NO: 4960154 NR Description: putative progesterone-binding protein homolog
  misc_feature (3)..(167): NCBI GI NO: 15229044 NR Description: putative progesterone-binding protein homologAtmp2
  misc_feature (3)..(167): NCBI GI NO: 4960156 NR Description: putative progesterone-binding protein homolog
  misc_feature (3)..(167): NCBI GI NO: 15242943 NR Description: progesterone-binding protein-like
  misc_feature (2)..(167): NCBI GI NO: 37535794 NR Description: putative steroid membrane binding protein
  misc_feature (80)..(167): NCBI GI NO: 15224648 NR Description: putative steroid binding protein
  misc_feature (80)..(167): NCBI GI NO: 40889041 NR Description: Chain A
  misc_feature (80)..(167): NCBI GI NO: 18859969 NR Description: CG9066-PA [Drosophila melanogaster]
  misc_feature (73)..(167): NCBI GI NO: 40741827 NR Description: hypothetical protein AN4939.2
MEIAEALQAYTGLTPAAAATILALMVATYLLVSSLFVAPAPAPAPLSKPPQQQREGEKAQEEEEEEPMPFVYPDPVEVGELTLEQLSAYDGKDPAKQILIAIRGQVYDVSRGRLFYGPQGPYSLFAGRDATRALALMSFDPNDLTGDLDGLSADELEVLQDWEEKFK

SEQ ID NO: 27455 - protein, 143 aa, Zea mays subsp. mays
  peptide (1)..(143): Ceres Seq. ID no. 12408031
  misc_feature (56)..(143): Pfam Name: Pfam Description:  Cytochrome b5-like Heme/Steroid binding domain
  misc_feature (1)..(143): NCBI GI NO: 37535798 NR Description: putative steroid membrane binding protein
  misc_feature (1)..(143): NCBI GI NO: 4960154 NR Description: putative progesterone-binding protein homolog
  misc_feature (1)..(143): NCBI GI NO: 15229044 NR Description: putative progesterone-binding protein homologAtmp2
  misc_feature (1)..(143): NCBI GI NO: 4960156 NR Description: putative progesterone-binding protein homolog
  misc_feature (1)..(143): NCBI GI NO: 15242943 NR Description: progesterone-binding protein-like
  misc_feature (1)..(143): NCBI GI NO: 37535794 NR Description: putative steroid membrane binding protein
  misc_feature (56)..(143): NCBI GI NO: 15224648 NR Description: putative steroid binding protein
  misc_feature (56)..(143): NCBI GI NO: 40889041 NR Description: Chain A
  misc_feature (56)..(143): NCBI GI NO: 18859969 NR Description: CG9066-PA [Drosophila melanogaster]
  misc_feature (49)..(143): NCBI GI NO: 40741827 NR Description: hypothetical protein AN4939.2
MVATYLLVSSLFVAPAPAPAPLSKPPQQQREGEKAQEEEEEEPMPFVYPDPVEVGELTLEQLSAYDGKDPAKQILIAIRGQVYDVSRGRLFYGPQGPYSLFAGRDATRALALMSFDPNDLTGDLDGLSADELEVLQDWEEKFK

SEQ ID NO: 27456 - protein, 100 aa, Zea mays subsp. mays
  peptide (1)..(100): Ceres Seq. ID no. 12408032
  misc_feature (13)..(100): Pfam Name: Pfam Description:  Cytochrome b5-like Heme/Steroid binding domain
  misc_feature (1)..(100): NCBI GI NO: 37535798 NR Description: putative steroid membrane binding protein
  misc_feature (1)..(100): NCBI GI NO: 4960154 NR Description: putative progesterone-binding protein homolog
  misc_feature (1)..(100): NCBI GI NO: 15229044 NR Description: putative progesterone-binding protein homologAtmp2
  misc_feature (1)..(100): NCBI GI NO: 4960156 NR Description: putative progesterone-binding protein homolog
  misc_feature (1)..(100): NCBI GI NO: 15242943 NR Description: progesterone-binding protein-like
  misc_feature (1)..(100): NCBI GI NO: 37535794 NR Description: putative steroid membrane binding protein
  misc_feature (13)..(100): NCBI GI NO: 15224648 NR Description: putative steroid binding protein
  misc_feature (13)..(100): NCBI GI NO: 40889041 NR Description: Chain A
  misc_feature (13)..(100): NCBI GI NO: 18859969 NR Description: CG9066-PA [Drosophila melanogaster]
  misc_feature (6)..(100): NCBI GI NO: 40741827 NR Description: hypothetical protein AN4939.2
MPFVYPDPVEVGELTLEQLSAYDGKDPAKQILIAIRGQVYDVSRGRLFYGPQGPYSLFAGRDATRALALMSFDPNDLTGDLDGLSADELEVLQDWEEKFK

SEQ ID NO: 27457 - DNA, 1338 bp, Zea mays subsp. mays
  misc_feature (1)..(1338): Ceres Seq. ID no. 12344124
gtccccgccccactgctgcccattcctctcatcccagcgaacgaccctccagcacgccatccgcttagccgccccggagcattgccatcgtcgccgccaccttctatcccagtgtggagcgggagagaacccgtctgcactcagaagctggtttaatccggtgggagcacaagtcgtgtctaaaatattcagattgctaagatgttgggtcatggtctagtaactgatccctcaagaaccttacgatgtccagttaattcaagggtatcaagtgcacccttggggcttgtttcttcgttgaatttcaacaggggatgcaagggaaagaacaaaatattcaatgtggatagacacaccaagtatagtacttctttctgttatgcgccaagaaatgccagaatcacaccactagcaactgcatcatttggggatatggctgattcttcaactcctatctttccccgaatccatgtaaaagatccatatcagcgtctcggaatcagcagggaagcatcagaagaagaaattcgagctgctaggaactatctgataagcaagtatgcaggccacaagccaagtgttgatgcaattgagtctgcccatgacaggattatcatgcagagtttctttgataggaaaaaaccaaaaatgaatctcaagaaaaaatttagggaacttagtcagtcacgtgcagtgaaggctattcaaggcagatttcaaacaccacgtagcaaagtcatttggcagacagctattgcttttgtcttgcttggagtgcttacccttgctttccctaccgaagaagggccaaccctccaggtggccatctcttgtgcagcaaatatctatttcatttatcagagggtcaaaagtggatggcgagcattcttttatgggtttggttctttctttgcttcctggttccttggcaccttcttgatggtatctgtaattccccctatactccccggtccaagaaacttggaagtgagcaccgcgtgtgttacttatgtgctccttttcatatcgtcgaccttcttgaagtaagagatctttgtgtttccatgttagcgcaaagtcttgcaggagttataaacatggtatcatgcttcaaatagcttgtacaatccatcggctttttctttgcttgtttcacgtttatggagttggaaatgctagttccttagtgagttgatagtagttttcaggttgcaatgtgagatgtagaacgttttttttttgctttggcccgtgatatcttgagcagggtctaacacctcaagtaggtattttcggttgatgtattaaatacagttgtgttcgaatagatcatatgag

SEQ ID NO: 27458 - protein, 281 aa, Zea mays subsp. mays
  peptide (1)..(281): Ceres Seq. ID no. 12344125
  misc_feature (63)..(281): NCBI GI NO: 11357625 NR Description: hypothetical protein F24M12
  misc_feature (63)..(281): NCBI GI NO: 18409276 NR Description: putative protein; protein id: At3g51140
  misc_feature (82)..(281): NCBI GI NO: 15237199 NR Description: putative protein; protein id: At5g23040.1
  misc_feature (170)..(281): NCBI GI NO: 37573058 NR Description: unknown protein
  misc_feature (92)..(281): NCBI GI NO: 17230751 NR Description: hypothetical protein [Nostoc sp. PCC 7120]
  misc_feature (92)..(281): NCBI GI NO: 23129945 NR Description: hypothetical protein [Nostoc punctiforme]
  misc_feature (95)..(281): NCBI GI NO: 23039527 NR Description: hypothetical protein
  misc_feature (93)..(250): NCBI GI NO: 37520608 NR Description: hypothetical protein glr1039
  misc_feature (94)..(281): NCBI GI NO: 16329734 NR Description: unknown protein [Synechocystis sp. PCC 6803]
MLGHGLVTDPSRTLRCPVNSRVSSAPLGLVSSLNFNRGCKGKNKIFNVDRHTKYSTSFCYAPRNARITPLATASFGDMADSSTPIFPRIHVKDPYQRLGISREASEEEIRAARNYLISKYAGHKPSVDAIESAHDRIIMQSFFDRKKPKMNLKKKFRELSQSRAVKAIQGRFQTPRSKVIWQTAIAFVLLGVLTLAFPTEEGPTLQVAISCAANIYFIYQRVKSGWRAFFYGFGSFFASWFLGTFLMVSVIPPILPGPRNLEVSTACVTYVLLFISSTFLK

SEQ ID NO: 27459 - protein, 204 aa, Zea mays subsp. mays
  peptide (1)..(204): Ceres Seq. ID no. 12344126
  misc_feature (1)..(204): NCBI GI NO: 11357625 NR Description: hypothetical protein F24M12
  misc_feature (1)..(204): NCBI GI NO: 18409276 NR Description: putative protein; protein id: At3g51140
  misc_feature (5)..(204): NCBI GI NO: 15237199 NR Description: putative protein; protein id: At5g23040.1
  misc_feature (93)..(204): NCBI GI NO: 37573058 NR Description: unknown protein
  misc_feature (15)..(204): NCBI GI NO: 17230751 NR Description: hypothetical protein [Nostoc sp. PCC 7120]
  misc_feature (15)..(204): NCBI GI NO: 23129945 NR Description: hypothetical protein [Nostoc punctiforme]
  misc_feature (18)..(204): NCBI GI NO: 23039527 NR Description: hypothetical protein
  misc_feature (16)..(173): NCBI GI NO: 37520608 NR Description: hypothetical protein glr1039
  misc_feature (17)..(204): NCBI GI NO: 16329734 NR Description: unknown protein [Synechocystis sp. PCC 6803]
MADSSTPIFPRIHVKDPYQRLGISREASEEEIRAARNYLISKYAGHKPSVDAIESAHDRIIMQSFFDRKKPKMNLKKKFRELSQSRAVKAIQGRFQTPRSKVIWQTAIAFVLLGVLTLAFPTEEGPTLQVAISCAANIYFIYQRVKSGWRAFFYGFGSFFASWFLGTFLMVSVIPPILPGPRNLEVSTACVTYVLLFISSTFLK

SEQ ID NO: 27460 - protein, 143 aa, Zea mays subsp. mays
  peptide (1)..(143): Ceres Seq. ID no. 12344127
  misc_feature (1)..(143): NCBI GI NO: 11357625 NR Description: hypothetical protein F24M12
  misc_feature (1)..(143): NCBI GI NO: 18409276 NR Description: putative protein; protein id: At3g51140
  misc_feature (1)..(143): NCBI GI NO: 15237199 NR Description: putative protein; protein id: At5g23040.1
  misc_feature (32)..(143): NCBI GI NO: 37573058 NR Description: unknown protein
  misc_feature (1)..(143): NCBI GI NO: 17230751 NR Description: hypothetical protein [Nostoc sp. PCC 7120]
  misc_feature (1)..(143): NCBI GI NO: 23129945 NR Description: hypothetical protein [Nostoc punctiforme]
  misc_feature (1)..(143): NCBI GI NO: 23039527 NR Description: hypothetical protein
  misc_feature (1)..(112): NCBI GI NO: 37520608 NR Description: hypothetical protein glr1039
  misc_feature (1)..(143): NCBI GI NO: 16329734 NR Description: unknown protein [Synechocystis sp. PCC 6803]
MQSFFDRKKPKMNLKKKFRELSQSRAVKAIQGRFQTPRSKVIWQTAIAFVLLGVLTLAFPTEEGPTLQVAISCAANIYFIYQRVKSGWRAFFYGFGSFFASWFLGTFLMVSVIPPILPGPRNLEVSTACVTYVLLFISSTFLK

SEQ ID NO: 27461 - DNA, 1517 bp, Zea mays subsp. mays
  misc_feature (1)..(1517): Ceres Seq. ID no. 12365543
aagcatcaccatcgacggggcgagggtacacggaacaccagccgtccgatccatatcgacggccaggtaaatcggaggaagcccggaagaagtctccttccagcaccacccttctctcctccgcatccccccggccggttcctccttgccgccgccgtcgctgtgccaagccttgcgaataaccgttgtccgggctgtggggggcagacatggcgctccggaggctgctgcaggggagtgtcctgccgcgggtaaccggcagggtttcggcaccggccgtggcgccgttttcaacggagtccggagagaccatccgtgccacgctctttccgggcgacggcatcgggccagagattgccgagtctgtcaagcaggtattcaatgttgcaggggtaccaattgaatgggaagaacactatgttggtacagaagttgatcccagaacagagagttttttgacttgggaaagcctggagtcagtgcgtagaaacaaagttggcttgaaaggtcctatggctacacctattggaaagggtcatcgatctttgaatcttacattaaggaaagaacttgggctctatgccaatgtcaggccttgcaacagcctcccaggctacaagaccagatacgatgatgttaaccttgtgacaattcgtgaaaatactgaaggagaatatagtggtcttgagcatcaggttgtgagaggtgttgtagaaagtttgaaaattattacccgccaagcaagtttgagagtggcagaatatgcttttcattatgccaaggccaatggccgggaaagggtctctgcgattcacaaggccaatattatgaggaagacagatggtcttttcctcaagtgttgccgtgaagtggctgagacgtaccctgaaattcaatacgaggaggtcatcattgacaattgttgtatgacgcttgtgaagaatcctggtctttttgatgtattagtgatgccaaacctctatggtgacatcattagcgatctatgtgctggtttgattgggggcttgggcctaacacccagttgcaatattggtgaaggtggcatttgtctagcagaagctgttcatggttctgctcctgatattgctggcaagaaccttgcgaacccgactgctcttatgctgagtgctgtcatgatgttgcgccacttgcaattcaacgacaaagcagaccggatccacaacgccatcctccagactattgctggggggaagtacaggactgctgatcttggtggaaaggcatcgacatccgagtttacaaatgcagtctgtgatcacatctgagaatcggatgtggttctttccttctgattgttctgtcttcctaatatctttttgtcgcatatggggaggagctttagctttaagaggttaactggcagcacctcgaacttctttgggtggttaacacggtttgagaccgtcaaatatttttgtcacatatcttgctgtccagaaattttttcaacttcagaatcgagtaaataattctgc

SEQ ID NO: 27462 - protein, 365 aa, Zea mays subsp. mays
  peptide (1)..(365): Ceres Seq. ID no. 12365544
  misc_feature (36)..(361): Pfam Name: Pfam Description:  Isocitrate/isopropylmalate dehydrogenase
  misc_feature (1)..(365): NCBI GI NO: 34903262 NR Description: unnamed protein product
  misc_feature (27)..(365): NCBI GI NO: 7431333 NR Description: probable isocitrate dehydrogenase (NAD) (EC1
  misc_feature (1)..(365): NCBI GI NO: 11251553 NR Description: 3-isopropylmalate dehydrogenase-like protein -Arabidopsis thaliana
  misc_feature (1)..(365): NCBI GI NO: 18414179 NR Description: putative protein; protein id: At5g03290
  misc_feature (37)..(365): NCBI GI NO: 28974492 NR Description: NAD-dependent isocitrate dehydrogenase alpha subunit
  misc_feature (27)..(342): NCBI GI NO: 266463 NR Description: 3-isopropylmalate dehydrogenase
  misc_feature (27)..(342): NCBI GI NO: 7427677 NR Description: 3-isopropylmalate dehydrogenase (EC 1
  misc_feature (4)..(365): NCBI GI NO: 21536667 NR Description: putative (NAD+) isocitrate dehydrogenase
  misc_feature (10)..(365): NCBI GI NO: 39850137 NR Description: Unknown (protein for MGC:76128)
  misc_feature (31)..(365): NCBI GI NO: 18250284 NR Description: isocitrate dehydrogenase 3
MALRRLLQGSVLPRVTGRVSAPAVAPFSTESGETIRATLFPGDGIGPEIAESVKQVFNVAGVPIEWEEHYVGTEVDPRTESFLTWESLESVRRNKVGLKGPMATPIGKGHRSLNLTLRKELGLYANVRPCNSLPGYKTRYDDVNLVTIRENTEGEYSGLEHQVVRGVVESLKIITRQASLRVAEYAFHYAKANGRERVSAIHKANIMRKTDGLFLKCCREVAETYPEIQYEEVIIDNCCMTLVKNPGLFDVLVMPNLYGDIISDLCAGLIGGLGLTPSCNIGEGGICLAEAVHGSAPDIAGKNLANPTALMLSAVMMLRHLQFNDKADRIHNAILQTIAGGKYRTADLGGKASTSEFTNAVCDHI

SEQ ID NO: 27463 - protein, 264 aa, Zea mays subsp. mays
  peptide (1)..(264): Ceres Seq. ID no. 12365545
  misc_feature (1)..(260): Pfam Name: Pfam Description:  Isocitrate/isopropylmalate dehydrogenase
  misc_feature (1)..(264): NCBI GI NO: 34903262 NR Description: unnamed protein product
  misc_feature (1)..(264): NCBI GI NO: 7431333 NR Description: probable isocitrate dehydrogenase (NAD) (EC1
  misc_feature (1)..(264): NCBI GI NO: 11251553 NR Description: 3-isopropylmalate dehydrogenase-like protein -Arabidopsis thaliana
  misc_feature (1)..(264): NCBI GI NO: 18414179 NR Description: putative protein; protein id: At5g03290
  misc_feature (1)..(264): NCBI GI NO: 28974492 NR Description: NAD-dependent isocitrate dehydrogenase alpha subunit
  misc_feature (1)..(241): NCBI GI NO: 266463 NR Description: 3-isopropylmalate dehydrogenase
  misc_feature (1)..(241): NCBI GI NO: 7427677 NR Description: 3-isopropylmalate dehydrogenase (EC 1
  misc_feature (1)..(264): NCBI GI NO: 21536667 NR Description: putative (NAD+) isocitrate dehydrogenase
  misc_feature (1)..(264): NCBI GI NO: 39850137 NR Description: Unknown (protein for MGC:76128)
  misc_feature (1)..(264): NCBI GI NO: 18250284 NR Description: isocitrate dehydrogenase 3
MATPIGKGHRSLNLTLRKELGLYANVRPCNSLPGYKTRYDDVNLVTIRENTEGEYSGLEHQVVRGVVESLKIITRQASLRVAEYAFHYAKANGRERVSAIHKANIMRKTDGLFLKCCREVAETYPEIQYEEVIIDNCCMTLVKNPGLFDVLVMPNLYGDIISDLCAGLIGGLGLTPSCNIGEGGICLAEAVHGSAPDIAGKNLANPTALMLSAVMMLRHLQFNDKADRIHNAILQTIAGGKYRTADLGGKASTSEFTNAVCDHI

SEQ ID NO: 27464 - DNA, 1622 bp, Zea mays subsp. mays
  misc_feature (1)..(1622): Ceres Seq. ID no. 12344128
aaaaaaaaaacaccaacccacccaccagcctattatactcaacgcgacgaactcatctcaccaccgcgccctccgccggatggagcggccagacgtgacggtcaagcaggaggaagacgaagtggtggtggtgttggacgccgacggcgatgcttgcgggcactggccgggagcccgcgcggcgccggagccttggcagacgccggtgggatccgcggttccgccgttccttgcgaagacgttcgagcttgtggaggacccggcgacggacgccgtgatatcgtggggcgccgcgcggaacagcttcgtggtgtgggatccacacgccttcgcggcggggcaccttccgcgccgcttcaagcacggcaacttctccaccttcctccggcagctgaacacctacgtccgtaatcacatatctcaattcgtaattaacaaacattgcaatggattccgcaaggtgagcccggacaggtgggagttcgcgcacgccgacttcctcgcggggcagcggcacctcctcgtgaacatccggcggcgccgcgggggcgtcgcgggacccacagcatctccgtcttcggcgggagccggcggcgaccgtgatagcgagctcgagaggctgcggcgggaccgggaggcgctggcgagggagctgacgcggctgcggcgcgagcaggaggaggcccgcgcgcagctgctggacatggagcggcgcgtgcggggcacggagcggcggcaggagcagtgcaccgccttcctggcgcgcgccatccggaacccgaccttcctggacggcctgctggcgcgccgctgtggcgcgcacgtagaggccggcaggaagcggcggctgctcgatgccgctgcggccggccctgacccagcggacgtcctcgacatcgaggagctggcgatggttgcgggcgccgaggtcggtgtggcttccatcccagccgttgcagcggcgcagatttccaacacagccaacgccacggacatgatatggtacgagcttctcggggaggagcaggtggagatcgacgccgaggtgcacgacctcgtcgtggccgccgcggctgccactgatgagttggcgcagccgtgggcggagatggacgagaaagaggttgcggagcttgtgcggcagatagactgccttgcctcgccgagtccctgatcagtgatcaccacgaggtggagaccgtgcagctagttgcacctgtaatatggtgctccctacggagagcaactacctaccactagtccactattagccatgcattgcctgtgtcactggcaatgccattggcatatgacggctgctgaagtacaatggtggcgctggtactgtggtacggtactgcagtgcgccacgctctggattggaccctaatggtcatttggtgtgtagtgtcgttagccttgctgtttgattgtggttattggattattaggtctgcgatatgctaatttggattctgcatctgttttgtgggatccgacagtggcggtatgctgcacacaaaccggccgtggtgatggatgcagcagcctgatccagttagttgatgtattcttaagaatttgaccaaagagcaactctaaccaagccttaaatttttgcc

SEQ ID NO: 27465 - protein, 390 aa, Zea mays subsp. mays
  peptide (1)..(390): Ceres Seq. ID no. 12344129
  misc_feature (74)..(253): Pfam Name: Pfam Description:  HSF-type DNA-binding
  misc_feature (31)..(387): NCBI GI NO: 15225255 NR Description: putative heat shock transcription factor
  misc_feature (27)..(296): NCBI GI NO: 28971956 NR Description: putative heat shock transcription factor
  misc_feature (74)..(385): NCBI GI NO: 729774 NR Description: HEAT SHOCK FACTOR PROTEIN HSF30
  misc_feature (32)..(287): NCBI GI NO: 30017583 NR Description: putative heat shock factor
  misc_feature (27)..(296): NCBI GI NO: 33087081 NR Description: heat stress protein
  misc_feature (60)..(390): NCBI GI NO: 37534406 NR Description: putative auxin-induced protein
  misc_feature (56)..(267): NCBI GI NO: 34902614 NR Description: Putative heat shock protein
  misc_feature (62)..(267): NCBI GI NO: 20521264 NR Description: putative heat shock transcription factor
  misc_feature (47)..(295): NCBI GI NO: 11386827 NR Description: Heat shock factor protein HSF8
  misc_feature (48)..(295): NCBI GI NO: 729775 NR Description: HEAT SHOCK FACTOR PROTEIN HSF8
KKKHQPTHQPIILNATNSSHHRALRRMERPDVTVKQEEDEVVVVLDADGDACGHWPGARAAPEPWQTPVGSAVPPFLAKTFELVEDPATDAVISWGAARNSFVVWDPHAFAAGHLPRRFKHGNFSTFLRQLNTYVRNHISQFVINKHCNGFRKVSPDRWEFAHADFLAGQRHLLVNIRRRRGGVAGPTASPSSAGAGGDRDSELERLRRDREALARELTRLRREQEEARAQLLDMERRVRGTERRQEQCTAFLARAIRNPTFLDGLLARRCGAHVEAGRKRRLLDAAAAGPDPADVLDIEELAMVAGAEVGVASIPAVAAAQISNTANATDMIWYELLGEEQVEIDAEVHDLVVAAAAATDELAQPWAEMDEKEVAELVRQIDCLASPSP

SEQ ID NO: 27466 - protein, 364 aa, Zea mays subsp. mays
  peptide (1)..(364): Ceres Seq. ID no. 12344130
  misc_feature (48)..(227): Pfam Name: Pfam Description:  HSF-type DNA-binding
  misc_feature (5)..(361): NCBI GI NO: 15225255 NR Description: putative heat shock transcription factor
  misc_feature (1)..(270): NCBI GI NO: 28971956 NR Description: putative heat shock transcription factor
  misc_feature (48)..(359): NCBI GI NO: 729774 NR Description: HEAT SHOCK FACTOR PROTEIN HSF30
  misc_feature (6)..(261): NCBI GI NO: 30017583 NR Description: putative heat shock factor
  misc_feature (1)..(270): NCBI GI NO: 33087081 NR Description: heat stress protein
  misc_feature (34)..(364): NCBI GI NO: 37534406 NR Description: putative auxin-induced protein
  misc_feature (30)..(241): NCBI GI NO: 34902614 NR Description: Putative heat shock protein
  misc_feature (36)..(241): NCBI GI NO: 20521264 NR Description: putative heat shock transcription factor
  misc_feature (21)..(269): NCBI GI NO: 11386827 NR Description: Heat shock factor protein HSF8
  misc_feature (22)..(269): NCBI GI NO: 729775 NR Description: HEAT SHOCK FACTOR PROTEIN HSF8
MERPDVTVKQEEDEVVVVLDADGDACGHWPGARAAPEPWQTPVGSAVPPFLAKTFELVEDPATDAVISWGAARNSFVVWDPHAFAAGHLPRRFKHGNFSTFLRQLNTYVRNHISQFVINKHCNGFRKVSPDRWEFAHADFLAGQRHLLVNIRRRRGGVAGPTASPSSAGAGGDRDSELERLRRDREALARELTRLRREQEEARAQLLDMERRVRGTERRQEQCTAFLARAIRNPTFLDGLLARRCGAHVEAGRKRRLLDAAAAGPDPADVLDIEELAMVAGAEVGVASIPAVAAAQISNTANATDMIWYELLGEEQVEIDAEVHDLVVAAAAATDELAQPWAEMDEKEVAELVRQIDCLASPSP

SEQ ID NO: 27467 - DNA, 1187 bp, Zea mays subsp. mays
  misc_feature (1)..(1187): Ceres Seq. ID no. 12409333
ccaacagcccgcatcgctcactccgtcactcactcggcgcggcgcccatccccgcggttctcacgagcgcgcgcgcctgcgtccggcgccgtccgccatggcgtcgtccaagcctttattccccttccccgtccccgcccccgacccgtccgacgaggtcgtgcgcgagttcggcccgctgctccgggtctacaagagcggccgcatcgagcggcccctggtggctccgcccgtggagcctggccacgacgccgccacgggggtccaatccaaggacgtccacctcggctcctactcggcccgcctctacctgccccccgtggccgacgccggtgccaagctgcccgtcgtcgtgttcgtgcacggcggcggcttcgtggccgagtccgccgcctcgcccaactaccacctcttcctcaacaggctcgccgccgcctgccccgcgctcgcggtctccgtcgactaccgcctggcgcccgagcacccgctcccggcggggtacgacgactgcctcgccgcgctcaagtgggtgctttccgccgccgacccctgggtcgccgcccacggggatctcgcgcgcgtcttcgtcgccggggacagcgccggcggcaacgtctgccactacctcgccatccacccggacgtcgtccaggcgcagcagcagggctgcccgccgccgctcaagggcgccgtgctcatccacccctggttctggggctccgaggccgtgggcgaggagcccagggaccccgccgtgcgcaccatgggcgccggactctggttcttcgcgtgccccgatgctaatagcatggaagacccgcggatgaaccccatggcgcccgccgcaccgggactccacacgctggcgtgtgagcgcgtcatggtgtgtaccgcggagggcgacttcctcaggtggcgcggccgcgcgtacgccgaggcggtggccgcggcgaggggaggccgcctggggcaggccgccggcgtcgagctgctggagaccatgggagagggccatgtcttcttcctcttcaaacccgactgcgacaaggccaaggagatgctggacaagatggcggctttcatcaatgcgccgtgaacgtgaacgtgatccgtgacgcgtgcgcccttgttcctttgtgtttgcgtgacaatgtggaaaataaaataatatatttcagctgttttgg

SEQ ID NO: 27468 - protein, 364 aa, Zea mays subsp. mays
  peptide (1)..(364): Ceres Seq. ID no. 12409334
  misc_feature (102)..(159): Pfam Name: Pfam Description:  Carboxylesterase
  misc_feature (51)..(363): NCBI GI NO: 38344841 NR Description: OSJNBa0064H22.22
  misc_feature (52)..(362): NCBI GI NO: 21536771 NR Description: unknown [Arabidopsis thaliana]
  misc_feature (52)..(362): NCBI GI NO: 18401743 NR Description: expressed protein; protein id: At1g47480
  misc_feature (52)..(361): NCBI GI NO: 18086341 NR Description: AT3g48690/T8P19_200 [Arabidopsis thaliana]
  misc_feature (52)..(361): NCBI GI NO: 15228426 NR Description: putative protein; protein id: At3g48700.1
  misc_feature (52)..(361): NCBI GI NO: 15228425 NR Description: putative protein; protein id: At3g48690
  misc_feature (51)..(362): NCBI GI NO: 15227669 NR Description: putative esterase; protein id: At2g03550.1
  misc_feature (59)..(362): NCBI GI NO: 28393060 NR Description: putative esterase [Arabidopsis thaliana]
  misc_feature (50)..(364): NCBI GI NO: 34393904 NR Description: putative cell death associated protein
  misc_feature (59)..(364): NCBI GI NO: 34393975 NR Description: putative PrMC3
QQPASLTPSLTRRGAHPRGSHERARLRPAPSAMASSKPLFPFPVPAPDPSDEVVREFGPLLRVYKSGRIERPLVAPPVEPGHDAATGVQSKDVHLGSYSARLYLPPVADAGAKLPVVVFVHGGGFVAESAASPNYHLFLNRLAAACPALAVSVDYRLAPEHPLPAGYDDCLAALKWVLSAADPWVAAHGDLARVFVAGDSAGGNVCHYLAIHPDVVQAQQQGCPPPLKGAVLIHPWFWGSEAVGEEPRDPAVRTMGAGLWFFACPDANSMEDPRMNPMAPAAPGLHTLACERVMVCTAEGDFLRWRGRAYAEAVAAARGGRLGQAAGVELLETMGEGHVFFLFKPDCDKAKEMLDKMAAFINAP

SEQ ID NO: 27469 - protein, 332 aa, Zea mays subsp. mays
  peptide (1)..(332): Ceres Seq. ID no. 12409335
  misc_feature (70)..(127): Pfam Name: Pfam Description:  Carboxylesterase
  misc_feature (19)..(331): NCBI GI NO: 38344841 NR Description: OSJNBa0064H22.22
  misc_feature (20)..(330): NCBI GI NO: 21536771 NR Description: unknown [Arabidopsis thaliana]
  misc_feature (20)..(330): NCBI GI NO: 18401743 NR Description: expressed protein; protein id: At1g47480
  misc_feature (20)..(329): NCBI GI NO: 18086341 NR Description: AT3g48690/T8P19_200 [Arabidopsis thaliana]
  misc_feature (20)..(329): NCBI GI NO: 15228426 NR Description: putative protein; protein id: At3g48700.1
  misc_feature (20)..(329): NCBI GI NO: 15228425 NR Description: putative protein; protein id: At3g48690
  misc_feature (19)..(330): NCBI GI NO: 15227669 NR Description: putative esterase; protein id: At2g03550.1
  misc_feature (27)..(330): NCBI GI NO: 28393060 NR Description: putative esterase [Arabidopsis thaliana]
  misc_feature (18)..(332): NCBI GI NO: 34393904 NR Description: putative cell death associated protein
  misc_feature (27)..(332): NCBI GI NO: 34393975 NR Description: putative PrMC3
MASSKPLFPFPVPAPDPSDEVVREFGPLLRVYKSGRIERPLVAPPVEPGHDAATGVQSKDVHLGSYSARLYLPPVADAGAKLPVVVFVHGGGFVAESAASPNYHLFLNRLAAACPALAVSVDYRLAPEHPLPAGYDDCLAALKWVLSAADPWVAAHGDLARVFVAGDSAGGNVCHYLAIHPDVVQAQQQGCPPPLKGAVLIHPWFWGSEAVGEEPRDPAVRTMGAGLWFFACPDANSMEDPRMNPMAPAAPGLHTLACERVMVCTAEGDFLRWRGRAYAEAVAAARGGRLGQAAGVELLETMGEGHVFFLFKPDCDKAKEMLDKMAAFINAP

SEQ ID NO: 27470 - protein, 274 aa, Zea mays subsp. mays
  peptide (1)..(274): Ceres Seq. ID no. 12409336
  misc_feature (42)..(229): Pfam Name: Pfam Description:  Equine herpesvirus glycoprotein gp2
  misc_feature (31)..(274): NCBI GI NO: 23017082 NR Description: hypothetical protein [Thermobifida fusca]
  misc_feature (36)..(274): NCBI GI NO: 13592175 NR Description: ppg3 [Leishmania major]
  misc_feature (13)..(274): NCBI GI NO: 27375632 NR Description: blr0521 [Bradyrhizobium japonicum]
  misc_feature (36)..(274): NCBI GI NO: 13592175 NR Description: ppg3 [Leishmania major]
  misc_feature (36)..(274): NCBI GI NO: 13592175 NR Description: ppg3 [Leishmania major]
  misc_feature (14)..(264): NCBI GI NO: 23017082 NR Description: hypothetical protein [Thermobifida fusca]
  misc_feature (36)..(274): NCBI GI NO: 13592175 NR Description: ppg3 [Leishmania major]
  misc_feature (9)..(274): NCBI GI NO: 27375632 NR Description: blr0521 [Bradyrhizobium japonicum]
  misc_feature (31)..(274): NCBI GI NO: 188864 NR Description: mucin
  misc_feature (21)..(274): NCBI GI NO: 28574039 NR Description: Salivary gland secretion 1 CG3047-PA
NSPHRSLRHSLGAAPIPAVLTSARACVRRRPPWRRPSLYSPSPSPPPTRPTRSCASSARCSGSTRAAASSGPWWLRPWSLATTPPRGSNPRTSTSAPTRPASTCPPWPTPVPSCPSSCSCTAAASWPSPPPRPTTTSSSTGSPPPAPRSRSPSTTAWRPSTRSRRGTTTASPRSSGCFPPPTPGSPPTGISRASSSPGTAPAATSATTSPSTRTSSRRSSRAARRRSRAPCSSTPGSGAPRPWARSPGTPPCAPWAPDSGSSRAPMLIAWKTRG

SEQ ID NO: 27471 - DNA, 1399 bp, Zea mays subsp. mays
  misc_feature (1)..(1399): Ceres Seq. ID no. 12349156
acccgattcaaacggtttcaaaagcgcgaccccaccgcagcccgcagggtccacggctctcgtttccgcccgcgccacccgccatgtcgtccccgccgcgggggcagcccgccaccgccgccgtgccggcggtcgcggccgccacgtccccgcagttgcctgcggcgtcccacacgctcccccgcgcgttcctcgccacatcctctccccgtgccatagtggcagcaccggcgcccccgctattcaccggtcggccgctgaaccctaacccaccggcccacggctcctccgtgccccacggcatcctctaccccgtcctgaaatccgcctccacgtccaactccgcggccgcggccgtgacagcgcagctccgccgcgttcctcccatggccgtggggtaccctcggacccacgccgtcgccatccctattgcacagcagcagcagcccctggtgcacgcgcaaccccggtccttcgcggccgtgcctcgggcccttgtgactggcgtgtcgacggggtccgaacagcctccccgaggagttcctataggctcgcagcccaaggttaatccagtaccacctgttggcccatccaatgagcagagtaacccaaaagacagggaaaagagcagagaagaacctacagttgtggtgattaatgaccgcaaagttaacctgctggatagtgagtcgggatccttttatgctctctgtcgatcttgggttcgtaatggtgttccacatgaaagtcagccaagctttggaaatggtgaaccacttcttccaagacctttgcctgcttcagttgtagattctagaatatcagacaaggacgataatgatgttgcaggtgaagattcagatgaagagccacagaagaatgccaacggtgaatacaatacaagtgatttattgaagcagcatgtaaagcgtgcgaaaaggatacgtgctgggttgcaaaaggatcggcttcgtcggattgaaagatacaagcaacgccttgcacttcttttgtagaatcggcctgtgactgtataaagctgaaaccataggtgtttgtcttgcaggttttaacttccgtattggaatttgttaagatgttttattgactagcattgtatgttaggaccatctggatgttttattgccaacgttatctaataaaatgtgaaaaagcctttagctaagttggttggatgatctgagtagcactattaaagttttgagtatggtgccactgtgcatgggtgagacaaaggttcgaagttcgaaggttttctcgagctgcatgagaagatcttaaatgtaatgtaggtcttcttaaaggtaatgccgttgaggtggtcttaccatatatgtggattttttttatctagtgaaatgaaactgaaatcatagtc

SEQ ID NO: 27472 - protein, 337 aa, Zea mays subsp. mays
  peptide (1)..(337): Ceres Seq. ID no. 12349157
  misc_feature (10)..(204): Pfam Name: Pfam Description:  Atrophin-1 family
  misc_feature (5)..(337): NCBI GI NO: 30685461 NR Description: proline-rich protein family [Arabidopsis thaliana]
  misc_feature (5)..(337): NCBI GI NO: 7487298 NR Description: hypothetical protein At2g32840
  misc_feature (13)..(337): NCBI GI NO: 18390456 NR Description: expressed protein; protein id: At1g04930
  misc_feature (148)..(337): NCBI GI NO: 20466692 NR Description: unknown protein [Arabidopsis thaliana]
PIQTVSKARPHRSPQGPRLSFPPAPPAMSSPPRGQPATAAVPAVAAATSPQLPAASHTLPRAFLATSSPRAIVAAPAPPLFTGRPLNPNPPAHGSSVPHGILYPVLKSASTSNSAAAAVTAQLRRVPPMAVGYPRTHAVAIPIAQQQQPLVHAQPRSFAAVPRALVTGVSTGSEQPPRGVPIGSQPKVNPVPPVGPSNEQSNPKDREKSREEPTVVVINDRKVNLLDSESGSFYALCRSWVRNGVPHESQPSFGNGEPLLPRPLPASVVDSRISDKDDNDVAGEDSDEEPQKNANGEYNTSDLLKQHVKRAKRIRAGLQKDRLRRIERYKQRLALLL

SEQ ID NO: 27473 - protein, 310 aa, Zea mays subsp. mays
  peptide (1)..(310): Ceres Seq. ID no. 12349158
  misc_feature (1)..(177): Pfam Name: Pfam Description:  Atrophin-1 family
  misc_feature (1)..(310): NCBI GI NO: 30685461 NR Description: proline-rich protein family [Arabidopsis thaliana]
  misc_feature (1)..(310): NCBI GI NO: 7487298 NR Description: hypothetical protein At2g32840
  misc_feature (1)..(310): NCBI GI NO: 18390456 NR Description: expressed protein; protein id: At1g04930
  misc_feature (121)..(310): NCBI GI NO: 20466692 NR Description: unknown protein [Arabidopsis thaliana]
MSSPPRGQPATAAVPAVAAATSPQLPAASHTLPRAFLATSSPRAIVAAPAPPLFTGRPLNPNPPAHGSSVPHGILYPVLKSASTSNSAAAAVTAQLRRVPPMAVGYPRTHAVAIPIAQQQQPLVHAQPRSFAAVPRALVTGVSTGSEQPPRGVPIGSQPKVNPVPPVGPSNEQSNPKDREKSREEPTVVVINDRKVNLLDSESGSFYALCRSWVRNGVPHESQPSFGNGEPLLPRPLPASVVDSRISDKDDNDVAGEDSDEEPQKNANGEYNTSDLLKQHVKRAKRIRAGLQKDRLRRIERYKQRLALLL

SEQ ID NO: 27474 - protein, 209 aa, Zea mays subsp. mays
  peptide (1)..(209): Ceres Seq. ID no. 12349159
  misc_feature (1)..(76): Pfam Name: Pfam Description:  Atrophin-1 family
  misc_feature (1)..(209): NCBI GI NO: 30685461 NR Description: proline-rich protein family [Arabidopsis thaliana]
  misc_feature (1)..(209): NCBI GI NO: 7487298 NR Description: hypothetical protein At2g32840
  misc_feature (1)..(209): NCBI GI NO: 18390456 NR Description: expressed protein; protein id: At1g04930
  misc_feature (20)..(209): NCBI GI NO: 20466692 NR Description: unknown protein [Arabidopsis thaliana]
MAVGYPRTHAVAIPIAQQQQPLVHAQPRSFAAVPRALVTGVSTGSEQPPRGVPIGSQPKVNPVPPVGPSNEQSNPKDREKSREEPTVVVINDRKVNLLDSESGSFYALCRSWVRNGVPHESQPSFGNGEPLLPRPLPASVVDSRISDKDDNDVAGEDSDEEPQKNANGEYNTSDLLKQHVKRAKRIRAGLQKDRLRRIERYKQRLALLL

SEQ ID NO: 27475 - DNA, 1177 bp, Zea mays subsp. mays
  misc_feature (1)..(1177): Ceres Seq. ID no. 12406908
gcaacagacccccgcccacgaccacacgcaggcagcaagcagcagccgcgcgctcgcctaggactaccgactacgagtagtgctcagctagcctccatcctcagcgcgcgagtggctgctgcgcattcctctctttatccgtctctgtgcttgtttaatttgtgttcgttcgtgagtaggcggcccggcacatatggcagcgcagtccatgctcatgtcgaccagcgtcaacggcggccgcgcgctgccgtctcttcaggccgtccggccgggctccatacccgcggctaccgctgccgtcgtcgtcatcctcgtcaggctacaggcactccaagtccgtctccgtgaagacgctcgccctgttcggcaaatccaaggtcaagaccgcgccggcgaagaaggctgctgcgcccaagcccaagccgaaggttgaggatggtatcttcggcacgtccggcgggatcggtttcaccaaggagaacgagctgttcgtcggccgcgttgccatgcttggctttgccgcatcgctacttggagaggccattaccgggaagggcatccttgcccagctgaacctcgagacgggcatccccatctacgaggcggagcctctcctcctgttcttcatcctcttcaccctccttggcgccatcggcgctctcggggaccgcggccgcttcgtcgacgaggaggtcaccggcctcgacaaggccgtcatccaacctggcaagggcttccgcggcgccctcggcctcagcgagggagggccgctgttcgggttcaccaagtcgaacgagctgttcgtggggcggatggcgcagctgggcgtggccttctccatcatcggcgagatcatcacggggaagggcgcgctggcgcagctcaacatcgagacgggggtgcccatcaacgagatagagccgctcgtcatcttcaacgtcctcttcttcttcatcgccgccatcaaccccggcaatggcaggttcatcatcggcgaggaagaggaataggctgctggcctcggacatgagtcgtgtgcgtttacctttacctgtgactgtgagtgatcgatcgattgctgtgtatcaattactcgtgatgagacctcgaaggtagggtgtcgcgttgggttgtctgcttgtagaaacaagagcttatatataaattactactagct

SEQ ID NO: 27476 - protein, 167 aa, Zea mays subsp. mays
  peptide (1)..(167): Ceres Seq. ID no. 12406909
  misc_feature (1)..(116): Pfam Name: Pfam Description:  Chlorophyll A-B binding protein
  misc_feature (1)..(167): NCBI GI NO: 34908652 NR Description: putative photosystem II subunit (22KDa) precursor
  misc_feature (1)..(167): NCBI GI NO: 18202913 NR Description: Photosystem II 22 kDa protein
  misc_feature (1)..(167): NCBI GI NO: 1709846 NR Description: Photosystem II 22 kDa protein
  misc_feature (1)..(167): NCBI GI NO: 18203444 NR Description: Photosystem II 22 kDa protein
  misc_feature (1)..(167): NCBI GI NO: 400890 NR Description: Photosystem II 22 kDa protein
  misc_feature (1)..(167): NCBI GI NO: 38345525 NR Description: OSJNBa0039K24.28
  misc_feature (1)..(167): NCBI GI NO: 15219418 NR Description: photosystem II 22kDa protein, putative
  misc_feature (1)..(167): NCBI GI NO: 15294226 NR Description: unknown protein [Arabidopsis thaliana]
  misc_feature (1)..(167): NCBI GI NO: 7489520 NR Description: photosystem II 22-K chlorophyll-binding protein -rice
  misc_feature (14)..(167): NCBI GI NO: 6006279 NR Description: photosystem II 22 kDa protein
MLGFAASLLGEAITGKGILAQLNLETGIPIYEAEPLLLFFILFTLLGAIGALGDRGRFVDEEVTGLDKAVIQPGKGFRGALGLSEGGPLFGFTKSNELFVGRMAQLGVAFSIIGEIITGKGALAQLNIETGVPINEIEPLVIFNVLFFFIAAINPGNGRFIIGEEEE

SEQ ID NO: 27477 - protein, 115 aa, Zea mays subsp. mays
  peptide (1)..(115): Ceres Seq. ID no. 12406910
  misc_feature (8)..(115): NCBI GI NO: 13592175 NR Description: ppg3 [Leishmania major]
  misc_feature (8)..(115): NCBI GI NO: 13592175 NR Description: ppg3 [Leishmania major]
  misc_feature (8)..(115): NCBI GI NO: 13592175 NR Description: ppg3 [Leishmania major]
  misc_feature (8)..(115): NCBI GI NO: 13592175 NR Description: ppg3 [Leishmania major]
  misc_feature (8)..(115): NCBI GI NO: 13592175 NR Description: ppg3 [Leishmania major]
  misc_feature (8)..(115): NCBI GI NO: 13592175 NR Description: ppg3 [Leishmania major]
  misc_feature (23)..(115): NCBI GI NO: 13592175 NR Description: ppg3 [Leishmania major]
  misc_feature (79)..(115): NCBI GI NO: 5420387 NR Description: proteophosphoglycan [Leishmania major]
  misc_feature (79)..(115): NCBI GI NO: 13592175 NR Description: ppg3 [Leishmania major]
  misc_feature (73)..(115): NCBI GI NO: 25143299 NR Description: pre-mRNA splicing SR protein related RSR-1 (68
ATDPRPRPHAGSKQQPRARLGLPTTSSAQLASILSARVAAAHSSLYPSLCLFNLCSFVSRRPGTYGSAVHAHVDQRQRRPRAAVSSGRPAGLHTRGYRCRRRHPRQATGTPSPSP

SEQ ID NO: 27478 - DNA, 1764 bp, Zea mays subsp. mays
  misc_feature (1)..(1764): Ceres Seq. ID no. 12349967
accgcccagctgcaccctgcagcgctcactcgctcactgactcactcccctcccctggcctcctcctctctctctctctctccactctctcccacagccgaaccaacatgcaggggcgcagcagggacgccgccaccgtcgctgcagcggtggtgtgcgcagctgcgctgctcctcggcgacgcctggaccgtctcggcgcaggcggcggcggaggaggacaagataagcgccctgccggggcagccgccggtgggcttcgcacagtactccggttacatcccggtggacgccgcggggaagcgctccctcttctactacttcgccgaggcggaggcggatccggcggccaagccgctcgtgctctggctcaatggagggcctgggtgctcatccgtgggagtgggggcgttctcagagaatgggccgttcaggcctagcggcaatgcgctgacgaggaacgagtacagctggaacaaagaggccaatatgctgtatctggagagccctgcaggggttggcttttcatactccactgatcctgccttctacgagggtgttggtgacagcatgacagccagagacaacttgaagttcttgcaaggctggttcgccaggttccctcagtacaagggcagggacctgtatatcacaggagagagctacgctggccactacgttccacagttagcccagcgcatggttgagttcaacaagaaggagaagctattcaacctgaaaggcattgctcttggcaaccctgtgctggagttctcgaccgacttcaactcgcgggcggagttcttctggtcgcacggcctgatatcggactccacctacaacatcttcacgacggtgtgcaactactcgcggtacgtgagcgagtactaccgcggctccctgagcacggcctgcgacagggtgatgagccaggtggcgagggagacgagccggttcgtcgacaagtacgacgtcaccctggacgtctgcatctcgtcggtgctcatgcagtcccaggtcctcgtccctcagcaagggagcagggagctggacgtgtgcgtggaggacgagacgatgcggtacctgaaccggaaggacgtgcagcaggccatgcacgcgcgcctcgacggcgtgcagaggtggacggtctgcagcagcgttctggagtacaagcagctggacctccagatcccgaccgtgaacaccgtgggcgcgctcgtgaaggcgggcatccccgcgctggtgtacagcggcgaccaggactcggtgatcccgctgacgggcagcaggacgctggtggggcggctggcggccaggctccggctcaactccacggcgccgtaccgtgcctggttccaggggaagcaggtgggcgggtggacgcaggtgttcggcggcggcgcgctgtccttcgccacggtgcgcggcgcgtcccacgaggcgcccttctcgcagcccgagcgctcgctcggcctcttcagggcgttcctcgccggacagcagctgccggaatcgttccagtgacgacggaacgtgcctcttccacgtctagtgtatgttcattgtaagcgtatgtacgtgcagctgaccgtctgtcgtcatcatccggccgctcgacactggcaaaacaacccaaatgggttcttctccaagtgtaatcaggacgaaaataatatcattggaacttggaagggatgagactgtgtgtcgtcggctttccatgttgtaggcttgtagtacaagtgtaatatgcatatgctggttc

SEQ ID NO: 27479 - protein, 506 aa, Zea mays subsp. mays
  peptide (1)..(506): Ceres Seq. ID no. 12349968
  misc_feature (79)..(498): Pfam Name: Pfam Description:  Serine carboxypeptidase
  misc_feature (48)..(506): NCBI GI NO: 38347156 NR Description: OSJNBa0039C07.2
  misc_feature (55)..(505): NCBI GI NO: 18396647 NR Description: serine carboxypeptidase II, putative
  misc_feature (55)..(505): NCBI GI NO: 25289785 NR Description: probable serine carboxypeptidase II
  misc_feature (56)..(505): NCBI GI NO: 30685740 NR Description: serine carboxypeptidase -related
  misc_feature (56)..(505): NCBI GI NO: 25289793 NR Description: probable serine carboxypeptidase II
  misc_feature (66)..(502): NCBI GI NO: 15218514 NR Description: serine carboxypeptidase II, putative
  misc_feature (48)..(504): NCBI GI NO: 15238328 NR Description: serine carboxypeptidase II-like
  misc_feature (64)..(502): NCBI GI NO: 15238327 NR Description: serine carboxypeptidase-II like
  misc_feature (49)..(502): NCBI GI NO: 15224454 NR Description: putative serine carboxypeptidase II
  misc_feature (49)..(336): NCBI GI NO: 28393789 NR Description: putative serine carboxypeptidase II
RPAAPCSAHSLTDSLPSPGLLLSLSLSTLSHSRTNMQGRSRDAATVAAAVVCAAALLLGDAWTVSAQAAAEEDKISALPGQPPVGFAQYSGYIPVDAAGKRSLFYYFAEAEADPAAKPLVLWLNGGPGCSSVGVGAFSENGPFRPSGNALTRNEYSWNKEANMLYLESPAGVGFSYSTDPAFYEGVGDSMTARDNLKFLQGWFARFPQYKGRDLYITGESYAGHYVPQLAQRMVEFNKKEKLFNLKGIALGNPVLEFSTDFNSRAEFFWSHGLISDSTYNIFTTVCNYSRYVSEYYRGSLSTACDRVMSQVARETSRFVDKYDVTLDVCISSVLMQSQVLVPQQGSRELDVCVEDETMRYLNRKDVQQAMHARLDGVQRWTVCSSVLEYKQLDLQIPTVNTVGALVKAGIPALVYSGDQDSVIPLTGSRTLVGRLAARLRLNSTAPYRAWFQGKQVGGWTQVFGGGALSFATVRGASHEAPFSQPERSLGLFRAFLAGQQLPESFQ

SEQ ID NO: 27480 - protein, 471 aa, Zea mays subsp. mays
  peptide (1)..(471): Ceres Seq. ID no. 12349969
  misc_feature (44)..(463): Pfam Name: Pfam Description:  Serine carboxypeptidase
  misc_feature (13)..(471): NCBI GI NO: 38347156 NR Description: OSJNBa0039C07.2
  misc_feature (20)..(470): NCBI GI NO: 18396647 NR Description: serine carboxypeptidase II, putative
  misc_feature (20)..(470): NCBI GI NO: 25289785 NR Description: probable serine carboxypeptidase II
  misc_feature (21)..(470): NCBI GI NO: 30685740 NR Description: serine carboxypeptidase -related
  misc_feature (21)..(470): NCBI GI NO: 25289793 NR Description: probable serine carboxypeptidase II
  misc_feature (31)..(467): NCBI GI NO: 15218514 NR Description: serine carboxypeptidase II, putative
  misc_feature (13)..(469): NCBI GI NO: 15238328 NR Description: serine carboxypeptidase II-like
  misc_feature (29)..(467): NCBI GI NO: 15238327 NR Description: serine carboxypeptidase-II like
  misc_feature (14)..(467): NCBI GI NO: 15224454 NR Description: putative serine carboxypeptidase II
  misc_feature (14)..(301): NCBI GI NO: 28393789 NR Description: putative serine carboxypeptidase II
MQGRSRDAATVAAAVVCAAALLLGDAWTVSAQAAAEEDKISALPGQPPVGFAQYSGYIPVDAAGKRSLFYYFAEAEADPAAKPLVLWLNGGPGCSSVGVGAFSENGPFRPSGNALTRNEYSWNKEANMLYLESPAGVGFSYSTDPAFYEGVGDSMTARDNLKFLQGWFARFPQYKGRDLYITGESYAGHYVPQLAQRMVEFNKKEKLFNLKGIALGNPVLEFSTDFNSRAEFFWSHGLISDSTYNIFTTVCNYSRYVSEYYRGSLSTACDRVMSQVARETSRFVDKYDVTLDVCISSVLMQSQVLVPQQGSRELDVCVEDETMRYLNRKDVQQAMHARLDGVQRWTVCSSVLEYKQLDLQIPTVNTVGALVKAGIPALVYSGDQDSVIPLTGSRTLVGRLAARLRLNSTAPYRAWFQGKQVGGWTQVFGGGALSFATVRGASHEAPFSQPERSLGLFRAFLAGQQLPESFQ

SEQ ID NO: 27481 - protein, 344 aa, Zea mays subsp. mays
  peptide (1)..(344): Ceres Seq. ID no. 12349970
  misc_feature (1)..(336): Pfam Name: Pfam Description:  Serine carboxypeptidase
  misc_feature (1)..(344): NCBI GI NO: 38347156 NR Description: OSJNBa0039C07.2
  misc_feature (1)..(343): NCBI GI NO: 18396647 NR Description: serine carboxypeptidase II, putative
  misc_feature (1)..(343): NCBI GI NO: 25289785 NR Description: probable serine carboxypeptidase II
  misc_feature (1)..(343): NCBI GI NO: 30685740 NR Description: serine carboxypeptidase -related
  misc_feature (1)..(343): NCBI GI NO: 25289793 NR Description: probable serine carboxypeptidase II
  misc_feature (1)..(340): NCBI GI NO: 15218514 NR Description: serine carboxypeptidase II, putative
  misc_feature (1)..(342): NCBI GI NO: 15238328 NR Description: serine carboxypeptidase II-like
  misc_feature (1)..(340): NCBI GI NO: 15238327 NR Description: serine carboxypeptidase-II like
  misc_feature (1)..(340): NCBI GI NO: 15224454 NR Description: putative serine carboxypeptidase II
  misc_feature (1)..(174): NCBI GI NO: 28393789 NR Description: putative serine carboxypeptidase II
MLYLESPAGVGFSYSTDPAFYEGVGDSMTARDNLKFLQGWFARFPQYKGRDLYITGESYAGHYVPQLAQRMVEFNKKEKLFNLKGIALGNPVLEFSTDFNSRAEFFWSHGLISDSTYNIFTTVCNYSRYVSEYYRGSLSTACDRVMSQVARETSRFVDKYDVTLDVCISSVLMQSQVLVPQQGSRELDVCVEDETMRYLNRKDVQQAMHARLDGVQRWTVCSSVLEYKQLDLQIPTVNTVGALVKAGIPALVYSGDQDSVIPLTGSRTLVGRLAARLRLNSTAPYRAWFQGKQVGGWTQVFGGGALSFATVRGASHEAPFSQPERSLGLFRAFLAGQQLPESFQ

SEQ ID NO: 27482 - DNA, 1562 bp, Zea mays subsp. mays
  misc_feature (1)..(1562): Ceres Seq. ID no. 12405591
gaatattatcaaaagaaaaaaaagatcgcagccgaaaggaaggggaaaaaaggaccaaataaacaatccactgtctcctacctccgcggaagcatcaaacaaatcaccctgccgatcgccatggacgaacagcaggcggaggagggcgaaagcgcgcgcgtcaagaggacgccggaggaggggtcgtcgccgctgtccgctctggcggatgacgtgctgctacagatcctgggacggctcgaggcggacccgcgggactgggcgcgggcctcctgcgcgtccccgcgcctcgccgctctgctccgggcggcctgcctcccgccgcgactgtcgcgggcgctccccgccgagctcctccccgcgccgtcaccggacggggcgcccgcggcctgggcggcgctccacaagctctccgtctgttgcccggggctcctccgcgccggggtgctcctcgagcccaccgacgatttcgggctcgatctcgacatcgggcctgacgtccccatctacgcccgcaccgacgcctcctccgccgaggggttcgaggccacggccacctcccgccacagcggaaccatcgtcgcggccgggagcgcgccccgcgccggcgaatctgccaacgtcgccgcgtggtcgctctacgacgacctgtacctggacgcggcatacgactgctcgtccgagctgcagatcccgcctgccgctgcggctgtggaacccgccccgcccgcgcccgtggcggcgatccgcgacgtggaggaagcaacgaccacaaatgctgtctcatgcggcgtcgcccggcgcggcgtggtggccgggagccgactgcatccgcggcggtggctgggcaccgtcggcgcgcacctggcatcggggtcctggacgctgagccgtgagcaggggaacaagctccttgccagccgcttccgcggcgaccggctatacctctgcgactggcccgggtgcgtgcacaaggaggagcgacgcaagtacatggtcttccgcggcgtgttccacaacttcgcccggtctcaggtccggcgcgcgctcagggacacgcgccgccccaccgtcgccatcgagtgcgccttctgcggctgcaaagagacctgggacctctactcggctttctgcctccgcagtttctacggctaccacgacgacggcgagcctgtggtgcgcgcctacgtctgcgagaacggccacgtcgcgggcgcctggaccgaccgcccactctactcctgatcttggagtggacactccgactgacatggtattgcatcaaagactgcaccctgccattgccagatgctcgctcctaccacttgagctgtttctagacataattatgcgtgcctgcatatagcaatccggattttcgtcatgttctgatacacgtgggatgtgtattctttatttctttcttcttgctgttgctgttgtttgtgagaatggttgagtagaataaggatgccggttgatttgcagcataggatataaagagatttgcttaaaattgtaaacctgatgctacgagaaattggaaccgctgttttattgcc

SEQ ID NO: 27483 - protein, 414 aa, Zea mays subsp. mays
  peptide (1)..(414): Ceres Seq. ID no. 12405592
  misc_feature (240)..(414): NCBI GI NO: 21553661 NR Description: unknown [Arabidopsis thaliana]
  misc_feature (106)..(220): NCBI GI NO: 21553661 NR Description: unknown [Arabidopsis thaliana]
  misc_feature (240)..(414): NCBI GI NO: 15235367 NR Description: putative protein; protein id: At4g02440
  misc_feature (106)..(220): NCBI GI NO: 15235367 NR Description: putative protein; protein id: At4g02440
EYYQKKKKIAAERKGKKGPNKQSTVSYLRGSIKQITLPIAMDEQQAEEGESARVKRTPEEGSSPLSALADDVLLQILGRLEADPRDWARASCASPRLAALLRAACLPPRLSRALPAELLPAPSPDGAPAAWAALHKLSVCCPGLLRAGVLLEPTDDFGLDLDIGPDVPIYARTDASSAEGFEATATSRHSGTIVAAGSAPRAGESANVAAWSLYDDLYLDAAYDCSSELQIPPAAAAVEPAPPAPVAAIRDVEEATTTNAVSCGVARRGVVAGSRLHPRRWLGTVGAHLASGSWTLSREQGNKLLASRFRGDRLYLCDWPGCVHKEERRKYMVFRGVFHNFARSQVRRALRDTRRPTVAIECAFCGCKETWDLYSAFCLRSFYGYHDDGEPVVRAYVCENGHVAGAWTDRPLYS

SEQ ID NO: 27484 - protein, 374 aa, Zea mays subsp. mays
  peptide (1)..(374): Ceres Seq. ID no. 12405593
  misc_feature (200)..(374): NCBI GI NO: 21553661 NR Description: unknown [Arabidopsis thaliana]
  misc_feature (66)..(180): NCBI GI NO: 21553661 NR Description: unknown [Arabidopsis thaliana]
  misc_feature (200)..(374): NCBI GI NO: 15235367 NR Description: putative protein; protein id: At4g02440
  misc_feature (66)..(180): NCBI GI NO: 15235367 NR Description: putative protein; protein id: At4g02440
MDEQQAEEGESARVKRTPEEGSSPLSALADDVLLQILGRLEADPRDWARASCASPRLAALLRAACLPPRLSRALPAELLPAPSPDGAPAAWAALHKLSVCCPGLLRAGVLLEPTDDFGLDLDIGPDVPIYARTDASSAEGFEATATSRHSGTIVAAGSAPRAGESANVAAWSLYDDLYLDAAYDCSSELQIPPAAAAVEPAPPAPVAAIRDVEEATTTNAVSCGVARRGVVAGSRLHPRRWLGTVGAHLASGSWTLSREQGNKLLASRFRGDRLYLCDWPGCVHKEERRKYMVFRGVFHNFARSQVRRALRDTRRPTVAIECAFCGCKETWDLYSAFCLRSFYGYHDDGEPVVRAYVCENGHVAGAWTDRPLYS

SEQ ID NO: 27485 - protein, 295 aa, Zea mays subsp. mays
  peptide (1)..(295): Ceres Seq. ID no. 12405594
  misc_feature (101)..(295): Pfam Name: Pfam Description:  Equine herpesvirus glycoprotein gp2
  misc_feature (76)..(295): NCBI GI NO: 13592175 NR Description: ppg3 [Leishmania major]
  misc_feature (101)..(295): NCBI GI NO: 17221114 NR Description: glycoprotein gp2 [Equine herpesvirus 1]
  misc_feature (80)..(295): NCBI GI NO: 17221106 NR Description: glycoprotein gp2 [Equine herpesvirus 1]
  misc_feature (76)..(295): NCBI GI NO: 13592175 NR Description: ppg3 [Leishmania major]
  misc_feature (80)..(295): NCBI GI NO: 30313663 NR Description: sublingual apomucin [Mus musculus]
  misc_feature (83)..(295): NCBI GI NO: 13592175 NR Description: ppg3 [Leishmania major]
  misc_feature (7)..(295): NCBI GI NO: 18376167 NR Description: hypothetical protein [Neurospora crassa]
  misc_feature (80)..(227): NCBI GI NO: 17384256 NR Description: mucin 5 [Homo sapiens]
  misc_feature (285)..(295): NCBI GI NO: 17384256 NR Description: mucin 5 [Homo sapiens]
  misc_feature (80)..(221): NCBI GI NO: 17384256 NR Description: mucin 5 [Homo sapiens]
NIIKRKKRSQPKGRGKKDQINNPLSPTSAEASNKSPCRSPWTNSRRRRAKARASRGRRRRGRRRCPLWRMTCCYRSWDGSRRTRGTGRGPPARPRASPLCSGRPASRRDCRGRSPPSSSPRRHRTGRPRPGRRSTSSPSVARGSSAPGCSSSPPTISGSISTSGLTSPSTPAPTPPPPRGSRPRPPPATAEPSSRPGARPAPANLPTSPRGRSTTTCTWTRHTTARPSCRSRLPLRLWNPPRPRPWRRSATWRKQRPQMLSHAASPGAAWWPGADCIRGGGWAPSARTWHRGPGR

SEQ ID NO: 27486 - DNA, 1268 bp, Zea mays subsp. mays
  misc_feature (1)..(1268): Ceres Seq. ID no. 12409325
ctgggcccaccgtaactgactgggtgttctttacagacacgtgacgtcgcgcaccgggcccgtctatcgagtattcggtcccattcgtcagtgctcggacacctgactaataacaaaagaactcgctccattcagagattcagagaagacccgcctctcccgtgaggccgtgacgcgacgccggatcgtcctcgtctcctagctcgtggaatgaagggaggtggcgtcatcagggccgccggcggaggtgccggcggtgcgggtctgttgcgaacgcgactgcggcttcccgtggtgctcctctcctgctccctcttcttcctcgccggcttcttcggctcgctcctcttcacccaggatccggaggaggcggatatgccggtgccgagagagcggctgttggatgcggcgtggccggagatgccttacggcgagtccggcgaggctgcgccgtccttgatcccataccagattttgagctggcagcctcgtgctttgtactttccacaatttgcgacatcagaacagtgtgaaaatatagtaaaaacggcaaaggagagacttaagccatcaacattagccctgaggaaaggagaaaccgcagagagtacaaaaggaatcaggacaagttcgggaacattccttagtgctaatgaagacccaactgaaacccttgcggaaatcgagaagaagattgcaagggctaccatgttacccagaaatcatggggagccatttaatgtcctgcggtataatattggacaaaggtatgcttcacattatgacgcatttgacccagctcagtatggtccacaaaaaaatcaaagggtggcatctttcttgctttatctcacggatgtcgaagaagggggagaaactatgttcccatacgagaacagtgagaatatggatataggctatgactatgagaagtgcattggcctaaaggtaaaaccaaggaagggtgacggactcttgttttactcccttatggtaaatgggaccattgaccggacttcacttcatggtagctgccccgtcatcaaaggcgagaaatgggtcgccaccaaatggatcagagacaatatagtgtagaaatcgaaaggctcaggtgtcatgtgccctccaaaaaaatagatcatgcgcacatatactgaccatatacttcagtgtttgttcaattgccatggacagttggaccaacggaaggaaagtgtaaccaatctatttgcatcgtgtcaatatatagcctacaacttacatgtggc

SEQ ID NO: 27487 - protein, 294 aa, Zea mays subsp. mays
  peptide (1)..(294): Ceres Seq. ID no. 12409326
  misc_feature (172)..(291): Pfam Name: II Pfam Description: 2OG-Fe
  misc_feature (1)..(291): NCBI GI NO: 14488368 NR Description: putative dioxygenase
  misc_feature (24)..(291): NCBI GI NO: 40809925 NR Description: prolyl 4-hydroxylase [Nicotiana tabacum]
  misc_feature (21)..(291): NCBI GI NO: 18418321 NR Description: putative protein; protein id: At4g33910
  misc_feature (71)..(270): NCBI GI NO: 7485609 NR Description: hypothetical protein F17I5
  misc_feature (23)..(291): NCBI GI NO: 30681957 NR Description: oxidoreductase -related [Arabidopsis thaliana]
  misc_feature (89)..(289): NCBI GI NO: 29150365 NR Description: putative oxidoreductase
  misc_feature (87)..(289): NCBI GI NO: 21537370 NR Description: putative prolyl 4-hydroxylase, alpha subunit
  misc_feature (87)..(289): NCBI GI NO: 18394842 NR Description: expressed protein; protein id: At1g20270
  misc_feature (82)..(289): NCBI GI NO: 30689216 NR Description: oxidoreductase, 2OG-Fe(II) oxygenase family
  misc_feature (90)..(289): NCBI GI NO: 28393447 NR Description: putative prolyl 4-hydroxylase
MKGGGVIRAAGGGAGGAGLLRTRLRLPVVLLSCSLFFLAGFFGSLLFTQDPEEADMPVPRERLLDAAWPEMPYGESGEAAPSLIPYQILSWQPRALYFPQFATSEQCENIVKTAKERLKPSTLALRKGETAESTKGIRTSSGTFLSANEDPTETLAEIEKKIARATMLPRNHGEPFNVLRYNIGQRYASHYDAFDPAQYGPQKNQRVASFLLYLTDVEEGGETMFPYENSENMDIGYDYEKCIGLKVKPRKGDGLLFYSLMVNGTIDRTSLHGSCPVIKGEKWVATKWIRDNIV

SEQ ID NO: 27488 - protein, 239 aa, Zea mays subsp. mays
  peptide (1)..(239): Ceres Seq. ID no. 12409327
  misc_feature (117)..(236): Pfam Name: II Pfam Description: 2OG-Fe
  misc_feature (1)..(236): NCBI GI NO: 14488368 NR Description: putative dioxygenase
  misc_feature (1)..(236): NCBI GI NO: 40809925 NR Description: prolyl 4-hydroxylase [Nicotiana tabacum]
  misc_feature (1)..(236): NCBI GI NO: 18418321 NR Description: putative protein; protein id: At4g33910
  misc_feature (16)..(215): NCBI GI NO: 7485609 NR Description: hypothetical protein F17I5
  misc_feature (1)..(236): NCBI GI NO: 30681957 NR Description: oxidoreductase -related [Arabidopsis thaliana]
  misc_feature (34)..(234): NCBI GI NO: 29150365 NR Description: putative oxidoreductase
  misc_feature (32)..(234): NCBI GI NO: 21537370 NR Description: putative prolyl 4-hydroxylase, alpha subunit
  misc_feature (32)..(234): NCBI GI NO: 18394842 NR Description: expressed protein; protein id: At1g20270
  misc_feature (27)..(234): NCBI GI NO: 30689216 NR Description: oxidoreductase, 2OG-Fe(II) oxygenase family
  misc_feature (35)..(234): NCBI GI NO: 28393447 NR Description: putative prolyl 4-hydroxylase
MPVPRERLLDAAWPEMPYGESGEAAPSLIPYQILSWQPRALYFPQFATSEQCENIVKTAKERLKPSTLALRKGETAESTKGIRTSSGTFLSANEDPTETLAEIEKKIARATMLPRNHGEPFNVLRYNIGQRYASHYDAFDPAQYGPQKNQRVASFLLYLTDVEEGGETMFPYENSENMDIGYDYEKCIGLKVKPRKGDGLLFYSLMVNGTIDRTSLHGSCPVIKGEKWVATKWIRDNIV

SEQ ID NO: 27489 - protein, 224 aa, Zea mays subsp. mays
  peptide (1)..(224): Ceres Seq. ID no. 12409328
  misc_feature (102)..(221): Pfam Name: II Pfam Description: 2OG-Fe
  misc_feature (1)..(221): NCBI GI NO: 14488368 NR Description: putative dioxygenase
  misc_feature (1)..(221): NCBI GI NO: 40809925 NR Description: prolyl 4-hydroxylase [Nicotiana tabacum]
  misc_feature (1)..(221): NCBI GI NO: 18418321 NR Description: putative protein; protein id: At4g33910
  misc_feature (1)..(200): NCBI GI NO: 7485609 NR Description: hypothetical protein F17I5
  misc_feature (1)..(221): NCBI GI NO: 30681957 NR Description: oxidoreductase -related [Arabidopsis thaliana]
  misc_feature (19)..(219): NCBI GI NO: 29150365 NR Description: putative oxidoreductase
  misc_feature (17)..(219): NCBI GI NO: 21537370 NR Description: putative prolyl 4-hydroxylase, alpha subunit
  misc_feature (17)..(219): NCBI GI NO: 18394842 NR Description: expressed protein; protein id: At1g20270
  misc_feature (12)..(219): NCBI GI NO: 30689216 NR Description: oxidoreductase, 2OG-Fe(II) oxygenase family
  misc_feature (20)..(219): NCBI GI NO: 28393447 NR Description: putative prolyl 4-hydroxylase
MPYGESGEAAPSLIPYQILSWQPRALYFPQFATSEQCENIVKTAKERLKPSTLALRKGETAESTKGIRTSSGTFLSANEDPTETLAEIEKKIARATMLPRNHGEPFNVLRYNIGQRYASHYDAFDPAQYGPQKNQRVASFLLYLTDVEEGGETMFPYENSENMDIGYDYEKCIGLKVKPRKGDGLLFYSLMVNGTIDRTSLHGSCPVIKGEKWVATKWIRDNIV

SEQ ID NO: 27490 - DNA, 1100 bp, Zea mays subsp. mays
  misc_feature (1)..(1100): Ceres Seq. ID no. 12381112
  misc_feature (1070)..(1070): n is a, c, t, g, unknown, or other
  misc_feature (1069)..(1069): n is a, c, t, g, unknown, or other
atcttaacagccaggaagctggcgtcttgcttgtccttgttcttttcccacccggctacccccgtcgtcgccgccgctttccccgtggtttcagagctcgagtcggctagctaggccgcctggctaatctccctgccttctataagtacaggttcattgtgtgctgtgctcccagctccatcactgacacaagagagcacgctactactcatcactcgccaacgtgcagagatcagggaggcggcacactccatccactgaccgctcatggcgaaggtccacctctacgtcgccgcggcctgcgccgtcgtcctcgcgctcgccgccccggccctcgccggcgaccccgacatgctgcaggacgtctgcccggctgactacgcctccccggtgaagctgaacgggttcgcgtgcaaggcgaacttttcggcggacgacttcttcttcgacgggctgaggaaccccggcaacaccaacaacccggcgggctccgtggtgacggcggccaacgtggagaagttcccgggcgtgaacacgctgggcgtctccatggcgcgcatcgactacgcgccgggcggccagaacccgccgcacacgcacccgcgcgccaccgagatcatcttcgtcctcgagggcacgctcgaggtcggcttcatcaccaccgccaacgcgctcttcaccaagaccgtcaccaagggcgacgtcttcgtcttcccgcgcggcctcgtccacttccagcagaacaggggccacggccccgccgccgtcgtcgccgccttcaacagccagctccagggcacgcaggccatcgccatgacgctcttcggcgccgtgccgcccgtgccctccgacatcctcgccaaggccttccgcatcagcagcggcgaggtggaccacatcaaggccaacttcgcgcccaagtagagatccaatgtctgcattcccttgattttctcaataataaatccccgcggtgtgcagttcgatttgttcgtcttcggttggtttggttcgagacattgctgaccacgcttgttactgctaatttgtgcggagcggagttgcttgnnctccgataaataatcaattctatcgtcgtc

SEQ ID NO: 27491 - protein, 218 aa, Zea mays subsp. mays
  peptide (1)..(218): Ceres Seq. ID no. 12381113
  misc_feature (62)..(209): Pfam Name: Pfam Description:  Cupin
  misc_feature (1)..(215): NCBI GI NO: 34902528 NR Description: probable germin protein 4
  misc_feature (1)..(217): NCBI GI NO: 34906612 NR Description: germin(oxalate oxidase)-like protein
  misc_feature (10)..(218): NCBI GI NO: 34904670 NR Description: putative germin protein
  misc_feature (2)..(217): NCBI GI NO: 27805638 NR Description: Nectarin 1 precursor (Superoxide dismutase [Mn])
  misc_feature (8)..(218): NCBI GI NO: 18203442 NR Description: Rhicadhesin receptor precursor
  misc_feature (22)..(218): NCBI GI NO: 7447345 NR Description: probable germin protein - tomato
  misc_feature (24)..(218): NCBI GI NO: 15217561 NR Description: germin-like protein; protein id: At1g09560
  misc_feature (24)..(217): NCBI GI NO: 18203447 NR Description: Nectarin 1 precursor (Superoxide dismutase [Mn])
  misc_feature (15)..(218): NCBI GI NO: 15228673 NR Description: germin-like protein (GLP10); protein id:At3g62020
  misc_feature (23)..(218): NCBI GI NO: 1934730 NR Description: germin-like protein [Arabidopsis thaliana]
MAKVHLYVAAACAVVLALAAPALAGDPDMLQDVCPADYASPVKLNGFACKANFSADDFFFDGLRNPGNTNNPAGSVVTAANVEKFPGVNTLGVSMARIDYAPGGQNPPHTHPRATEIIFVLEGTLEVGFITTANALFTKTVTKGDVFVFPRGLVHFQQNRGHGPAAVVAAFNSQLQGTQAIAMTLFGAVPPVPSDILAKAFRISSGEVDHIKANFAPK

SEQ ID NO: 27492 - protein, 190 aa, Zea mays subsp. mays
  peptide (1)..(190): Ceres Seq. ID no. 12381114
  misc_feature (34)..(181): Pfam Name: Pfam Description:  Cupin
  misc_feature (1)..(187): NCBI GI NO: 34902528 NR Description: probable germin protein 4
  misc_feature (1)..(189): NCBI GI NO: 34906612 NR Description: germin(oxalate oxidase)-like protein
  misc_feature (1)..(190): NCBI GI NO: 34904670 NR Description: putative germin protein
  misc_feature (1)..(189): NCBI GI NO: 27805638 NR Description: Nectarin 1 precursor (Superoxide dismutase [Mn])
  misc_feature (1)..(190): NCBI GI NO: 18203442 NR Description: Rhicadhesin receptor precursor
  misc_feature (1)..(190): NCBI GI NO: 7447345 NR Description: probable germin protein - tomato
  misc_feature (1)..(190): NCBI GI NO: 15217561 NR Description: germin-like protein; protein id: At1g09560
  misc_feature (1)..(189): NCBI GI NO: 18203447 NR Description: Nectarin 1 precursor (Superoxide dismutase [Mn])
  misc_feature (1)..(190): NCBI GI NO: 15228673 NR Description: germin-like protein (GLP10); protein id:At3g62020
  misc_feature (1)..(190): NCBI GI NO: 1934730 NR Description: germin-like protein [Arabidopsis thaliana]
MLQDVCPADYASPVKLNGFACKANFSADDFFFDGLRNPGNTNNPAGSVVTAANVEKFPGVNTLGVSMARIDYAPGGQNPPHTHPRATEIIFVLEGTLEVGFITTANALFTKTVTKGDVFVFPRGLVHFQQNRGHGPAAVVAAFNSQLQGTQAIAMTLFGAVPPVPSDILAKAFRISSGEVDHIKANFAPK

SEQ ID NO: 27493 - protein, 124 aa, Zea mays subsp. mays
  peptide (1)..(124): Ceres Seq. ID no. 12381115
  misc_feature (1)..(115): Pfam Name: Pfam Description:  Cupin
  misc_feature (1)..(121): NCBI GI NO: 34902528 NR Description: probable germin protein 4
  misc_feature (1)..(123): NCBI GI NO: 34906612 NR Description: germin(oxalate oxidase)-like protein
  misc_feature (1)..(124): NCBI GI NO: 34904670 NR Description: putative germin protein
  misc_feature (1)..(123): NCBI GI NO: 27805638 NR Description: Nectarin 1 precursor (Superoxide dismutase [Mn])
  misc_feature (1)..(124): NCBI GI NO: 18203442 NR Description: Rhicadhesin receptor precursor
  misc_feature (1)..(124): NCBI GI NO: 7447345 NR Description: probable germin protein - tomato
  misc_feature (1)..(124): NCBI GI NO: 15217561 NR Description: germin-like protein; protein id: At1g09560
  misc_feature (1)..(123): NCBI GI NO: 18203447 NR Description: Nectarin 1 precursor (Superoxide dismutase [Mn])
  misc_feature (1)..(124): NCBI GI NO: 15228673 NR Description: germin-like protein (GLP10); protein id:At3g62020
  misc_feature (1)..(124): NCBI GI NO: 1934730 NR Description: germin-like protein [Arabidopsis thaliana]
MARIDYAPGGQNPPHTHPRATEIIFVLEGTLEVGFITTANALFTKTVTKGDVFVFPRGLVHFQQNRGHGPAAVVAAFNSQLQGTQAIAMTLFGAVPPVPSDILAKAFRISSGEVDHIKANFAPK

SEQ ID NO: 27494 - DNA, 787 bp, Zea mays subsp. mays
  misc_feature (1)..(787): Ceres Seq. ID no. 12340788
  misc_feature (552)..(552): n is a, c, t, g, unknown, or other
  misc_feature (488)..(488): n is a, c, t, g, unknown, or other
gaccgaccaagaaccagcatgaagccactggtggcgcgcctgctcctctgctactccctgctctggctggcgcccgcggcagccccgctacgcctgcagcacgatcatgtccggggccacggccacggccacggccacgcccacccgcctccgtacgcgcgtaacgcgacggcgtacggcgtctcggcggcgctgtgcccgggctgcggcgcgtgggcggacgcgctggagttcctctactaccacaacctggtgcggctggcgtcgctggagccgccgctggcgtggtccccgcgcctggcgtcgtacgcgggctggtgggcggcgcagcgccgcggggactgcgcgctgcgccactccttccccgacggccagttcgcgctcggggagaacgtcttctggggcgggcccggcggcgcgtggcggccccgggacgccgtcgcggactgggccgccgagggcgccgactactcgtacgccgaccaacncgtgcgcgccaggccgggagtgcgcgcactacacccagatcgtgtggcgacgcaccaccgccgntcgtgcgcccgggtggcgtgcgacggcggcggggtgttcatcacctgcaactactacccgcccggcaacgtcgtcggcgagaggccgtactaactagctagcttagcagctcagtaccctcggcctcggggatttattacgtgacgtggcgaacggcctcgtgtagccgtgtcgtgtgtaaataatattcagcggtcgttccggtgaacatgatggtaattcactcgaggttttc

SEQ ID NO: 27495 - protein, 214 aa, Zea mays subsp. mays
  peptide (1)..(214): Ceres Seq. ID no. 12340789
  misc_feature (79)..(201): Pfam Name: Pfam Description:  SCP-like extracellular protein
  misc_feature (65)..(214): NCBI GI NO: 15235992 NR Description: putative pathogenesis-related protein
  misc_feature (67)..(214): NCBI GI NO: 22327916 NR Description: similar to putative pathogenesis-related protein
  misc_feature (61)..(214): NCBI GI NO: 11277195 NR Description: acidic pathogenesis-related protein 1a precursor -rice
  misc_feature (61)..(214): NCBI GI NO: 21304633 NR Description: pathogenesis-related protein 1 [Oryza sativa]
  misc_feature (61)..(214): NCBI GI NO: 34395126 NR Description: PR-1 type pathogenesis-related protein PR-1a
  misc_feature (56)..(214): NCBI GI NO: 37531954 NR Description: putative type-1 pathogenesis-related protein
  misc_feature (77)..(214): NCBI GI NO: 15235994 NR Description: putative pathogenesis-related protein
  misc_feature (66)..(214): NCBI GI NO: 15234704 NR Description: PR-1-like protein; protein id: At4g30320.1
  misc_feature (66)..(214): NCBI GI NO: 34395063 NR Description: putative pathogenesis-related protein 1
  misc_feature (51)..(214): NCBI GI NO: 34395121 NR Description: putative pathogenesis-related protein
  misc_feature (163)..(163): Xaa is any aa, unknown or other
  misc_feature (184)..(184): Xaa is any aa, unknown or other
DRPRTSMKPLVARLLLCYSLLWLAPAAAPLRLQHDHVRGHGHGHGHAHPPPYARNATAYGVSAALCPGCGAWADALEFLYYHNLVRLASLEPPLAWSPRLASYAGWWAAQRRGDCALRHSFPDGQFALGENVFWGGPGGAWRPRDAVADWAAEGADYSYADQXVRARPGVRALHPDRVATHHRXSCARVACDGGGVFITCNYYPPGNVVGERPY

SEQ ID NO: 27496 - protein, 208 aa, Zea mays subsp. mays
  peptide (1)..(208): Ceres Seq. ID no. 12340790
  misc_feature (73)..(195): Pfam Name: Pfam Description:  SCP-like extracellular protein
  misc_feature (59)..(208): NCBI GI NO: 15235992 NR Description: putative pathogenesis-related protein
  misc_feature (61)..(208): NCBI GI NO: 22327916 NR Description: similar to putative pathogenesis-related protein
  misc_feature (55)..(208): NCBI GI NO: 11277195 NR Description: acidic pathogenesis-related protein 1a precursor -rice
  misc_feature (55)..(208): NCBI GI NO: 21304633 NR Description: pathogenesis-related protein 1 [Oryza sativa]
  misc_feature (55)..(208): NCBI GI NO: 34395126 NR Description: PR-1 type pathogenesis-related protein PR-1a
  misc_feature (50)..(208): NCBI GI NO: 37531954 NR Description: putative type-1 pathogenesis-related protein
  misc_feature (71)..(208): NCBI GI NO: 15235994 NR Description: putative pathogenesis-related protein
  misc_feature (60)..(208): NCBI GI NO: 15234704 NR Description: PR-1-like protein; protein id: At4g30320.1
  misc_feature (60)..(208): NCBI GI NO: 34395063 NR Description: putative pathogenesis-related protein 1
  misc_feature (45)..(208): NCBI GI NO: 34395121 NR Description: putative pathogenesis-related protein
  misc_feature (157)..(157): Xaa is any aa, unknown or other
  misc_feature (178)..(178): Xaa is any aa, unknown or other
MKPLVARLLLCYSLLWLAPAAAPLRLQHDHVRGHGHGHGHAHPPPYARNATAYGVSAALCPGCGAWADALEFLYYHNLVRLASLEPPLAWSPRLASYAGWWAAQRRGDCALRHSFPDGQFALGENVFWGGPGGAWRPRDAVADWAAEGADYSYADQXVRARPGVRALHPDRVATHHRXSCARVACDGGGVFITCNYYPPGNVVGERPY

SEQ ID NO: 27497 - protein, 180 aa, Zea mays subsp. mays
  peptide (1)..(180): Ceres Seq. ID no. 12340791
  misc_feature (128)..(128): Xaa is any aa, unknown or other
  misc_feature (149)..(149): Xaa is any aa, unknown or other
MSGATATATATPTRLRTRVTRRRTASRRRCARAAARGRTRWSSSTTTTWCGWRRWSRRWRGPRAWRRTRAGGRRSAAGTARCATPSPTASSRSGRTSSGAGPAARGGPGTPSRTGPPRAPTTRTPTNXCAPGRECAHYTQIVWRRTTAXRAPGWRATAAGCSSPATTTRPATSSARGRTN

SEQ ID NO: 27498 - DNA, 1835 bp, Zea mays subsp. mays
  misc_feature (1)..(1835): Ceres Seq. ID no. 12409321
gcacgagaccattacctagaacatcctaatcgaaaaaacccacccgcacggcaccaccaccaatccatccatccttacgcattagctacactccccggcgtcgagcccccgggaaccctagaccgccgccctcgcatctccgctcgtcgccgcggggtactccctccacccgtctggtgggagtcgcggcgggacgtccccgatccgagctctctccgccttagggtttttggggccggccatggactccatggagcagccggagcccaaaaccgcgggccactactacgcccttcaggttggctccgttttcctgacgggctactacaacgtcctgacgaaccagccgcacctggcgaaccagttctacacggacaacagcagtgttgttagactggactgcgagacgggtcggtggtcgtttggagagacggtggaggttatcaatgatatgatgatgtccatgaaactaagcaaggttgaggttaaaacagcgaatttcttagagtcatgggctggggcgattacgctgttggttactggcctagtgaaattgaagcactaccctgttcgcaagcgatttgctcagaatattgttcttgctccaaaggaagatagatattttatattcagtgacatctttaagctcatttgtgatgagtatgatgatcagtacccttttgctgattacaattgtgctgacaacatgccccaagtggaagcgtcttacacaatggctgaaatagggtctgattatttggatggagaacctgaggcacaggagactgttgatcctgctgaaaatcatgtgcagcaccaagattatttggaatataaggctggcaatgtgattgatgatgaaactcatttggaagagcatattcccccattccccagttcaacggatgttaaaagggattcacctcttgctcttccccaccctccatcacctaccctcgaagaacctgtggaagaagcacccaagacatatgcttcagtgttgcgaacgaaatcaaaggcaacgctggcgattacagagtcacagcaggctcaacagctggcccagcagccacagtctgcctcagtgcatgaaaagtctaacctggacaaccaccgggatgttagcgtccctgaggatgaagaagagtttctttcggtttatgttgggaatctttcgccatctacttcggtctttgatcttgagaaagtgttccaggcttttggaagaattaaacctgatggagttgctatccgaagccgcaaggaggctggagtattctttggctttgttgagttcgaagacatgtctggtattcagaatgctttaagtgcatctccagtagagttaaatggccgttttgttcatgttgaagagaggaggcctaactgcggattccctcgtggaagaagaggccgtggaagagctgatttctcaagggaccaagctggtgggagatacgacggggagtatgctactcgatcgaaaggaattgggcaccagaaaaaaactggacgccagtatgactactagttatgtacccgctctgctggtaaatggccgtgtaccattggtattctctacttggtgctgttctggccataattttgctaaaagtcacaatgatgtcgggactagtatttctgctttgttgacattcggcggagtcttttttgggggatgggcatctgttaccattttgttgcgtcacagtagtttttggttctcagttaccgtgaccacttacaaatggatcatgctaccgtcggtgtcaaactttttaagcaatacctaggttgtacttgtaccgatgttaatagttggtattcttagattg

SEQ ID NO: 27499 - protein, 429 aa, Zea mays subsp. mays
  peptide (1)..(429): Ceres Seq. ID no. 12409322
  misc_feature (20)..(134): Pfam Name: NTF2 Pfam Description: Nuclear transport factor 2
  misc_feature (20)..(418): NCBI GI NO: 30697455 NR Description: NTF2-containing RNA-binding protein, putative
  misc_feature (20)..(418): NCBI GI NO: 30697452 NR Description: NTF2-containing RNA-binding protein, putative
  misc_feature (20)..(418): NCBI GI NO: 21553535 NR Description: ras-GTPase-activating protein SH3-domain bindingprotein-like
  misc_feature (18)..(424): NCBI GI NO: 9294171 NR Description: RNA-binding protein-like [Arabidopsis thaliana]
  misc_feature (20)..(424): NCBI GI NO: 30687772 NR Description: NTF2-containing RNA-binding protein, putative
  misc_feature (20)..(419): NCBI GI NO: 31126693 NR Description: putative GAP SH3 binding protein
  misc_feature (17)..(276): NCBI GI NO: 15240057 NR Description: NTF2-containing RNA-binding protein, putative
  misc_feature (157)..(420): NCBI GI NO: 15240057 NR Description: NTF2-containing RNA-binding protein, putative
  misc_feature (18)..(259): NCBI GI NO: 10177355 NR Description: RNA-binding protein-like [Arabidopsis thaliana]
  misc_feature (229)..(424): NCBI GI NO: 10177355 NR Description: RNA-binding protein-like [Arabidopsis thaliana]
MDSMEQPEPKTAGHYYALQVGSVFLTGYYNVLTNQPHLANQFYTDNSSVVRLDCETGRWSFGETVEVINDMMMSMKLSKVEVKTANFLESWAGAITLLVTGLVKLKHYPVRKRFAQNIVLAPKEDRYFIFSDIFKLICDEYDDQYPFADYNCADNMPQVEASYTMAEIGSDYLDGEPEAQETVDPAENHVQHQDYLEYKAGNVIDDETHLEEHIPPFPSSTDVKRDSPLALPHPPSPTLEEPVEEAPKTYASVLRTKSKATLAITESQQAQQLAQQPQSASVHEKSNLDNHRDVSVPEDEEEFLSVYVGNLSPSTSVFDLEKVFQAFGRIKPDGVAIRSRKEAGVFFGFVEFEDMSGIQNALSASPVELNGRFVHVEERRPNCGFPRGRRGRGRADFSRDQAGGRYDGEYATRSKGIGHQKKTGRQYDY

SEQ ID NO: 27500 - protein, 426 aa, Zea mays subsp. mays
  peptide (1)..(426): Ceres Seq. ID no. 12409323
  misc_feature (17)..(131): Pfam Name: NTF2 Pfam Description: Nuclear transport factor 2
  misc_feature (17)..(415): NCBI GI NO: 30697455 NR Description: NTF2-containing RNA-binding protein, putative
  misc_feature (17)..(415): NCBI GI NO: 30697452 NR Description: NTF2-containing RNA-binding protein, putative
  misc_feature (17)..(415): NCBI GI NO: 21553535 NR Description: ras-GTPase-activating protein SH3-domain bindingprotein-like
  misc_feature (15)..(421): NCBI GI NO: 9294171 NR Description: RNA-binding protein-like [Arabidopsis thaliana]
  misc_feature (17)..(421): NCBI GI NO: 30687772 NR Description: NTF2-containing RNA-binding protein, putative
  misc_feature (17)..(416): NCBI GI NO: 31126693 NR Description: putative GAP SH3 binding protein
  misc_feature (14)..(273): NCBI GI NO: 15240057 NR Description: NTF2-containing RNA-binding protein, putative
  misc_feature (154)..(417): NCBI GI NO: 15240057 NR Description: NTF2-containing RNA-binding protein, putative
  misc_feature (15)..(256): NCBI GI NO: 10177355 NR Description: RNA-binding protein-like [Arabidopsis thaliana]
  misc_feature (226)..(421): NCBI GI NO: 10177355 NR Description: RNA-binding protein-like [Arabidopsis thaliana]
MEQPEPKTAGHYYALQVGSVFLTGYYNVLTNQPHLANQFYTDNSSVVRLDCETGRWSFGETVEVINDMMMSMKLSKVEVKTANFLESWAGAITLLVTGLVKLKHYPVRKRFAQNIVLAPKEDRYFIFSDIFKLICDEYDDQYPFADYNCADNMPQVEASYTMAEIGSDYLDGEPEAQETVDPAENHVQHQDYLEYKAGNVIDDETHLEEHIPPFPSSTDVKRDSPLALPHPPSPTLEEPVEEAPKTYASVLRTKSKATLAITESQQAQQLAQQPQSASVHEKSNLDNHRDVSVPEDEEEFLSVYVGNLSPSTSVFDLEKVFQAFGRIKPDGVAIRSRKEAGVFFGFVEFEDMSGIQNALSASPVELNGRFVHVEERRPNCGFPRGRRGRGRADFSRDQAGGRYDGEYATRSKGIGHQKKTGRQYDY

SEQ ID NO: 27501 - protein, 359 aa, Zea mays subsp. mays
  peptide (1)..(359): Ceres Seq. ID no. 12409324
  misc_feature (1)..(64): Pfam Name: NTF2 Pfam Description: Nuclear transport factor 2
  misc_feature (1)..(348): NCBI GI NO: 30697455 NR Description: NTF2-containing RNA-binding protein, putative
  misc_feature (1)..(348): NCBI GI NO: 30697452 NR Description: NTF2-containing RNA-binding protein, putative
  misc_feature (1)..(348): NCBI GI NO: 21553535 NR Description: ras-GTPase-activating protein SH3-domain bindingprotein-like
  misc_feature (1)..(354): NCBI GI NO: 9294171 NR Description: RNA-binding protein-like [Arabidopsis thaliana]
  misc_feature (1)..(354): NCBI GI NO: 30687772 NR Description: NTF2-containing RNA-binding protein, putative
  misc_feature (1)..(349): NCBI GI NO: 31126693 NR Description: putative GAP SH3 binding protein
  misc_feature (1)..(206): NCBI GI NO: 15240057 NR Description: NTF2-containing RNA-binding protein, putative
  misc_feature (87)..(350): NCBI GI NO: 15240057 NR Description: NTF2-containing RNA-binding protein, putative
  misc_feature (1)..(189): NCBI GI NO: 10177355 NR Description: RNA-binding protein-like [Arabidopsis thaliana]
  misc_feature (159)..(354): NCBI GI NO: 10177355 NR Description: RNA-binding protein-like [Arabidopsis thaliana]
MMMSMKLSKVEVKTANFLESWAGAITLLVTGLVKLKHYPVRKRFAQNIVLAPKEDRYFIFSDIFKLICDEYDDQYPFADYNCADNMPQVEASYTMAEIGSDYLDGEPEAQETVDPAENHVQHQDYLEYKAGNVIDDETHLEEHIPPFPSSTDVKRDSPLALPHPPSPTLEEPVEEAPKTYASVLRTKSKATLAITESQQAQQLAQQPQSASVHEKSNLDNHRDVSVPEDEEEFLSVYVGNLSPSTSVFDLEKVFQAFGRIKPDGVAIRSRKEAGVFFGFVEFEDMSGIQNALSASPVELNGRFVHVEERRPNCGFPRGRRGRGRADFSRDQAGGRYDGEYATRSKGIGHQKKTGRQYDY

SEQ ID NO: 27502 - DNA, 1519 bp, Zea mays subsp. mays; identical to SEQ ID NO: 25050
  misc_feature (1)..(1519): Ceres Seq. ID no. 13577756

SEQ ID NO: 27503 - protein, 273 aa, Zea mays subsp. mays; identical to SEQ ID NO: 25051
  peptide (1)..(273): Ceres Seq. ID no. 13577757
  misc_feature (1)..(179): Pfam Name: Pfam Description:  Sodium Bile acid symporter family
  misc_feature (1)..(271): NCBI GI NO: 18416020 NR Description: bile acid:sodium symporter family
  misc_feature (1)..(271): NCBI GI NO: 7486890 NR Description: hypothetical protein T12H17
  misc_feature (1)..(272): NCBI GI NO: 18413732 NR Description: bile acid:sodium symporter family
  misc_feature (1)..(253): NCBI GI NO: 7485566 NR Description: hypothetical protein F16J13
  misc_feature (1)..(267): NCBI GI NO: 18404505 NR Description: bile acid:sodium symporter family
  misc_feature (1)..(267): NCBI GI NO: 21554890 NR Description: unknown [Arabidopsis thaliana]
  misc_feature (1)..(255): NCBI GI NO: 9279722 NR Description: contains similarity to transporterprotein~gene_id:MWL2
  misc_feature (1)..(267): NCBI GI NO: 20269901 NR Description: putative sodium-dependent bile acid symporter
  misc_feature (1)..(267): NCBI GI NO: 30683305 NR Description: bile acid:sodium symporter family
  misc_feature (1)..(270): NCBI GI NO: 34911708 NR Description: P0707D10.18

SEQ ID NO: 27504 - protein, 214 aa, Zea mays subsp. mays; identical to SEQ ID NO: 25052
  peptide (1)..(214): Ceres Seq. ID no. 13577758
  misc_feature (1)..(120): Pfam Name: Pfam Description:  Sodium Bile acid symporter family
  misc_feature (1)..(212): NCBI GI NO: 18416020 NR Description: bile acid:sodium symporter family
  misc_feature (1)..(212): NCBI GI NO: 7486890 NR Description: hypothetical protein T12H17
  misc_feature (1)..(213): NCBI GI NO: 18413732 NR Description: bile acid:sodium symporter family
  misc_feature (1)..(194): NCBI GI NO: 7485566 NR Description: hypothetical protein F16J13
  misc_feature (1)..(208): NCBI GI NO: 18404505 NR Description: bile acid:sodium symporter family
  misc_feature (1)..(208): NCBI GI NO: 21554890 NR Description: unknown [Arabidopsis thaliana]
  misc_feature (1)..(196): NCBI GI NO: 9279722 NR Description: contains similarity to transporterprotein~gene_id:MWL2
  misc_feature (1)..(208): NCBI GI NO: 20269901 NR Description: putative sodium-dependent bile acid symporter
  misc_feature (1)..(208): NCBI GI NO: 30683305 NR Description: bile acid:sodium symporter family
  misc_feature (1)..(211): NCBI GI NO: 34911708 NR Description: P0707D10.18

SEQ ID NO: 27505 - protein, 192 aa, Zea mays subsp. mays; identical to SEQ ID NO: 25053
  peptide (1)..(192): Ceres Seq. ID no. 13577759
  misc_feature (1)..(98): Pfam Name: Pfam Description:  Sodium Bile acid symporter family
  misc_feature (1)..(190): NCBI GI NO: 18416020 NR Description: bile acid:sodium symporter family
  misc_feature (1)..(190): NCBI GI NO: 7486890 NR Description: hypothetical protein T12H17
  misc_feature (1)..(191): NCBI GI NO: 18413732 NR Description: bile acid:sodium symporter family
  misc_feature (1)..(172): NCBI GI NO: 7485566 NR Description: hypothetical protein F16J13
  misc_feature (1)..(186): NCBI GI NO: 18404505 NR Description: bile acid:sodium symporter family
  misc_feature (1)..(186): NCBI GI NO: 21554890 NR Description: unknown [Arabidopsis thaliana]
  misc_feature (1)..(174): NCBI GI NO: 9279722 NR Description: contains similarity to transporterprotein~gene_id:MWL2
  misc_feature (1)..(186): NCBI GI NO: 20269901 NR Description: putative sodium-dependent bile acid symporter
  misc_feature (1)..(186): NCBI GI NO: 30683305 NR Description: bile acid:sodium symporter family
  misc_feature (1)..(189): NCBI GI NO: 34911708 NR Description: P0707D10.18

SEQ ID NO: 27506 - DNA, 1418 bp, Zea mays subsp. mays
  misc_feature (1)..(1418): Ceres Seq. ID no. 13564606
gcacgagaccattacctagaacatcytaatcgaaaaacaagagtagggagtggtgcgagaaatcaatccgccccatgcccacatccgtcgccacccacgcaaccctcctcatcaaagccgcagccgccaagcccttcttctcsccccgcccggcggcccggatccccgccccttctcctcaccctcctcccccgcccgccggccgccgcctgccgaacacggcggccgctctcgccgccgcagcccgtcggttccggtggccgtcggcggccgcgtcggcgcgggggctgtgcgcgccgccgcattccggcggcgaggggatgggatctgatgcgggggcgggggccaggaagaggcgggacccggccgtgaacgggctcgccaaggacgtgccgccagtgaacgggatgatgatgcccaaggaggagccggcgaccgcgccgcccaggttgctcacgctgcccaccgtgctcaccattggccgcgtcgctgctgtgccgcttctgatcagcactttctacatggagggtccatgggcagctacggccacaacaggcatctttcttgctgctgcagtcactgattggctagatggttatatcgctagaaagatgcagctaggaacaccttttggtgcatttcttgatcctgtggctgacaagcttatggtagccgcaacattagttttactatgcaccaaacctttggaaacatcactgctcaatgatgggccatggcttctaacagtcccttccattgctatcattgggagagagattacaatgtcagctgtgagagaatgggccgcatctcagaatagtgaagctcttgaggctgttgcagttaacaacttagggaagtggaagacagcaacgcagatgacagcattgactctgcttctcgccagcagagacccaagtgtacctgcgcaaggtgctctagttgcccccggtgttgctctactttacatttccgctggactcgccatatggtccctagtggtgtacatgagaaagatatggcggatacttctaaaatagtattagcacaatatatatagtgtagtagaagaaacagaagcaaggcgaggttctattcgtgatcgtacgatttttggaaggctgcttagttgattggtggactgggacctagagctgcttgtgatcctcattcctcagtaacttgtgcgtcatctatttttgccgccaaatttgctgaagtatgccaggattctagacatgatgtgaccctgcgtgcttaaggagacataagtctgcaatgcagaagattgtaacccaatacaaacacaaaacccggaggtttgtgcatgtggagttctatcattgtaatctgcacataatatcatatgccaggagcatgcaattattcttttcagtggggacgatatccctgtctcc

SEQ ID NO: 27507 - protein, 321 aa, Zea mays subsp. mays
  peptide (1)..(321): Ceres Seq. ID no. 15222577
  misc_feature (160)..(314): Pfam Name: Pfam Description:  CDP-alcohol phosphatidyltransferase
  misc_feature (1)..(321): NCBI GI NO: 24796824 NR Description: putative phosphatidylglycerolphosphate synthase
  misc_feature (119)..(321): NCBI GI NO: 15225064 NR Description: phosphatidylglycerolphosphate synthase (PGS1)
  misc_feature (101)..(321): NCBI GI NO: 15233163 NR Description: phosphatidylglycerolphosphate synthase
  misc_feature (127)..(316): NCBI GI NO: 23061902 NR Description: hypothetical protein
  misc_feature (127)..(316): NCBI GI NO: 23472904 NR Description: hypothetical protein
  misc_feature (127)..(316): NCBI GI NO: 27753591 NR Description: CDP-diacylglycerol-glycerol-3-phosphate
  misc_feature (127)..(316): NCBI GI NO: 28870198 NR Description: CDP-diacylglycerol --glycerol-3-phosphate 3-phosphatidyltransferase
  misc_feature (127)..(316): NCBI GI NO: 26990792 NR Description: CDP-diacylglycerol --glycerol-3-phosphate 3-phosphatidyltransferase
  misc_feature (127)..(316): NCBI GI NO: 23104171 NR Description: hypothetical protein [Azotobacter vinelandii]
  misc_feature (127)..(316): NCBI GI NO: 15597780 NR Description: CDP-diacylglycerol --glycerol-3-phosphate 3-phosphatidyltransferase
  misc_feature (23)..(23): Xaa is any aa, unknown or other
MPTSVATHATLLIKAAAAKPFFXPRPAARIPAPSPHPPPPPAGRRLPNTAAALAAAARRFRWPSAAASARGLCAPPHSGGEGMGSDAGAGARKRRDPAVNGLAKDVPPVNGMMMPKEEPATAPPRLLTLPTVLTIGRVAAVPLLISTFYMEGPWAATATTGIFLAAAVTDWLDGYIARKMQLGTPFGAFLDPVADKLMVAATLVLLCTKPLETSLLNDGPWLLTVPSIAIIGREITMSAVREWAASQNSEALEAVAVNNLGKWKTATQMTALTLLLASRDPSVPAQGALVAPGVALLYISAGLAIWSLVVYMRKIWRILLK

SEQ ID NO: 27508 - protein, 239 aa, Zea mays subsp. mays
  peptide (1)..(239): Ceres Seq. ID no. 15222578
  misc_feature (78)..(232): Pfam Name: Pfam Description:  CDP-alcohol phosphatidyltransferase
  misc_feature (1)..(239): NCBI GI NO: 24796824 NR Description: putative phosphatidylglycerolphosphate synthase
  misc_feature (37)..(239): NCBI GI NO: 15225064 NR Description: phosphatidylglycerolphosphate synthase (PGS1)
  misc_feature (19)..(239): NCBI GI NO: 15233163 NR Description: phosphatidylglycerolphosphate synthase
  misc_feature (45)..(234): NCBI GI NO: 23061902 NR Description: hypothetical protein
  misc_feature (45)..(234): NCBI GI NO: 23472904 NR Description: hypothetical protein
  misc_feature (45)..(234): NCBI GI NO: 27753591 NR Description: CDP-diacylglycerol-glycerol-3-phosphate
  misc_feature (45)..(234): NCBI GI NO: 28870198 NR Description: CDP-diacylglycerol --glycerol-3-phosphate 3-phosphatidyltransferase
  misc_feature (45)..(234): NCBI GI NO: 26990792 NR Description: CDP-diacylglycerol --glycerol-3-phosphate 3-phosphatidyltransferase
  misc_feature (45)..(234): NCBI GI NO: 23104171 NR Description: hypothetical protein [Azotobacter vinelandii]
  misc_feature (45)..(234): NCBI GI NO: 15597780 NR Description: CDP-diacylglycerol --glycerol-3-phosphate 3-phosphatidyltransferase
MGSDAGAGARKRRDPAVNGLAKDVPPVNGMMMPKEEPATAPPRLLTLPTVLTIGRVAAVPLLISTFYMEGPWAATATTGIFLAAAVTDWLDGYIARKMQLGTPFGAFLDPVADKLMVAATLVLLCTKPLETSLLNDGPWLLTVPSIAIIGREITMSAVREWAASQNSEALEAVAVNNLGKWKTATQMTALTLLLASRDPSVPAQGALVAPGVALLYISAGLAIWSLVVYMRKIWRILLK

SEQ ID NO: 27509 - protein, 210 aa, Zea mays subsp. mays
  peptide (1)..(210): Ceres Seq. ID no. 15222579
  misc_feature (49)..(203): Pfam Name: Pfam Description:  CDP-alcohol phosphatidyltransferase
  misc_feature (1)..(210): NCBI GI NO: 24796824 NR Description: putative phosphatidylglycerolphosphate synthase
  misc_feature (8)..(210): NCBI GI NO: 15225064 NR Description: phosphatidylglycerolphosphate synthase (PGS1)
  misc_feature (1)..(210): NCBI GI NO: 15233163 NR Description: phosphatidylglycerolphosphate synthase
  misc_feature (16)..(205): NCBI GI NO: 23061902 NR Description: hypothetical protein
  misc_feature (16)..(205): NCBI GI NO: 23472904 NR Description: hypothetical protein
  misc_feature (16)..(205): NCBI GI NO: 27753591 NR Description: CDP-diacylglycerol-glycerol-3-phosphate
  misc_feature (16)..(205): NCBI GI NO: 28870198 NR Description: CDP-diacylglycerol --glycerol-3-phosphate 3-phosphatidyltransferase
  misc_feature (16)..(205): NCBI GI NO: 26990792 NR Description: CDP-diacylglycerol --glycerol-3-phosphate 3-phosphatidyltransferase
  misc_feature (16)..(205): NCBI GI NO: 23104171 NR Description: hypothetical protein [Azotobacter vinelandii]
  misc_feature (16)..(205): NCBI GI NO: 15597780 NR Description: CDP-diacylglycerol --glycerol-3-phosphate 3-phosphatidyltransferase
MMMPKEEPATAPPRLLTLPTVLTIGRVAAVPLLISTFYMEGPWAATATTGIFLAAAVTDWLDGYIARKMQLGTPFGAFLDPVADKLMVAATLVLLCTKPLETSLLNDGPWLLTVPSIAIIGREITMSAVREWAASQNSEALEAVAVNNLGKWKTATQMTALTLLLASRDPSVPAQGALVAPGVALLYISAGLAIWSLVVYMRKIWRILLK

SEQ ID NO: 27510 - DNA, 1140 bp, Zea mays subsp. mays
  misc_feature (1)..(1140): Ceres Seq. ID no. 12409319
agtcccagacgaaacaagcctggtggtagtgggtaccttgccgttgcccggcctggccggctggccctcgtgtgcgttcctcgctcgatctccctccttcggtcaaaagccaacatgacaacacacgagtctgggtagctgtcccccgcgcggctcgccccctcgctcctcggcgccgctgccggcccgcgcctgcgcctgcggctcgcgccctctatacctccgcccgcccgtccccctcgtgccgctctgcctgccccccgcattccgcgccgcctcgccaccgaactgggaggaatctgcggggaagggggatatggggtcgccgggtgcggggagcagcggcggccacgagtgctccttcaagttcctcctcatcggggactcgggcgtcggcaagagcagcctcctcgtcagcttcgtcgccgcctcctacctcgacggcgacatcgcccccaccatcggtgtggattttaaaatcaagttccttacagttggtggaaagaaactaaagttgacaatatgggatactgctggccaggagaggtttaggacaattactagttcttactacagaggtgctcagggaattattctagtatatgatgtcacaaagagagaaagtttctcaaatttggctgatgtttggactaaggaaatagaagcaaactcaacaaacaaagactgcataaaaatgcttgttggaaacaaagttgacaaggatgatgaaagaatggtcacaaaagaggaaggtcttgcttttgctgaagaatatggatgtctgtttcttgagagcagtgcaaaaacacgagaaaacgttgagaaatgttttgaggaacttgcattgaagattcttgaggtgcctagtctcctagaggaagggtcttcttcggttgtcaagaggaacatcctgaaacagaagcaggaaagtgatgcaaagaacggtagtggatgctgtcaatagatgtatgtgctgatccacaccacacggttggctttcttcgtgtgagctgccctgattgtctgctgtacatgttcttgtgagtaagaagggcgagcataattgatttgtacaaaggacatgtcagtttggtgtcatagttttcctcatctccagtttagtatagcaattttgttgtc

SEQ ID NO: 27511 - protein, 215 aa, Zea mays subsp. mays
  peptide (1)..(215): Ceres Seq. ID no. 12409320
  misc_feature (17)..(181): Pfam Name: Pfam Description:  Ras family
  misc_feature (1)..(215): NCBI GI NO: 37534998 NR Description: putative GTP-binding protein
  misc_feature (9)..(215): NCBI GI NO: 15451614 NR Description: Putative GTP-binding protein [Oryza sativa]
  misc_feature (6)..(214): NCBI GI NO: 1370172 NR Description: RAB1X [Lotus japonicus]
  misc_feature (1)..(214): NCBI GI NO: 18414255 NR Description: putative protein; protein id: At5g03530
  misc_feature (7)..(214): NCBI GI NO: 15218575 NR Description: GTP-binding protein
  misc_feature (16)..(214): NCBI GI NO: 1370174 NR Description: RAB1Y [Lotus japonicus]
  misc_feature (1)..(214): NCBI GI NO: 15232785 NR Description: GTP-binding protein, putative
  misc_feature (73)..(214): NCBI GI NO: 25294118 NR Description: protein F9C16.3 [imported] - Arabidopsis thaliana
  misc_feature (7)..(72): NCBI GI NO: 25294118 NR Description: protein F9C16.3 [imported] - Arabidopsis thaliana
  misc_feature (15)..(212): NCBI GI NO: 40807131 NR Description: Unknown (protein for MGC:77145) [Danio rerio]
MGSPGAGSSGGHECSFKFLLIGDSGVGKSSLLVSFVAASYLDGDIAPTIGVDFKIKFLTVGGKKLKLTIWDTAGQERFRTITSSYYRGAQGIILVYDVTKRESFSNLADVWTKEIEANSTNKDCIKMLVGNKVDKDDERMVTKEEGLAFAEEYGCLFLESSAKTRENVEKCFEELALKILEVPSLLEEGSSSVVKRNILKQKQESDAKNGSGCCQ

SEQ ID NO: 27512 - DNA, 1968 bp, Zea mays subsp. mays
  misc_feature (1)..(1968): Ceres Seq. ID no. 12362596
gcacgagaccattacctagaacatcctaatcaaaacccgactccctcggctgcctcccgcagccgcccgctgctccggtccttccgaacgctggcctgttcttccctgcctttggcccattcgtcaggcggcccctccgcaggcgacgcaggcgcggtcacgacggcgcgtggccccgactacgtagacagctaaccggtctccgcctccggcccttctcctgtcgcccgattgagtcgctgctgcaactgccaacttcacccccggcgagctcaccacagtcttccggaaaggtgctatcaatttggaagatggcagatgaggagcaggccccaagctctaggaaaagggttgcaggtactcaaatcaacaaggataatccggaacctgatgatgaaggaacagaacaagagatgggtacatttaagaaagctactgaagaagttatggcaacacggaggattgtaaaggttcggcgccagcagacgtcatcagcttcttctaaccctttctctgcaatcagatttgcccccactgattctagtgctcaaacaagtgctcctgtcccagaggtccaaccttcagatgtcaaagttgacgagggaagcaatggtagcgggaaagatactttgtctctgcccgacaagactgctggctctggggtaaatacggactctagtgcctcaactgaagcaccacctcagcctgttgaaaccagtgacaaggcagaagacacaaaggacgaatctagtggagacaaagtggtagttggagaacccaatgaaggcagttgcatgccatctgaagttgagggcaaaacaaaagagggagatgctgaagaaaaggaaaggacagatgaagctggaaatatcgataaaattagcaaggatgacactgggaagaaagatggagatgacactgagaagaaagatggaggtgatgatactggaggtgaatcagagcagaaagggcaaacaccatcagcaacaccccttttctcgtttaagaatctgtcaagtggtcaaaatgctttcacaggtctgaccggaactggattttcaagcacatcattctcgtttggctcagcctctaaagatggctcaagtgctggtcccctatttgggctgaaagctgatggttcttcgttcccttcttttaatcttggtgctgccaccaatgggggttctgccacagctcttgctacttcagcagaggcacccaagatgtttgctatgacagagggccctgtcgaaaccggtgaagaaaatgagaaggctgtattcagcgctgattctgctttgtacgagtacttagatgggggctggaaagaaagaggaaaaggtgaactgaagctgaacgtccccgtatctgggggcgagcgagcccggcctcgtcatgaggacaaaaggcaactaccggctggtcctgaatgcaagcctctacaacgacatgtcgctcaaggacatggacaagaagggcgtgacatttgcctgtatgaacagcattggggagtcgccgagcagcctcgctacatttgctctgaagttcaaggacacggccaccagggaggaattcaaggatgcggtggagtctcacaagacaagcaaggcacaggaactgccgctgaagacgcccgagaactctccgaaggcagcagaagtctgaagccgcacccgagtcacgcttgctcgtgtcttttgtacgtgtccaggaaggaaggaactgagagagtttctgttgttgcggagtttttaagaatgtcgcgtcatgacatatgatgtcctgagttgtattttgcgtacgggttccctggtgctgtttttgggaacttaccattactacaggcgcataatcttgggatcctggacaagggactcgttttatctatttgctcgtcttgtgctccgttatgttctatcggttaagttgcgcgtgacgctattatgtcatgaataaatgtatgcaatt

SEQ ID NO: 27513 - protein, 488 aa, Zea mays subsp. mays
  peptide (1)..(488): Ceres Seq. ID no. 12362597
  misc_feature (1)..(359): NCBI GI NO: 18400970 NR Description: expressed protein; protein id: At3g15970
  misc_feature (1)..(359): NCBI GI NO: 21536684 NR Description: unknown [Arabidopsis thaliana]
  misc_feature (197)..(359): NCBI GI NO: 22655290 NR Description: unknown protein [Arabidopsis thaliana]
  misc_feature (1)..(310): NCBI GI NO: 18403992 NR Description: expressed protein; protein id: At1g52380
  misc_feature (117)..(359): NCBI GI NO: 18403992 NR Description: expressed protein; protein id: At1g52380
  misc_feature (1)..(360): NCBI GI NO: 40747404 NR Description: hypothetical protein AN0461.2
MADEEQAPSSRKRVAGTQINKDNPEPDDEGTEQEMGTFKKATEEVMATRRIVKVRRQQTSSASSNPFSAIRFAPTDSSAQTSAPVPEVQPSDVKVDEGSNGSGKDTLSLPDKTAGSGVNTDSSASTEAPPQPVETSDKAEDTKDESSGDKVVVGEPNEGSCMPSEVEGKTKEGDAEEKERTDEAGNIDKISKDDTGKKDGDDTEKKDGGDDTGGESEQKGQTPSATPLFSFKNLSSGQNAFTGLTGTGFSSTSFSFGSASKDGSSAGPLFGLKADGSSFPSFNLGAATNGGSATALATSAEAPKMFAMTEGPVETGEENEKAVFSADSALYEYLDGGWKERGKGELKLNVPVSGGERARPRHEDKRQLPAGPECKPLQRHVAQGHGQEGRDICLYEQHWGVAEQPRYICSEVQGHGHQGGIQGCGGVSQDKQGTGTAAEDARELSEGSRSLKPHPSHACSCLLYVSRKEGTERVSVVAEFLRMSRHDI

SEQ ID NO: 27514 - protein, 454 aa, Zea mays subsp. mays
  peptide (1)..(454): Ceres Seq. ID no. 12362598
  misc_feature (1)..(325): NCBI GI NO: 18400970 NR Description: expressed protein; protein id: At3g15970
  misc_feature (1)..(325): NCBI GI NO: 21536684 NR Description: unknown [Arabidopsis thaliana]
  misc_feature (163)..(325): NCBI GI NO: 22655290 NR Description: unknown protein [Arabidopsis thaliana]
  misc_feature (1)..(276): NCBI GI NO: 18403992 NR Description: expressed protein; protein id: At1g52380
  misc_feature (83)..(325): NCBI GI NO: 18403992 NR Description: expressed protein; protein id: At1g52380
  misc_feature (1)..(326): NCBI GI NO: 40747404 NR Description: hypothetical protein AN0461.2
MGTFKKATEEVMATRRIVKVRRQQTSSASSNPFSAIRFAPTDSSAQTSAPVPEVQPSDVKVDEGSNGSGKDTLSLPDKTAGSGVNTDSSASTEAPPQPVETSDKAEDTKDESSGDKVVVGEPNEGSCMPSEVEGKTKEGDAEEKERTDEAGNIDKISKDDTGKKDGDDTEKKDGGDDTGGESEQKGQTPSATPLFSFKNLSSGQNAFTGLTGTGFSSTSFSFGSASKDGSSAGPLFGLKADGSSFPSFNLGAATNGGSATALATSAEAPKMFAMTEGPVETGEENEKAVFSADSALYEYLDGGWKERGKGELKLNVPVSGGERARPRHEDKRQLPAGPECKPLQRHVAQGHGQEGRDICLYEQHWGVAEQPRYICSEVQGHGHQGGIQGCGGVSQDKQGTGTAAEDARELSEGSRSLKPHPSHACSCLLYVSRKEGTERVSVVAEFLRMSRHDI

SEQ ID NO: 27515 - protein, 443 aa, Zea mays subsp. mays
  peptide (1)..(443): Ceres Seq. ID no. 12362599
  misc_feature (1)..(314): NCBI GI NO: 18400970 NR Description: expressed protein; protein id: At3g15970
  misc_feature (1)..(314): NCBI GI NO: 21536684 NR Description: unknown [Arabidopsis thaliana]
  misc_feature (152)..(314): NCBI GI NO: 22655290 NR Description: unknown protein [Arabidopsis thaliana]
  misc_feature (1)..(265): NCBI GI NO: 18403992 NR Description: expressed protein; protein id: At1g52380
  misc_feature (72)..(314): NCBI GI NO: 18403992 NR Description: expressed protein; protein id: At1g52380
  misc_feature (1)..(315): NCBI GI NO: 40747404 NR Description: hypothetical protein AN0461.2
MATRRIVKVRRQQTSSASSNPFSAIRFAPTDSSAQTSAPVPEVQPSDVKVDEGSNGSGKDTLSLPDKTAGSGVNTDSSASTEAPPQPVETSDKAEDTKDESSGDKVVVGEPNEGSCMPSEVEGKTKEGDAEEKERTDEAGNIDKISKDDTGKKDGDDTEKKDGGDDTGGESEQKGQTPSATPLFSFKNLSSGQNAFTGLTGTGFSSTSFSFGSASKDGSSAGPLFGLKADGSSFPSFNLGAATNGGSATALATSAEAPKMFAMTEGPVETGEENEKAVFSADSALYEYLDGGWKERGKGELKLNVPVSGGERARPRHEDKRQLPAGPECKPLQRHVAQGHGQEGRDICLYEQHWGVAEQPRYICSEVQGHGHQGGIQGCGGVSQDKQGTGTAAEDARELSEGSRSLKPHPSHACSCLLYVSRKEGTERVSVVAEFLRMSRHDI

SEQ ID NO: 27516 - DNA, 1366 bp, Zea mays subsp. mays
  misc_feature (1)..(1366): Ceres Seq. ID no. 12435021
cttcttctcgccgggcgtcctcagtgctgccctgtccaaggcgctcgtccgcttctaccccctcgccggccggctcgcgcaggacggcgccggccgcccgcagatccactgcaccggagaaggcgcgctcctcgtcaccgcgcgcgccgacgctaccctccaggacacccccggcgggttcgccccgtcggatgagctgcggcagatgcttgtcccctcggctgccgacggcgaagaccgcgccggcatcttggccatgttccaggtgacgtccttcaagtgcggcggggtgtgcgtgggcgcggcgatccaccacacggcggcggacggcctagcggcgctcgacttcgtcaacacgtgggccgccatcgcgagcaagggcgtcgacgaggccgcgccggcgccgcgcccgtggctggaccgcacgctgctccgcgcgcgctcccctcccgacgtgcgcttcgaccacagcgagtactccccgcggggcggcggcggtccaaagacggcgagggtcccgttcgactccgccatcctacccatgtccaagacccaggtggacgcgctcagggccggcaagaaggtgtccacgttcaaggccgtggtcgcccacgtgtggcggtgcgcgtgcatagcgcgcgggctcgcgggagacgaggacacccgtctgtacatgaccgccgacgcgcgctcccgcgtccgcccgccgctcccggaaggctacctcggcaacgccatcttccgcgcgtcagcggtggccacggcgggcgacgtcgtctccgagcagctcgacgccgttgcgggtagggtgtccggcgccaccgcccggctggacgacgagtacgtccgatcgctggtggactacctggagcaggtggtgggcgatgtggcggggctccgcaagggggagtgggtgatgccggagaccgacctgtgggtgataagctggcaggggctgcccatctacgacgccgacttcggctggggacggccggcgttcatgggccgcgcgtgcctccagttcagcggcctcgtgtacctcgtcccgggcccggacggcgacggccgcctcgacgtcgtcgtggccatggagcccaagagcctggccagattcaaggagctgttgtacgagctcaaaggtgcaggtgttccgtgcacggcagactgagctgctgcattccgtgcaggttccttagcttgctaccggctggcaaaacgaaaacctgtttgccggattgttccttgcattgcgtatctacttcgacctttactgcagtactcctagttttctactcgttgcttttgatggcaatctggtgagtactgtactctatatgcatttacatggctatctatattcggagcg

SEQ ID NO: 27517 - protein, 388 aa, Zea mays subsp. mays
  peptide (1)..(388): Ceres Seq. ID no. 12435022
  misc_feature (1)..(377): Pfam Name: Pfam Description:  Transferase family
  misc_feature (1)..(377): NCBI GI NO: 6469032 NR Description: N-hydroxycinnamoyl/benzoyltransferase
  misc_feature (1)..(377): NCBI GI NO: 27475616 NR Description: hydroxycinnamoyl transferase [Nicotiana tabacum]
  misc_feature (1)..(377): NCBI GI NO: 40644899 NR Description: hydroxycinnamoyl CoA quinate transferase
  misc_feature (1)..(378): NCBI GI NO: 40644084 NR Description: hydroxycinnamoyl CoA quinate transferase
  misc_feature (1)..(378): NCBI GI NO: 15239747 NR Description: anthranilate N-benzoyltransferase
  misc_feature (1)..(378): NCBI GI NO: 21536883 NR Description: anthranilate N-benzoyltransferase
  misc_feature (1)..(378): NCBI GI NO: 38345030 NR Description: OSJNBa0029H02.14
  misc_feature (1)..(377): NCBI GI NO: 7484689 NR Description: anthranilate N-benzoyltransferase (EC 2
  misc_feature (1)..(377): NCBI GI NO: 7484690 NR Description: anthranilate N-benzoyltransferase (EC 2
  misc_feature (1)..(377): NCBI GI NO: 7484692 NR Description: anthranilate N-benzoyltransferase (EC 2
FFSPGVLSAALSKALVRFYPLAGRLAQDGAGRPQIHCTGEGALLVTARADATLQDTPGGFAPSDELRQMLVPSAADGEDRAGILAMFQVTSFKCGGVCVGAAIHHTAADGLAALDFVNTWAAIASKGVDEAAPAPRPWLDRTLLRARSPPDVRFDHSEYSPRGGGGPKTARVPFDSAILPMSKTQVDALRAGKKVSTFKAVVAHVWRCACIARGLAGDEDTRLYMTADARSRVRPPLPEGYLGNAIFRASAVATAGDVVSEQLDAVAGRVSGATARLDDEYVRSLVDYLEQVVGDVAGLRKGEWVMPETDLWVISWQGLPIYDADFGWGRPAFMGRACLQFSGLVYLVPGPDGDGRLDVVVAMEPKSLARFKELLYELKGAGVPCTAD

SEQ ID NO: 27518 - protein, 320 aa, Zea mays subsp. mays
  peptide (1)..(320): Ceres Seq. ID no. 12435023
  misc_feature (1)..(309): Pfam Name: Pfam Description:  Transferase family
  misc_feature (1)..(309): NCBI GI NO: 6469032 NR Description: N-hydroxycinnamoyl/benzoyltransferase
  misc_feature (1)..(309): NCBI GI NO: 27475616 NR Description: hydroxycinnamoyl transferase [Nicotiana tabacum]
  misc_feature (1)..(309): NCBI GI NO: 40644899 NR Description: hydroxycinnamoyl CoA quinate transferase
  misc_feature (1)..(310): NCBI GI NO: 40644084 NR Description: hydroxycinnamoyl CoA quinate transferase
  misc_feature (1)..(310): NCBI GI NO: 15239747 NR Description: anthranilate N-benzoyltransferase
  misc_feature (1)..(310): NCBI GI NO: 21536883 NR Description: anthranilate N-benzoyltransferase
  misc_feature (1)..(310): NCBI GI NO: 38345030 NR Description: OSJNBa0029H02.14
  misc_feature (1)..(309): NCBI GI NO: 7484689 NR Description: anthranilate N-benzoyltransferase (EC 2
  misc_feature (1)..(309): NCBI GI NO: 7484690 NR Description: anthranilate N-benzoyltransferase (EC 2
  misc_feature (1)..(309): NCBI GI NO: 7484692 NR Description: anthranilate N-benzoyltransferase (EC 2
MLVPSAADGEDRAGILAMFQVTSFKCGGVCVGAAIHHTAADGLAALDFVNTWAAIASKGVDEAAPAPRPWLDRTLLRARSPPDVRFDHSEYSPRGGGGPKTARVPFDSAILPMSKTQVDALRAGKKVSTFKAVVAHVWRCACIARGLAGDEDTRLYMTADARSRVRPPLPEGYLGNAIFRASAVATAGDVVSEQLDAVAGRVSGATARLDDEYVRSLVDYLEQVVGDVAGLRKGEWVMPETDLWVISWQGLPIYDADFGWGRPAFMGRACLQFSGLVYLVPGPDGDGRLDVVVAMEPKSLARFKELLYELKGAGVPCTAD

SEQ ID NO: 27519 - protein, 303 aa, Zea mays subsp. mays
  peptide (1)..(303): Ceres Seq. ID no. 12435024
  misc_feature (1)..(292): Pfam Name: Pfam Description:  Transferase family
  misc_feature (1)..(292): NCBI GI NO: 6469032 NR Description: N-hydroxycinnamoyl/benzoyltransferase
  misc_feature (1)..(292): NCBI GI NO: 27475616 NR Description: hydroxycinnamoyl transferase [Nicotiana tabacum]
  misc_feature (1)..(292): NCBI GI NO: 40644899 NR Description: hydroxycinnamoyl CoA quinate transferase
  misc_feature (1)..(293): NCBI GI NO: 40644084 NR Description: hydroxycinnamoyl CoA quinate transferase
  misc_feature (1)..(293): NCBI GI NO: 15239747 NR Description: anthranilate N-benzoyltransferase
  misc_feature (1)..(293): NCBI GI NO: 21536883 NR Description: anthranilate N-benzoyltransferase
  misc_feature (1)..(293): NCBI GI NO: 38345030 NR Description: OSJNBa0029H02.14
  misc_feature (1)..(292): NCBI GI NO: 7484689 NR Description: anthranilate N-benzoyltransferase (EC 2
  misc_feature (1)..(292): NCBI GI NO: 7484690 NR Description: anthranilate N-benzoyltransferase (EC 2
  misc_feature (1)..(292): NCBI GI NO: 7484692 NR Description: anthranilate N-benzoyltransferase (EC 2
MFQVTSFKCGGVCVGAAIHHTAADGLAALDFVNTWAAIASKGVDEAAPAPRPWLDRTLLRARSPPDVRFDHSEYSPRGGGGPKTARVPFDSAILPMSKTQVDALRAGKKVSTFKAVVAHVWRCACIARGLAGDEDTRLYMTADARSRVRPPLPEGYLGNAIFRASAVATAGDVVSEQLDAVAGRVSGATARLDDEYVRSLVDYLEQVVGDVAGLRKGEWVMPETDLWVISWQGLPIYDADFGWGRPAFMGRACLQFSGLVYLVPGPDGDGRLDVVVAMEPKSLARFKELLYELKGAGVPCTAD

SEQ ID NO: 27520 - DNA, 1034 bp, Zea mays subsp. mays
  misc_feature (1)..(1034): Ceres Seq. ID no. 12349099
tccttcccccttccccgcttcgacaagtctcgtcccccgcccccttattccattacgagcaactccgccgccgccgccgtaaagccatctcccccatccgccgccgccgccaccgctgctggtgggacgggccgtgcgcccgttccagcgaagaggatcagcgggtcggaggagccgccggcgaggtcgggccgcgggggatcgagatggtgctgtgggagctcacggccatcaccgcctacttcctcgggctgaggcgcacctaccgcctcgcgctccgcatccagcgccgcctcatcccgcccaaccaccccaggatccgggacttcgtctacaggcgcacacgggatgtcttcaacgtcgcagtgtcggtccacaagaacattcagcagagagacatagaggtcggccggaacctcggaaacgcgatccttcgctggcttgatcgcatgaagccatcagcggagatccgcccccgtcttccaggcccaccaaacggcagcacggccgagcagttcagacatgtatcgagcgcgagcaggggcgcgggggcacagaagacctcctcctcctccaaagcttcgccccacgactccagcgggaagatgctgttctcgcgcctcaacattgggcccaagcacttcccggttctgcccacgctagcacagcccaacaggatcagcgcgagcagccagtgcaggcgcttctcctactcctacgccccgttcccgtcggtcactgccaggaggaagggtgtcttccgcgaggacattgcacagctgatggtgtaaggatctaaaatacttgccagcgatctcgtgtactgtttttttgtttttggaacactggacttagtgatttgcccagatcagatgtctgatgtgtcttggtttaataataaagaagcgagcgagcgcaggggaaattgtcactgctgctgcggtttaggccattagatttgtaaccaaatgctcagatgaacagcatttcgtgtttggtaatgaacaccagaacatgtgcactcgtttatgtgc

SEQ ID NO: 27521 - protein, 262 aa, Zea mays subsp. mays
  peptide (1)..(262): Ceres Seq. ID no. 12349100
  misc_feature (69)..(261): NCBI GI NO: 15222623 NR Description: hypothetical protein; protein id: At1g32260.1
  misc_feature (69)..(262): NCBI GI NO: 30686423 NR Description: expressed protein [Arabidopsis thaliana]
  misc_feature (113)..(262): NCBI GI NO: 25370789 NR Description: hypothetical protein At2g35480
LPPSPLRQVSSPAPLFHYEQLRRRRRKAISPIRRRRHRCWWDGPCARSSEEDQRVGGAAGEVGPRGIEMVLWELTAITAYFLGLRRTYRLALRIQRRLIPPNHPRIRDFVYRRTRDVFNVAVSVHKNIQQRDIEVGRNLGNAILRWLDRMKPSAEIRPRLPGPPNGSTAEQFRHVSSASRGAGAQKTSSSSKASPHDSSGKMLFSRLNIGPKHFPVLPTLAQPNRISASSQCRRFSYSYAPFPSVTARRKGVFREDIAQLMV

SEQ ID NO: 27522 - protein, 194 aa, Zea mays subsp. mays
  peptide (1)..(194): Ceres Seq. ID no. 12349101
  misc_feature (1)..(193): NCBI GI NO: 15222623 NR Description: hypothetical protein; protein id: At1g32260.1
  misc_feature (1)..(194): NCBI GI NO: 30686423 NR Description: expressed protein [Arabidopsis thaliana]
  misc_feature (45)..(194): NCBI GI NO: 25370789 NR Description: hypothetical protein At2g35480
MVLWELTAITAYFLGLRRTYRLALRIQRRLIPPNHPRIRDFVYRRTRDVFNVAVSVHKNIQQRDIEVGRNLGNAILRWLDRMKPSAEIRPRLPGPPNGSTAEQFRHVSSASRGAGAQKTSSSSKASPHDSSGKMLFSRLNIGPKHFPVLPTLAQPNRISASSQCRRFSYSYAPFPSVTARRKGVFREDIAQLMV

SEQ ID NO: 27523 - DNA, 1462 bp, Zea mays subsp. mays
  misc_feature (1)..(1462): Ceres Seq. ID no. 12344135
tttttctcagccctctcagtctcacacaccacaccagagcagcgcagccgagcatgcactcatcacatcagctcctcgtctcctagctttcctattcctgccttgataattggccaattgttcgatctccttctttactaccccctttgctttcgttgctgctactactactgttccatctcctaggtttcgttgttgtccctgcaggccgccactgagtgatttgttagcagataagatttagatctcccagataaaaaaaagaggttgagaggagagctagcactaggcactagcaagcctgctgtgaggtgaatatggatccagtcgcagcatccatacacggtcatcatcttcctccaccgttcaacacccgggacttccatcaccatctccagcaacagcagcagcagctcaagaccgaggacgaccacggcagcggcgcgccaggactgttcggcagccgcggcaccaagggcgaccacgagaataatgaccagaacagtggaaacagcaacggaagtggcggaggaggaggcgacgagctggcgctggttccaccatccggcgccgggccagagggtggagagcccaccctacgccgcccgaaaggccggccggcggggtccaagaacaagccgaagccgcccatcatcatcacgagggacagcgccaacacgctccggacgcacgtcatggaggtggccagcggctgcgacatctccgagagcatcacggccttcgcgcgccgcaggcagcgcggggtctgcgtcctcagcggcgccggcaccgtgaccaacgtcaccctgcggcagccggcctcccagggcgcggtcgtcgccctccacggccttcgagatcctgtccctctccggctcctttctcccgccgcccgcgccgcccgaagccacggggctcaccgtctaccttgccggcggccaggggcaggtggtgggcggcagcgtcgtcggcgcgctgacagcagccggggccggtggtgataatggcggcatctttcgccaacgcggtgtacgagcggttgccgttggaggaggatgacatgctcgctgcgcaagcacaggccgacagtgcaggaattctcgcgggtgcgcagctcgccggcgctgtggatccaagcctcttccagggactgccaccgaacctgatgtgcaacgtgcagatgccgccagaagcagcctacggatggagcccgggcgccgccggtggccgtccggcgccgttctaataactgataagagcgcgcacgcggcttagatatggttaagtgatttagctttcttcttcgatcttttgcttgaatttttatcgtggagaatttccgtgggaattgcatatgatttcgcatgttaattagtaagctatcttaatactgtttcagaatatgtagctcgatttctgccatttcgtttcgctattccttgtgtcgtcgtaactcttgttc

SEQ ID NO: 27524 - protein, 227 aa, Zea mays subsp. mays
  peptide (1)..(227): Ceres Seq. ID no. 12344136
  misc_feature (1)..(178): NCBI GI NO: 15235815 NR Description: putative DNA binding protein; protein id:At4g22810
  misc_feature (22)..(178): NCBI GI NO: 15234404 NR Description: putative DNA-binding protein; protein id:At4g12050
  misc_feature (1)..(197): NCBI GI NO: 15225475 NR Description: putative AT-hook DNA-binding protein
  misc_feature (20)..(178): NCBI GI NO: 15236657 NR Description: hypothetical protein; protein id: At4g17800
  misc_feature (25)..(178): NCBI GI NO: 38346718 NR Description: OSJNBa0086O06.16
  misc_feature (60)..(185): NCBI GI NO: 30690333 NR Description: expressed protein [Arabidopsis thaliana]
  misc_feature (81)..(185): NCBI GI NO: 7486025 NR Description: hypothetical protein F23E12
  misc_feature (36)..(178): NCBI GI NO: 15226945 NR Description: putative AT-hook DNA-binding protein
  misc_feature (41)..(178): NCBI GI NO: 18414224 NR Description: Expressed protein; protein id: At4g14465
  misc_feature (41)..(178): NCBI GI NO: 21593180 NR Description: putative DNA-binding protein
MDPVAASIHGHHLPPPFNTRDFHHHLQQQQQQLKTEDDHGSGAPGLFGSRGTKGDHENNDQNSGNSNGSGGGGGDELALVPPSGAGPEGGEPTLRRPKGRPAGSKNKPKPPIIITRDSANTLRTHVMEVASGCDISESITAFARRRQRGVCVLSGAGTVTNVTLRQPASQGAVVALHGLRDPVPLRLLSPAARAARSHGAHRLPCRRPGAGGGRQRRRRADSSRGRW

SEQ ID NO: 27525 - DNA, 1703 bp, Zea mays subsp. mays
  misc_feature (1)..(1703): Ceres Seq. ID no. 12405583
atcacaagcaatcgatcaagctagcatggcggtgaaggtgtgggtgttcgccgtggcactgatgatgtgcgctggtgtagggcttggagctgacgacgacggcggcagccgccttattagccgctgtcgtctgagctcgcccaactaccgcggcgccctggcaaaggccatcctcttcttcgaggggcagcggtcggggcggctgccggcaaaccagagagtcaggtggcgcggggactcggcgctcaccgagcggccaacccgaaaacgtgaacttgacgggtggctactacgacgccggagacaacgtcaagttcgggtttccccgatggcgttcagcgtcaccctcctgagctggagcgccgtcgagtaccgcgacgaggtggcggcggcgggtcagctccgccacctccggtccgccatccagtggggcgccgacttccttctccgtgcccacaccacgccgaccaccctctacactcaggttggcgacggcaacgccgaccaccaatgctgggagcggccagaggacatggacacgccgcggacgctgtacaagatcacccggagctcgcccgggtccgaggccgccggcgaggcggcggcagcgctcgccgccgcgtacctggtgttcagggacgaccgggacaagaccttagccacgcagctcctggccgcgtccagatccctcttcgacttcgcaaacgactacaggggatcctaccagttgtcctgcccattctactgctcctactcaggctaccaggacgagctccagtgggcgtcggcatggctctaccgggcaaccaaggacagcaagtacctcgacttcctgcagaacaaccagggcggcagcgccaccgagttcagctgggacaacaagtatcccggagctcagctgcttgcaacacaggagtacttggctggaaggacagcagctggaaggctacaagaggggcctggactcgttcgtctgcgccgtgatgcccaacagcggcaacacgcagatccgcaccacccctggagggcttctcttcacccgcgactccgttaacctgcagtacacaaccaccgccaccctgctgctgtcgatctacgcgaaggccctcctcgcttctgcagcaggagcagtccagtgcagcgccgcgaccttctctccggaccagatcagttcatttcgacgtcacaggtggactacatcctgggagacaaccccaggagcgcgtcctacatggtcggcttcagctccaagttcccgaggcgcatccaccaccgcggctcctccattccgtccatcaaggtcctcccccggaaggtcacctgcagcgagggcttctcgtcgtggttcccgacggccaaccccaaccccaacgtccacgtcggcgccatcgtcggcgggcccgacgggaacgaccagttcggcgacaacagggaggactccacgcactccgagccggcaacgtacatcaacgcggcatttgtgggcgcctgcgctgctgcactggggcgcagccagcaggtgcctgtggacgaaacagcctcagccccacagtgatgttatgtaactagctacaacggaggagtatgcaagggcgggcaaccaaaccatgatatcgctttgtgtaacatcccaaggcccctacccccactaccactcttgatcatcctgataagaagagataaataaataattaaatacaatg

SEQ ID NO: 27526 - protein, 350 aa, Zea mays subsp. mays
  peptide (1)..(350): Ceres Seq. ID no. 12405584
  misc_feature (48)..(311): Pfam Name: Pfam Description:  Glycosyl hydrolase family 9
  misc_feature (10)..(317): NCBI GI NO: 1039431 NR Description: cellulase [Phaseolus vulgaris]
  misc_feature (10)..(317): NCBI GI NO: 1346225 NR Description: Endoglucanase precursor
  misc_feature (42)..(311): NCBI GI NO: 1363496 NR Description: cellulase (EC 3.2.1.4) 3D precursor - pepper
  misc_feature (42)..(311): NCBI GI NO: 1655543 NR Description: cellulase; endo-beta-1,4-glucanase
  misc_feature (13)..(317): NCBI GI NO: 575404 NR Description: cellulase [Sambucus nigra]
  misc_feature (42)..(311): NCBI GI NO: 7488977 NR Description: cellulase (EC 3.2.1.4) Cel1 precursor - tomato
  misc_feature (13)..(317): NCBI GI NO: 1076692 NR Description: cellulase (EC 3.2.1.4) - European elder (fragment)
  misc_feature (10)..(317): NCBI GI NO: 228690 NR Description: abscission cellulase
  misc_feature (44)..(309): NCBI GI NO: 15236526 NR Description: glycosyl hydrolase family 9; protein id:At4g23560
  misc_feature (45)..(311): NCBI GI NO: 1655545 NR Description: endo-beta-1,4-glucanase [Capsicum annuum]
SQAIDQASMAVKVWVFAVALMMCAGVGLGADDDGGSRLISRCRLSSPNYRGALAKAILFFEGQRSGRLPANQRVRWRGDSALTERPTRKRELDGWLLRRRRQRQVRVSPMAFSVTLLSWSAVEYRDEVAAAGQLRHLRSAIQWGADFLLRAHTTPTTLYTQVGDGNADHQCWERPEDMDTPRTLYKITRSSPGSEAAGEAAAALAAAYLVFRDDRDKTLATQLLAASRSLFDFANDYRGSYQLSCPFYCSYSGYQDELQWASAWLYRATKDSKYLDFLQNNQGGSATEFSWDNKYPGAQLLATQEYLAGRTAAGRLQEGPGLVRLRRDAQQRQHADPHHPWRASLHPRLR

SEQ ID NO: 27527 - protein, 342 aa, Zea mays subsp. mays
  peptide (1)..(342): Ceres Seq. ID no. 12405585
  misc_feature (40)..(303): Pfam Name: Pfam Description:  Glycosyl hydrolase family 9
  misc_feature (2)..(309): NCBI GI NO: 1039431 NR Description: cellulase [Phaseolus vulgaris]
  misc_feature (2)..(309): NCBI GI NO: 1346225 NR Description: Endoglucanase precursor
  misc_feature (34)..(303): NCBI GI NO: 1363496 NR Description: cellulase (EC 3.2.1.4) 3D precursor - pepper
  misc_feature (34)..(303): NCBI GI NO: 1655543 NR Description: cellulase; endo-beta-1,4-glucanase
  misc_feature (5)..(309): NCBI GI NO: 575404 NR Description: cellulase [Sambucus nigra]
  misc_feature (34)..(303): NCBI GI NO: 7488977 NR Description: cellulase (EC 3.2.1.4) Cel1 precursor - tomato
  misc_feature (5)..(309): NCBI GI NO: 1076692 NR Description: cellulase (EC 3.2.1.4) - European elder (fragment)
  misc_feature (2)..(309): NCBI GI NO: 228690 NR Description: abscission cellulase
  misc_feature (36)..(301): NCBI GI NO: 15236526 NR Description: glycosyl hydrolase family 9; protein id:At4g23560
  misc_feature (37)..(303): NCBI GI NO: 1655545 NR Description: endo-beta-1,4-glucanase [Capsicum annuum]
MAVKVWVFAVALMMCAGVGLGADDDGGSRLISRCRLSSPNYRGALAKAILFFEGQRSGRLPANQRVRWRGDSALTERPTRKRELDGWLLRRRRQRQVRVSPMAFSVTLLSWSAVEYRDEVAAAGQLRHLRSAIQWGADFLLRAHTTPTTLYTQVGDGNADHQCWERPEDMDTPRTLYKITRSSPGSEAAGEAAAALAAAYLVFRDDRDKTLATQLLAASRSLFDFANDYRGSYQLSCPFYCSYSGYQDELQWASAWLYRATKDSKYLDFLQNNQGGSATEFSWDNKYPGAQLLATQEYLAGRTAAGRLQEGPGLVRLRRDAQQRQHADPHHPWRASLHPRLR

SEQ ID NO: 27528 - protein, 330 aa, Zea mays subsp. mays
  peptide (1)..(330): Ceres Seq. ID no. 12405586
  misc_feature (28)..(291): Pfam Name: Pfam Description:  Glycosyl hydrolase family 9
  misc_feature (1)..(297): NCBI GI NO: 1039431 NR Description: cellulase [Phaseolus vulgaris]
  misc_feature (1)..(297): NCBI GI NO: 1346225 NR Description: Endoglucanase precursor
  misc_feature (22)..(291): NCBI GI NO: 1363496 NR Description: cellulase (EC 3.2.1.4) 3D precursor - pepper
  misc_feature (22)..(291): NCBI GI NO: 1655543 NR Description: cellulase; endo-beta-1,4-glucanase
  misc_feature (1)..(297): NCBI GI NO: 575404 NR Description: cellulase [Sambucus nigra]
  misc_feature (22)..(291): NCBI GI NO: 7488977 NR Description: cellulase (EC 3.2.1.4) Cel1 precursor - tomato
  misc_feature (1)..(297): NCBI GI NO: 1076692 NR Description: cellulase (EC 3.2.1.4) - European elder (fragment)
  misc_feature (1)..(297): NCBI GI NO: 228690 NR Description: abscission cellulase
  misc_feature (24)..(289): NCBI GI NO: 15236526 NR Description: glycosyl hydrolase family 9; protein id:At4g23560
  misc_feature (25)..(291): NCBI GI NO: 1655545 NR Description: endo-beta-1,4-glucanase [Capsicum annuum]
MMCAGVGLGADDDGGSRLISRCRLSSPNYRGALAKAILFFEGQRSGRLPANQRVRWRGDSALTERPTRKRELDGWLLRRRRQRQVRVSPMAFSVTLLSWSAVEYRDEVAAAGQLRHLRSAIQWGADFLLRAHTTPTTLYTQVGDGNADHQCWERPEDMDTPRTLYKITRSSPGSEAAGEAAAALAAAYLVFRDDRDKTLATQLLAASRSLFDFANDYRGSYQLSCPFYCSYSGYQDELQWASAWLYRATKDSKYLDFLQNNQGGSATEFSWDNKYPGAQLLATQEYLAGRTAAGRLQEGPGLVRLRRDAQQRQHADPHHPWRASLHPRLR

SEQ ID NO: 27529 - DNA, 1109 bp, Zea mays subsp. mays
  misc_feature (1)..(1109): Ceres Seq. ID no. 13495270
aaaaatcccgacgcgaatcgcccagaacgcgaggcggaatttcccatcctcttggacccccccccccccccctctgttcttcctccttcccccgctcctcgtccacacgctccgctccgattccgcccgcgtccgcggacccagatccggcgcccgcgcccatggcgacgcgcaggcgaatgctcctcaaggtcatcatcctcggcgacagcggggtcggcaagacctcgctgatgaaccagtacgtcaacaacaggttcagcaaccagtacaaggccaccatcggcgcggatttcctcaccaaggaggtccagatcgacgaccgcctcttcacactgcagatatgggatacggcaggacaggagcggtttcaaagtcttggtgtggcattttataggggagctgactgctgtgttcttgtatatgatgtcaacgtatccaagtcatttgaaaagctcaacaactggcgtgaggaattcctaattcaagccagcccatcagacccagagaatttcccatttgttgtgcttggtaacaagatcgatgttgatggtggtaacagccggactgtttctgagaagaaggctaaagcatggtgtgcttcaaagggaaacatcccctactttgagacgtcggctaaagagggcttcaatgtagaggctgcatttgagtgtatagcgaggaatgctgtaaaaaatgagccagaagaagatatgtatcttcctgatacgattgatgttgggggcgctggaaggcaacagcgttcgtcaggttgtgaatgctagaagatatggagcactgcgaattgctcggttggttggtctgattctctagggcttgttgtttgggtggcctgtgtcatcatttcatatatgtatttagtttgcaaaactgctatttgtggacactggatagtttggaagtctgcatgcgggtgcttattgtcgactcccgtgtagatgcagagaactcatttgtaactgccgtttcggtgttgtatcgtatctgcgctagatgctagtgttataacgcttttgattgttgatggattgcatatatgtactgtatttgtacatgaacagaacgtagtgcccattttcatagtgttc

SEQ ID NO: 27530 - protein, 260 aa, Zea mays subsp. mays
  peptide (1)..(260): Ceres Seq. ID no. 13495271
  misc_feature (63)..(231): Pfam Name: Pfam Description:  Ras family
  misc_feature (54)..(260): NCBI GI NO: 1370188 NR Description: RAB7D [Lotus japonicus]
  misc_feature (54)..(238): NCBI GI NO: 34904236 NR Description: RAS-related GTP-binding protein Rab7 family
  misc_feature (54)..(260): NCBI GI NO: 3914550 NR Description: RAS-RELATED PROTEIN RAB7
  misc_feature (54)..(260): NCBI GI NO: 7388049 NR Description: Ras-related protein Rab7
  misc_feature (54)..(260): NCBI GI NO: 15218194 NR Description: GTP-binding protein, putative
  misc_feature (54)..(260): NCBI GI NO: 15233284 NR Description: Ras family GTP-binding protein
  misc_feature (54)..(259): NCBI GI NO: 7438407 NR Description: GTP-binding protein Rab7a - common tobacco
  misc_feature (54)..(258): NCBI GI NO: 3914557 NR Description: RAS-RELATED PROTEIN RAB7
  misc_feature (54)..(260): NCBI GI NO: 34484308 NR Description: putative GTP-binding protein [Cucumis sativus]
  misc_feature (54)..(260): NCBI GI NO: 1370186 NR Description: RAB7C [Lotus japonicus]
KSRRESPRTRGGISHPLGPPPPPLCSSSFPRSSSTRSAPIPPASADPDPAPAPMATRRRMLLKVIILGDSGVGKTSLMNQYVNNRFSNQYKATIGADFLTKEVQIDDRLFTLQIWDTAGQERFQSLGVAFYRGADCCVLVYDVNVSKSFEKLNNWREEFLIQASPSDPENFPFVVLGNKIDVDGGNSRTVSEKKAKAWCASKGNIPYFETSAKEGFNVEAAFECIARNAVKNEPEEDMYLPDTIDVGGAGRQQRSSGCEC

SEQ ID NO: 27531 - protein, 207 aa, Zea mays subsp. mays
  peptide (1)..(207): Ceres Seq. ID no. 13495272
  misc_feature (10)..(178): Pfam Name: Pfam Description:  Ras family
  misc_feature (1)..(207): NCBI GI NO: 1370188 NR Description: RAB7D [Lotus japonicus]
  misc_feature (1)..(185): NCBI GI NO: 34904236 NR Description: RAS-related GTP-binding protein Rab7 family
  misc_feature (1)..(207): NCBI GI NO: 3914550 NR Description: RAS-RELATED PROTEIN RAB7
  misc_feature (1)..(207): NCBI GI NO: 7388049 NR Description: Ras-related protein Rab7
  misc_feature (1)..(207): NCBI GI NO: 15218194 NR Description: GTP-binding protein, putative
  misc_feature (1)..(207): NCBI GI NO: 15233284 NR Description: Ras family GTP-binding protein
  misc_feature (1)..(206): NCBI GI NO: 7438407 NR Description: GTP-binding protein Rab7a - common tobacco
  misc_feature (1)..(205): NCBI GI NO: 3914557 NR Description: RAS-RELATED PROTEIN RAB7
  misc_feature (1)..(207): NCBI GI NO: 34484308 NR Description: putative GTP-binding protein [Cucumis sativus]
  misc_feature (1)..(207): NCBI GI NO: 1370186 NR Description: RAB7C [Lotus japonicus]
MATRRRMLLKVIILGDSGVGKTSLMNQYVNNRFSNQYKATIGADFLTKEVQIDDRLFTLQIWDTAGQERFQSLGVAFYRGADCCVLVYDVNVSKSFEKLNNWREEFLIQASPSDPENFPFVVLGNKIDVDGGNSRTVSEKKAKAWCASKGNIPYFETSAKEGFNVEAAFECIARNAVKNEPEEDMYLPDTIDVGGAGRQQRSSGCEC

SEQ ID NO: 27532 - protein, 201 aa, Zea mays subsp. mays
  peptide (1)..(201): Ceres Seq. ID no. 13495273
  misc_feature (4)..(172): Pfam Name: Pfam Description:  Ras family
  misc_feature (1)..(201): NCBI GI NO: 1370188 NR Description: RAB7D [Lotus japonicus]
  misc_feature (1)..(179): NCBI GI NO: 34904236 NR Description: RAS-related GTP-binding protein Rab7 family
  misc_feature (1)..(201): NCBI GI NO: 3914550 NR Description: RAS-RELATED PROTEIN RAB7
  misc_feature (1)..(201): NCBI GI NO: 7388049 NR Description: Ras-related protein Rab7
  misc_feature (1)..(201): NCBI GI NO: 15218194 NR Description: GTP-binding protein, putative
  misc_feature (1)..(201): NCBI GI NO: 15233284 NR Description: Ras family GTP-binding protein
  misc_feature (1)..(200): NCBI GI NO: 7438407 NR Description: GTP-binding protein Rab7a - common tobacco
  misc_feature (1)..(199): NCBI GI NO: 3914557 NR Description: RAS-RELATED PROTEIN RAB7
  misc_feature (1)..(201): NCBI GI NO: 34484308 NR Description: putative GTP-binding protein [Cucumis sativus]
  misc_feature (1)..(201): NCBI GI NO: 1370186 NR Description: RAB7C [Lotus japonicus]
MLLKVIILGDSGVGKTSLMNQYVNNRFSNQYKATIGADFLTKEVQIDDRLFTLQIWDTAGQERFQSLGVAFYRGADCCVLVYDVNVSKSFEKLNNWREEFLIQASPSDPENFPFVVLGNKIDVDGGNSRTVSEKKAKAWCASKGNIPYFETSAKEGFNVEAAFECIARNAVKNEPEEDMYLPDTIDVGGAGRQQRSSGCEC

SEQ ID NO: 27533 - DNA, 1522 bp, Zea mays subsp. mays
  misc_feature (1)..(1522): Ceres Seq. ID no. 12369443
gtcgcatcgcacgccatcagcagctagcgcgctcctcgagcccagcagagaaaggccggcctacccactctctctctctctctctccagtctccaccggcagcgctaatcgtaatagccatgggctccaccgccggcgacgtggccgcggtggtggacgaggaggcgtgcatgtacgcgatgcagctggcgtcgtcgtccatcctgcccatgacgctgaagaacgccatcgagctgggcctgctggaggtgctgcagaaggaggccggcggcggcaaggcggcgctggcgcccgaggaggtggtggcgcggatgcccgcggcgcccggcgaccccgccgccgcggcggccatggtggaccgcatgctccgcctgctcgcctcctacgacgtcgtccggtgccagatggaggaccgggacggccggtacgagcgccgctactccgccgcgcccgtctgcaagtggctcacccccaacgaggacggcgtgtccatggccgccctcgcgctcatgaaccaggacaaggtcctcatggagagctggtactatctcaaggacgcggtgctggacggcggcatcccgttcaacaaggcgtacgggatgacggcgttcgagtaccacggcacggactcgcgcttcaaccgcgtgttcaacgagggcatgaagaaccactcggtgatcatcaccaagaagctgctggacttctacacgggcttcgagggcgtgtcgacgctggtggacgtgggcggcggcgtgggcgccacgctgcacgccatcacgtcccgccacccgcacatctccggggtcaacttcgacctgccgcacgtcatctccgaggcgccgccgttccccggcgtgcgccacgtgggcggggacatgttcgcgtccgtgcccgccggcgacgccatcctcatgaagtggatcctccacgactggagcgacgcgcactgcgccacgctgctcaagaactgctacgacgcgctgccggaaaatggcaaggtcatcgtcgtcgagtgcgtgctgccggtcaacacggaggccacccccaaggcgcagggcgtcttccacgtcgacatgatcatgctcgcgcacaaccccggcggcaaggagcggtacgagcgcgagttccgcgagctcgcaaagggcgccggcttctccgggttcaaggccacctgcatctacgccaacgcctgggccatcgagttcatcaagtgaaccaccgtcgccgcgatgagatggcatggctgccacatgctttgcttgcttggtcctcgtatcgtacgtcgccgtcgtcgtcttcttctggttattgcgctgctacctcgctgctctcgcgtatgcatgtacttttgcttaattttctttcttcatatcatgcactctggctggcctagactgcccccgatccatggtggccggtacgtcttgtcgagctcttgcatgtcgtggattctaaattcttcttctgcgtcgaattgtctctgccatgtgcgagtaataacaatcaaggttatacttacggt

SEQ ID NO: 27534 - protein, 463 aa, Zea mays subsp. mays
  peptide (1)..(463): Ceres Seq. ID no. 12369444
  misc_feature (71)..(300): Pfam Name: Pfam Description:  HlyD family secretion protein
  misc_feature (3)..(386): NCBI GI NO: 29247944 NR Description: GLP_26_54603_52153 [Giardia lamblia ATCC 50803]
  misc_feature (14)..(300): NCBI GI NO: 23106326 NR Description: hypothetical protein [Azotobacter vinelandii]
SHRTPSAASALLEPSRERPAYPLSLSLSPVSTGSANRNSHGLHRRRRGRGGGRGGVHVRDAAGVVVHPAHDAEERHRAGPAGGAAEGGRRRQGGAGARGGGGADARGARRPRRRGGHGGPHAPPARLLRRRPVPDGGPGRPVRAPLLRRARLQVAHPQRGRRVHGRPRAHEPGQGPHGELVLSQGRGAGRRHPVQQGVRDDGVRVPRHGLALQPRVQRGHEEPLGDHHQEAAGLLHGLRGRVDAGGRGRRRGRHAARHHVPPPAHLRGQLRPAARHLRGAAVPRRAPRGRGHVRVRARRRRHPHEVDPPRLERRALRHAAQELLRRAAGKWQGHRRRVRAAGQHGGHPQGAGRLPRRHDHARAQPRRQGAVRARVPRARKGRRLLRVQGHLHLRQRLGHRVHQVNHRRRDEMAWLPHALLAWSSYRTSPSSSSSGYCAATSLLSRMHVLLLNFLSSYHALWLA

SEQ ID NO: 27535 - protein, 403 aa, Zea mays subsp. mays
  peptide (1)..(403): Ceres Seq. ID no. 12369445
  misc_feature (139)..(380): Pfam Name: Pfam Description:  O-methyltransferase
  misc_feature (40)..(403): NCBI GI NO: 729135 NR Description: Caffeic acid 3-O-methyltransferase
  misc_feature (40)..(403): NCBI GI NO: 28569609 NR Description: caffeic acid O-methyltransferase [Sorghum bicolor]
  misc_feature (40)..(403): NCBI GI NO: 18033964 NR Description: O-methyltransferase [Sorghum bicolor]
  misc_feature (40)..(403): NCBI GI NO: 14578615 NR Description: caffeic acid O-methyltransferase
  misc_feature (40)..(403): NCBI GI NO: 14578613 NR Description: caffeic acid O-methyltransferase
  misc_feature (40)..(403): NCBI GI NO: 14578617 NR Description: caffeic acid O-methyltransferase
  misc_feature (40)..(403): NCBI GI NO: 4104224 NR Description: caffeic acid O-methyltransferase; LPOMT3
  misc_feature (40)..(403): NCBI GI NO: 14578611 NR Description: caffeic acid O-methyltransferase
  misc_feature (40)..(403): NCBI GI NO: 4104220 NR Description: caffeic acid O-methyltransferase; LPOMT1
  misc_feature (208)..(403): NCBI GI NO: 15240132 NR Description: O-methyltransferase, family 2 family
RIARHQQLARSSSPAEKGRPTHSLSLSLQSPPAALIVIAMGSTAGDVAAVVDEEACMYAMQLASSSILPMTLKNAIELGLLEVLQKEAGGGKAALAPEEVVARMPAAPGDPAAAAAMVDRMLRLLASYDVVRCQMEDRDGRYERRYSAAPVCKWLTPNEDGVSMAALALMNQDKVLMESWYYLKDAVLDGGIPFNKAYGMTAFEYHGTDSRFNRVFNEGMKNHSVIITKKLLDFYTGFEGVSTLVDVGGGVGATLHAITSRHPHISGVNFDLPHVISEAPPFPGVRHVGGDMFASVPAGDAILMKWILHDWSDAHCATLLKNCYDALPENGKVIVVECVLPVNTEATPKAQGVFHVDMIMLAHNPGGKERYEREFRELAKGAGFSGFKATCIYANAWAIEFIK

SEQ ID NO: 27536 - protein, 364 aa, Zea mays subsp. mays
  peptide (1)..(364): Ceres Seq. ID no. 12369446
  misc_feature (100)..(341): Pfam Name: Pfam Description:  O-methyltransferase
  misc_feature (1)..(364): NCBI GI NO: 729135 NR Description: Caffeic acid 3-O-methyltransferase
  misc_feature (1)..(364): NCBI GI NO: 28569609 NR Description: caffeic acid O-methyltransferase [Sorghum bicolor]
  misc_feature (1)..(364): NCBI GI NO: 18033964 NR Description: O-methyltransferase [Sorghum bicolor]
  misc_feature (1)..(364): NCBI GI NO: 14578615 NR Description: caffeic acid O-methyltransferase
  misc_feature (1)..(364): NCBI GI NO: 14578613 NR Description: caffeic acid O-methyltransferase
  misc_feature (1)..(364): NCBI GI NO: 14578617 NR Description: caffeic acid O-methyltransferase
  misc_feature (1)..(364): NCBI GI NO: 4104224 NR Description: caffeic acid O-methyltransferase; LPOMT3
  misc_feature (1)..(364): NCBI GI NO: 14578611 NR Description: caffeic acid O-methyltransferase
  misc_feature (1)..(364): NCBI GI NO: 4104220 NR Description: caffeic acid O-methyltransferase; LPOMT1
  misc_feature (169)..(364): NCBI GI NO: 15240132 NR Description: O-methyltransferase, family 2 family
MGSTAGDVAAVVDEEACMYAMQLASSSILPMTLKNAIELGLLEVLQKEAGGGKAALAPEEVVARMPAAPGDPAAAAAMVDRMLRLLASYDVVRCQMEDRDGRYERRYSAAPVCKWLTPNEDGVSMAALALMNQDKVLMESWYYLKDAVLDGGIPFNKAYGMTAFEYHGTDSRFNRVFNEGMKNHSVIITKKLLDFYTGFEGVSTLVDVGGGVGATLHAITSRHPHISGVNFDLPHVISEAPPFPGVRHVGGDMFASVPAGDAILMKWILHDWSDAHCATLLKNCYDALPENGKVIVVECVLPVNTEATPKAQGVFHVDMIMLAHNPGGKERYEREFRELAKGAGFSGFKATCIYANAWAIEFIK

SEQ ID NO: 27537 - DNA, 1425 bp, Zea mays subsp. mays
  misc_feature (1)..(1425): Ceres Seq. ID no. 12373632
ctctctccccaccatcagcagaccaccaccaatcacacacaccggccggccagctctctagctcttcctccaacacttgttgctccgctcccatcccctcaagcctctcttcactgaattttctggtcgccatgcacagctactacagagccatgcacccgtacgctcacccgtaccagcaccatgccgccgccgttgcccccaccaccaagcacggacactgccatgatgccgaggaggaggacgaccatcagtccatgctgctcctctccctgtggcctcccggccaccaccaccacagcgtcgccgccgccgcttcctcggcgtgctcgtctcctcccaccatatgcgccaccaccagcaccacctccatggccgcctccgccgcttcttcttacccttgttgcctcacccaccaaagccattacaatggcggcggatctgcagggagcagcagccacagtagctgcttcttgttccaccacgagcaccagcagcagcaggagcccgatgtgagcatatcgctgtccatagccccgccgcgcagcaacaacgacgcagcttcctgtggtggccgtggcttcgctgccccgtcgacggtgacgacgccggaggtgcccaccagccagtactggatcccctccgcctccgagatcctggtcggctccacgcagttctcctgcgccgtctgcaacaagaccttcaaccgcttcaacaacatgcagatgcacatgtggggccacggttcgcagtaccgcaagggctccgagtccctgctacgcggcgccattatcacggtgggcacggcggcggcggcgtcgtcgtcgctgacgcgcctgccgtgctactgctgcgcggaggggtgccggaacaacatcgagcacccgcgggcgcggccgctcaaggacttccgcacgctgcagacgcactaccggcgcaagcacggcgcccggccctacgcgtgccgccgctgcggcaagcgcttcgccgtgcgcggcgactggcgcacgcacgagaagaactgcggcaggctctggttctgcgcctgcggctccgacttcaagcacaagcggtcgctcaaggaccacgtccgatccttcggcggcggccacgcgccgcgcgtcgtcgagtccgtcgccgtcgaggacgaggaggaggaggaggacgtcgacgacgctgatgacgatggcgacctgcagactttcgacgacaacggcgccagcggagaacgacccagcgacatggtcgtcgtctagaggcttgcttcttcattaattagatcgatgtggtactatagtatgctagctactctactccaccgatggacataagtagttctaatgtgctgctcatgcatctcttagcccgatcgcgcggtcttattagctatatatatatatatatatagatttcatttcagtagtt

SEQ ID NO: 27538 - protein, 417 aa, Zea mays subsp. mays
  peptide (1)..(417): Ceres Seq. ID no. 12373633
  misc_feature (345)..(370): Pfam Name: Pfam Description:  Zinc finger, C2H2 type
  misc_feature (161)..(410): NCBI GI NO: 15222242 NR Description: zinc finger protein, putative
  misc_feature (150)..(395): NCBI GI NO: 28973719 NR Description: putative zinc finger protein
  misc_feature (150)..(395): NCBI GI NO: 15230370 NR Description: zinc finger - like protein; protein id:At3g57670
  misc_feature (210)..(393): NCBI GI NO: 9294415 NR Description: zinc finger-like protein [Arabidopsis thaliana]
  misc_feature (210)..(393): NCBI GI NO: 30685975 NR Description: DNA-binding protein -related
  misc_feature (210)..(393): NCBI GI NO: 15223781 NR Description: hypothetical protein; protein id: At1g51220.1
  misc_feature (207)..(379): NCBI GI NO: 34908460 NR Description: P0683F02.21
  misc_feature (204)..(388): NCBI GI NO: 15223175 NR Description: hypothetical protein; protein id: At1g08290
  misc_feature (149)..(372): NCBI GI NO: 18376601 NR Description: WIP1 protein [Glycine max]
  misc_feature (162)..(372): NCBI GI NO: 18253283 NR Description: transparent testa 1 [Arabidopsis thaliana]
LSPPSADHHQSHTPAGQLSSSSSNTCCSAPIPSSLSSLNFLVAMHSYYRAMHPYAHPYQHHAAAVAPTTKHGHCHDAEEEDDHQSMLLLSLWPPGHHHHSVAAAASSACSSPPTICATTSTTSMAASAASSYPCCLTHQSHYNGGGSAGSSSHSSCFLFHHEHQQQQEPDVSISLSIAPPRSNNDAASCGGRGFAAPSTVTTPEVPTSQYWIPSASEILVGSTQFSCAVCNKTFNRFNNMQMHMWGHGSQYRKGSESLLRGAIITVGTAAAASSSLTRLPCYCCAEGCRNNIEHPRARPLKDFRTLQTHYRRKHGARPYACRRCGKRFAVRGDWRTHEKNCGRLWFCACGSDFKHKRSLKDHVRSFGGGHAPRVVESVAVEDEEEEEDVDDADDDGDLQTFDDNGASGERPSDMVVV

SEQ ID NO: 27539 - protein, 374 aa, Zea mays subsp. mays
  peptide (1)..(374): Ceres Seq. ID no. 12373634
  misc_feature (302)..(327): Pfam Name: Pfam Description:  Zinc finger, C2H2 type
  misc_feature (118)..(367): NCBI GI NO: 15222242 NR Description: zinc finger protein, putative
  misc_feature (107)..(352): NCBI GI NO: 28973719 NR Description: putative zinc finger protein
  misc_feature (107)..(352): NCBI GI NO: 15230370 NR Description: zinc finger - like protein; protein id:At3g57670
  misc_feature (167)..(350): NCBI GI NO: 9294415 NR Description: zinc finger-like protein [Arabidopsis thaliana]
  misc_feature (167)..(350): NCBI GI NO: 30685975 NR Description: DNA-binding protein -related
  misc_feature (167)..(350): NCBI GI NO: 15223781 NR Description: hypothetical protein; protein id: At1g51220.1
  misc_feature (164)..(336): NCBI GI NO: 34908460 NR Description: P0683F02.21
  misc_feature (161)..(345): NCBI GI NO: 15223175 NR Description: hypothetical protein; protein id: At1g08290
  misc_feature (106)..(329): NCBI GI NO: 18376601 NR Description: WIP1 protein [Glycine max]
  misc_feature (119)..(329): NCBI GI NO: 18253283 NR Description: transparent testa 1 [Arabidopsis thaliana]
MHSYYRAMHPYAHPYQHHAAAVAPTTKHGHCHDAEEEDDHQSMLLLSLWPPGHHHHSVAAAASSACSSPPTICATTSTTSMAASAASSYPCCLTHQSHYNGGGSAGSSSHSSCFLFHHEHQQQQEPDVSISLSIAPPRSNNDAASCGGRGFAAPSTVTTPEVPTSQYWIPSASEILVGSTQFSCAVCNKTFNRFNNMQMHMWGHGSQYRKGSESLLRGAIITVGTAAAASSSLTRLPCYCCAEGCRNNIEHPRARPLKDFRTLQTHYRRKHGARPYACRRCGKRFAVRGDWRTHEKNCGRLWFCACGSDFKHKRSLKDHVRSFGGGHAPRVVESVAVEDEEEEEDVDDADDDGDLQTFDDNGASGERPSDMVVV

SEQ ID NO: 27540 - protein, 367 aa, Zea mays subsp. mays
  peptide (1)..(367): Ceres Seq. ID no. 12373635
  misc_feature (295)..(320): Pfam Name: Pfam Description:  Zinc finger, C2H2 type
  misc_feature (111)..(360): NCBI GI NO: 15222242 NR Description: zinc finger protein, putative
  misc_feature (100)..(345): NCBI GI NO: 28973719 NR Description: putative zinc finger protein
  misc_feature (100)..(345): NCBI GI NO: 15230370 NR Description: zinc finger - like protein; protein id:At3g57670
  misc_feature (160)..(343): NCBI GI NO: 9294415 NR Description: zinc finger-like protein [Arabidopsis thaliana]
  misc_feature (160)..(343): NCBI GI NO: 30685975 NR Description: DNA-binding protein -related
  misc_feature (160)..(343): NCBI GI NO: 15223781 NR Description: hypothetical protein; protein id: At1g51220.1
  misc_feature (157)..(329): NCBI GI NO: 34908460 NR Description: P0683F02.21
  misc_feature (154)..(338): NCBI GI NO: 15223175 NR Description: hypothetical protein; protein id: At1g08290
  misc_feature (99)..(322): NCBI GI NO: 18376601 NR Description: WIP1 protein [Glycine max]
  misc_feature (112)..(322): NCBI GI NO: 18253283 NR Description: transparent testa 1 [Arabidopsis thaliana]
MHPYAHPYQHHAAAVAPTTKHGHCHDAEEEDDHQSMLLLSLWPPGHHHHSVAAAASSACSSPPTICATTSTTSMAASAASSYPCCLTHQSHYNGGGSAGSSSHSSCFLFHHEHQQQQEPDVSISLSIAPPRSNNDAASCGGRGFAAPSTVTTPEVPTSQYWIPSASEILVGSTQFSCAVCNKTFNRFNNMQMHMWGHGSQYRKGSESLLRGAIITVGTAAAASSSLTRLPCYCCAEGCRNNIEHPRARPLKDFRTLQTHYRRKHGARPYACRRCGKRFAVRGDWRTHEKNCGRLWFCACGSDFKHKRSLKDHVRSFGGGHAPRVVESVAVEDEEEEEDVDDADDDGDLQTFDDNGASGERPSDMVVV

SEQ ID NO: 27541 - DNA, 1098 bp, Zea mays subsp. mays
  misc_feature (1)..(1098): Ceres Seq. ID no. 13499010
aagcaagtaagcaacccaaaccctccctcccctcccattcgattcttgcctcccacgccgccgccggatcccgcgatggccgaccctcggctgtaccccacggagtccgggtccgacgaccggcgcgatgccgcctatcccggctccgagcgccgcctctacaacccgtaccaggacctcaacctcccctatcggcagctctacgaccttcccacctccccggagttcctcttccaggaggaggccgtcgcgcagcgccggtcctggggcgagaacctcacctactacaccggcgtgggatacctcggcggcgccggggccggggccgcgctggggctccgcgacgccgcccgaggcgccgagcctggggagcccgccaagatccgggccaaccgcgtcctcaactcctgcggcagctccggacgccgcgtcggtaacacgctcggggtcatcggcctcatgtacgccgggatcgagagcgccatggtcgccgcccgcgaccgcgacgactggatcaacagcgtcgtggccgggctaggcaccggcgcgctcttccgcgccgctaacgggccgcgctcggcggtcgtcgccggggcccgttggtggggttcttgctggcgcctccgccgctgccaagcaggttgggaagagatacctccccgccctctaaatctgattgcggtacttgtctctgccctgccatgccgtgatcaagggaaatcatttcgtcgcgtggatgttatttcttcgttctcgttaattatttgggaagagtcatgttcttctcgacattcctatatattgttgacatccatatgctggtactatatatgtcaaagaacgatctgatctcaccagatcacgaaatttttggtccacattgcaatgtaacattagacgctagctggtatcgacacaataatactgctttttccattatgctggagaacccatgacattgtgaaatgtaatgctgagtgtagtgtagttttgctagattgtcgctgttttcctatatctctttaaagacgaaattcttcgcctgcccgatgtatgtaaaaaaagacatgccttgatctcagtgagatgttttatacg

SEQ ID NO: 27542 - protein, 282 aa, Zea mays subsp. mays
  peptide (1)..(282): Ceres Seq. ID no. 13499011
  misc_feature (82)..(199): Pfam Name: Pfam Description:  Tim17/Tim22/Tim23 family
  misc_feature (26)..(199): NCBI GI NO: 34902184 NR Description: Putative mitochondrial inner membrane protein
  misc_feature (26)..(199): NCBI GI NO: 37536126 NR Description: putaive mitochondrial inner membrane protein
  misc_feature (48)..(199): NCBI GI NO: 15218593 NR Description: inner mitochondrial membrane protein
  misc_feature (42)..(199): NCBI GI NO: 13641346 NR Description: translocase of inner mitochondrial membrane TIM23
  misc_feature (42)..(199): NCBI GI NO: 18394498 NR Description: inner mitochondrial membrane protein -related
  misc_feature (52)..(199): NCBI GI NO: 15229350 NR Description: inner mitochondrial membrane protein -related
  misc_feature (37)..(90): NCBI GI NO: 12039278 NR Description: putative inner mitochondrial membrane protein
  misc_feature (157)..(199): NCBI GI NO: 12039278 NR Description: putative inner mitochondrial membrane protein
  misc_feature (51)..(129): NCBI GI NO: 38344267 NR Description: OSJNBa0005N02.5
  misc_feature (33)..(199): NCBI GI NO: 19075496 NR Description: putative mitochondrial import inner membranetranslocase subunit
KQVSNPNPPSPPIRFLPPTPPPDPAMADPRLYPTESGSDDRRDAAYPGSERRLYNPYQDLNLPYRQLYDLPTSPEFLFQEEAVAQRRSWGENLTYYTGVGYLGGAGAGAALGLRDAARGAEPGEPAKIRANRVLNSCGSSGRRVGNTLGVIGLMYAGIESAMVAARDRDDWINSVVAGLGTGALFRAANGPRSAVVAGARWWGSCWRLRRCQAGWEEIPPRPLNLIAVLVSALPCRDQGKSFRRVDVISSFSLIIWEESCSSRHSYILLTSICWYYICQRTI

SEQ ID NO: 27543 - protein, 257 aa, Zea mays subsp. mays
  peptide (1)..(257): Ceres Seq. ID no. 13499012
  misc_feature (57)..(174): Pfam Name: Pfam Description:  Tim17/Tim22/Tim23 family
  misc_feature (1)..(174): NCBI GI NO: 34902184 NR Description: Putative mitochondrial inner membrane protein
  misc_feature (1)..(174): NCBI GI NO: 37536126 NR Description: putaive mitochondrial inner membrane protein
  misc_feature (23)..(174): NCBI GI NO: 15218593 NR Description: inner mitochondrial membrane protein
  misc_feature (17)..(174): NCBI GI NO: 13641346 NR Description: translocase of inner mitochondrial membrane TIM23
  misc_feature (17)..(174): NCBI GI NO: 18394498 NR Description: inner mitochondrial membrane protein -related
  misc_feature (27)..(174): NCBI GI NO: 15229350 NR Description: inner mitochondrial membrane protein -related
  misc_feature (12)..(65): NCBI GI NO: 12039278 NR Description: putative inner mitochondrial membrane protein
  misc_feature (132)..(174): NCBI GI NO: 12039278 NR Description: putative inner mitochondrial membrane protein
  misc_feature (26)..(104): NCBI GI NO: 38344267 NR Description: OSJNBa0005N02.5
  misc_feature (8)..(174): NCBI GI NO: 19075496 NR Description: putative mitochondrial import inner membranetranslocase subunit
MADPRLYPTESGSDDRRDAAYPGSERRLYNPYQDLNLPYRQLYDLPTSPEFLFQEEAVAQRRSWGENLTYYTGVGYLGGAGAGAALGLRDAARGAEPGEPAKIRANRVLNSCGSSGRRVGNTLGVIGLMYAGIESAMVAARDRDDWINSVVAGLGTGALFRAANGPRSAVVAGARWWGSCWRLRRCQAGWEEIPPRPLNLIAVLVSALPCRDQGKSFRRVDVISSFSLIIWEESCSSRHSYILLTSICWYYICQRTI

SEQ ID NO: 27544 - protein, 144 aa, Zea mays subsp. mays
  peptide (1)..(144): Ceres Seq. ID no. 13499013
  misc_feature (105)..(144): NCBI GI NO: 38344267 NR Description: OSJNBa0005N02.5
ASKQPKPSLPSHSILASHAAAGSRDGRPSAVPHGVRVRRPARCRLSRLRAPPLQPVPGPQPPLSAALRPSHLPGVPLPGGGRRAAPVLGREPHLLHRRGIPRRRRGRGRAGAPRRRPRRRAWGARQDPGQPRPQLLRQLRTPRR

SEQ ID NO: 27545 - DNA, 1486 bp, Zea mays subsp. mays
  misc_feature (1)..(1486): Ceres Seq. ID no. 12407390
ccttttcttctcttctctctctctctctctctctctgatttcttctcttaactctcgcgtctcgcgtccttttcccttcctcccctccgttgcgtccgtcgtctgcgttgcgtccctccgtccgtccgtccgttggcccgtccgtcgtcaccagcctcctccctcgcgcccaccgccgggatccggccctcctcgtctgcgcccgcctcggtctagatttctgagaaaatggcgagaagtgcgggaactaggaggcgtgtggctcgccagctcaagtccacacatcccattccttcataccgatggaagtcaaagcccatgaaaaagccgatgaaaaaatccaaccgaaagcaagtgttgccaaccttgcaaaagatggactgggaagatgccaattgctctgtgtgcatggaatacccacataatgctgtgctcatcctttgttcatcccatgataagggttgtcgtccttatatgtgtggaactagctaccgccactctaattgcttggatcagttcaagaaagcttacaccaagggggcattgcttgaggaagttcctgcaaatagtgttggctctaatctggattcggcgccattgactgcagaaaaaactgactccattgaccttgcatgtcccttgtgtcgtggcaaggtgaaagggtggacggtggtggaaccagctcgaagctacctcaatggaaaacgaagaacatgcatgcaggatggttgctcatttgtggggacctacaaggagctccgcaagcatgtcaagttggaacaccctcttgcaaagccaagggaagttgatcctgtccttgagcaaaaatggagattgctcgagattgaaagagagcggcaagatgcgctcagtacgatcactgcaacaatgggcagagccgtcgtttttggtgattatgtgctagacttggaggatggaatggactcggaggatgttgacagtgatgctgataatgatggccgtgggacagaaaacactcgtaggatgctactatttattatgcgccaagttgctcaacatcaccaaaaccaaaggctccagaatgcgactggtgcatctgacaatgctgaggacaattatgtggtgagcagtggtgccaatggaaccacaccatactcttaccccttggagggggaggacgagaatggtatggttgtggccggaggcagaagcactgatgtgctgagaccagagaggaggcgccgtcgccgccgcaggaaccgtgggagattgtttttaggtgctaattgagaggacaggtgaccaggtagggtttagccgccagaggagtacatacagaaatgcttccctggtgcctggcattcatcaattcctgtctcaatttacttgatcatgatcatgtaccaagtagttatcttaacatcagctcattgtcataaatttatggtatctcacattcttcgttgaaaaaggaaaacaccgcatccatctcttgcggtttgtg

SEQ ID NO: 27546 - protein, 347 aa, Zea mays subsp. mays
  peptide (1)..(347): Ceres Seq. ID no. 12407391
  misc_feature (11)..(339): NCBI GI NO: 15221290 NR Description: unknown protein; protein id: At1g68140
  misc_feature (1)..(247): NCBI GI NO: 38344827 NR Description: OSJNBa0064H22.8
  misc_feature (127)..(255): NCBI GI NO: 15236507 NR Description: hypothetical protein; protein id: At4g08460
  misc_feature (47)..(111): NCBI GI NO: 15236507 NR Description: hypothetical protein; protein id: At4g08460
  misc_feature (127)..(250): NCBI GI NO: 25365932 NR Description: unknown protein T32E8.10
  misc_feature (127)..(250): NCBI GI NO: 30699285 NR Description: expressed protein [Arabidopsis thaliana]
  misc_feature (49)..(101): NCBI GI NO: 25365932 NR Description: unknown protein T32E8.10
  misc_feature (49)..(101): NCBI GI NO: 30699285 NR Description: expressed protein [Arabidopsis thaliana]
  misc_feature (125)..(333): NCBI GI NO: 38346521 NR Description: OSJNBa0027H09.16
  misc_feature (27)..(99): NCBI GI NO: 38346521 NR Description: OSJNBa0027H09.16
MARSAGTRRRVARQLKSTHPIPSYRWKSKPMKKPMKKSNRKQVLPTLQKMDWEDANCSVCMEYPHNAVLILCSSHDKGCRPYMCGTSYRHSNCLDQFKKAYTKGALLEEVPANSVGSNLDSAPLTAEKTDSIDLACPLCRGKVKGWTVVEPARSYLNGKRRTCMQDGCSFVGTYKELRKHVKLEHPLAKPREVDPVLEQKWRLLEIERERQDALSTITATMGRAVVFGDYVLDLEDGMDSEDVDSDADNDGRGTENTRRMLLFIMRQVAQHHQNQRLQNATGASDNAEDNYVVSSGANGTTPYSYPLEGEDENGMVVAGGRSTDVLRPERRRRRRRRNRGRLFLGAN

SEQ ID NO: 27547 - protein, 317 aa, Zea mays subsp. mays
  peptide (1)..(317): Ceres Seq. ID no. 12407392
  misc_feature (1)..(309): NCBI GI NO: 15221290 NR Description: unknown protein; protein id: At1g68140
  misc_feature (1)..(217): NCBI GI NO: 38344827 NR Description: OSJNBa0064H22.8
  misc_feature (97)..(225): NCBI GI NO: 15236507 NR Description: hypothetical protein; protein id: At4g08460
  misc_feature (17)..(81): NCBI GI NO: 15236507 NR Description: hypothetical protein; protein id: At4g08460
  misc_feature (97)..(220): NCBI GI NO: 25365932 NR Description: unknown protein T32E8.10
  misc_feature (97)..(220): NCBI GI NO: 30699285 NR Description: expressed protein [Arabidopsis thaliana]
  misc_feature (19)..(71): NCBI GI NO: 25365932 NR Description: unknown protein T32E8.10
  misc_feature (19)..(71): NCBI GI NO: 30699285 NR Description: expressed protein [Arabidopsis thaliana]
  misc_feature (95)..(303): NCBI GI NO: 38346521 NR Description: OSJNBa0027H09.16
  misc_feature (1)..(69): NCBI GI NO: 38346521 NR Description: OSJNBa0027H09.16
MKKPMKKSNRKQVLPTLQKMDWEDANCSVCMEYPHNAVLILCSSHDKGCRPYMCGTSYRHSNCLDQFKKAYTKGALLEEVPANSVGSNLDSAPLTAEKTDSIDLACPLCRGKVKGWTVVEPARSYLNGKRRTCMQDGCSFVGTYKELRKHVKLEHPLAKPREVDPVLEQKWRLLEIERERQDALSTITATMGRAVVFGDYVLDLEDGMDSEDVDSDADNDGRGTENTRRMLLFIMRQVAQHHQNQRLQNATGASDNAEDNYVVSSGANGTTPYSYPLEGEDENGMVVAGGRSTDVLRPERRRRRRRRNRGRLFLGAN

SEQ ID NO: 27548 - protein, 313 aa, Zea mays subsp. mays
  peptide (1)..(313): Ceres Seq. ID no. 12407393
  misc_feature (1)..(305): NCBI GI NO: 15221290 NR Description: unknown protein; protein id: At1g68140
  misc_feature (1)..(213): NCBI GI NO: 38344827 NR Description: OSJNBa0064H22.8
  misc_feature (93)..(221): NCBI GI NO: 15236507 NR Description: hypothetical protein; protein id: At4g08460
  misc_feature (13)..(77): NCBI GI NO: 15236507 NR Description: hypothetical protein; protein id: At4g08460
  misc_feature (93)..(216): NCBI GI NO: 25365932 NR Description: unknown protein T32E8.10
  misc_feature (93)..(216): NCBI GI NO: 30699285 NR Description: expressed protein [Arabidopsis thaliana]
  misc_feature (15)..(67): NCBI GI NO: 25365932 NR Description: unknown protein T32E8.10
  misc_feature (15)..(67): NCBI GI NO: 30699285 NR Description: expressed protein [Arabidopsis thaliana]
  misc_feature (91)..(299): NCBI GI NO: 38346521 NR Description: OSJNBa0027H09.16
  misc_feature (1)..(65): NCBI GI NO: 38346521 NR Description: OSJNBa0027H09.16
MKKSNRKQVLPTLQKMDWEDANCSVCMEYPHNAVLILCSSHDKGCRPYMCGTSYRHSNCLDQFKKAYTKGALLEEVPANSVGSNLDSAPLTAEKTDSIDLACPLCRGKVKGWTVVEPARSYLNGKRRTCMQDGCSFVGTYKELRKHVKLEHPLAKPREVDPVLEQKWRLLEIERERQDALSTITATMGRAVVFGDYVLDLEDGMDSEDVDSDADNDGRGTENTRRMLLFIMRQVAQHHQNQRLQNATGASDNAEDNYVVSSGANGTTPYSYPLEGEDENGMVVAGGRSTDVLRPERRRRRRRRNRGRLFLGAN

SEQ ID NO: 27549 - DNA, 1356 bp, Zea mays subsp. mays
  misc_feature (1)..(1356): Ceres Seq. ID no. 12379426
attgataacagatgtcggcattctcctcgctcctgctgccatcgtttttcctttttcctggacagccactgcaactcctcccaaatcctcccacccggtttagccggctccgctgccaccgccgcgactccacctctgtcgccaccatggtcaagtccaaggccatcagggtccacgagctgggcggccccgaggtgctgcggtgggaggaggtggaggtcggggagcccggtgaaggggagatccgcatcaggaccaccgccgtcggcgtcaacttcatcgacatctactttcggaagggggtctacgccgcgcccaccatgcccttcaccccaggaatggaagccgttggcgtcgtcaccgctgttgggcctggcctcactggcaggaaggtgggcgatgttgttgcatatgccggcaaccccatgggctcctatgctcaggagcagatccttccagcggctgtcgctgttcctgttccaccttccgttgatcataagcaagcagcttctgtgatgctcaagggcatgaccgcccatgttctgcttcgccgggtattcaaggttgagagtggccatactatcctggtccatgctgctgctggtggtgtcggctcactcctttgtcaatgggcaaacgcccttggtgccactgtcatcgggactgtttccaatcaagaaaaagccgctcaggcagctcaggatggatgccaccatcccataatttacactagcgaggatgtcgtcgcaagagtcaaggatattacatcaggaaaaggtgtcaatgtcgtctatgattctgttggaaaggatacatacaaggcttccctggagtgcttggcgtcccgcggcttcctggtgtcgtttgggcagtcgtcaggcaaacctgacccaatcccaacgagcgacctggcttccaagtccttgttcctcactcgtcctagcctcatgcattacactgctacccgtgatgagctgctggagtcagccggcgaggtgtttgccaatgtcgctaaggccttgtttggataaagagggattgaagtggattgaagtgtattttagggattgaaagagaaattagttcatattacacttcaatacaccttataccacctcaatccactccaatccaagattatccaaacaaggcctaacggggtgctgcacgtccgggtaaaccacacgtatccattgtcggaagctgcccaggcccatgcagatctggagggcaggaagacatcagggtccatagtgctcatcccgggatagactcaagggcatgtgaatgaataaatggggtgatctggttatgggaacggcgtaataataattatatctatgctgtttatgcggg

SEQ ID NO: 27550 - protein, 339 aa, Zea mays subsp. mays
  peptide (1)..(339): Ceres Seq. ID no. 12379427
  misc_feature (50)..(337): NCBI GI NO: 7430955 NR Description: quinone oxidoreductase homolog - cowpea
  misc_feature (50)..(337): NCBI GI NO: 15240274 NR Description: quinone oxidoreductase - like protein
  misc_feature (47)..(334): NCBI GI NO: 13570000 NR Description: putative quinone oxidoreductase [Oryza sativa]
  misc_feature (47)..(184): NCBI GI NO: 37536850 NR Description: putative quinone oxidoreductase
  misc_feature (206)..(334): NCBI GI NO: 37536850 NR Description: putative quinone oxidoreductase
  misc_feature (47)..(337): NCBI GI NO: 23014744 NR Description: hypothetical protein
  misc_feature (50)..(337): NCBI GI NO: 531096 NR Description: TED2 [Zinnia elegans]
  misc_feature (50)..(330): NCBI GI NO: 22982287 NR Description: hypothetical protein [Burkholderia fungorum]
  misc_feature (51)..(336): NCBI GI NO: 27381248 NR Description: quinone oxidoreductase [Bradyrhizobium japonicum]
  misc_feature (51)..(330): NCBI GI NO: 23500315 NR Description: quinone oxidoreductase [Brucella suis 1330]
MSAFSSLLLPSFFLFPGQPLQLLPNPPTRFSRLRCHRRDSTSVATMVKSKAIRVHELGGPEVLRWEEVEVGEPGEGEIRIRTTAVGVNFIDIYFRKGVYAAPTMPFTPGMEAVGVVTAVGPGLTGRKVGDVVAYAGNPMGSYAQEQILPAAVAVPVPPSVDHKQAASVMLKGMTAHVLLRRVFKVESGHTILVHAAAGGVGSLLCQWANALGATVIGTVSNQEKAAQAAQDGCHHPIIYTSEDVVARVKDITSGKGVNVVYDSVGKDTYKASLECLASRGFLVSFGQSSGKPDPIPTSDLASKSLFLTRPSLMHYTATRDELLESAGEVFANVAKALFG

SEQ ID NO: 27551 - protein, 294 aa, Zea mays subsp. mays
  peptide (1)..(294): Ceres Seq. ID no. 12379428
  misc_feature (5)..(292): NCBI GI NO: 7430955 NR Description: quinone oxidoreductase homolog - cowpea
  misc_feature (5)..(292): NCBI GI NO: 15240274 NR Description: quinone oxidoreductase - like protein
  misc_feature (2)..(289): NCBI GI NO: 13570000 NR Description: putative quinone oxidoreductase [Oryza sativa]
  misc_feature (2)..(139): NCBI GI NO: 37536850 NR Description: putative quinone oxidoreductase
  misc_feature (161)..(289): NCBI GI NO: 37536850 NR Description: putative quinone oxidoreductase
  misc_feature (2)..(292): NCBI GI NO: 23014744 NR Description: hypothetical protein
  misc_feature (5)..(292): NCBI GI NO: 531096 NR Description: TED2 [Zinnia elegans]
  misc_feature (5)..(285): NCBI GI NO: 22982287 NR Description: hypothetical protein [Burkholderia fungorum]
  misc_feature (6)..(291): NCBI GI NO: 27381248 NR Description: quinone oxidoreductase [Bradyrhizobium japonicum]
  misc_feature (6)..(285): NCBI GI NO: 23500315 NR Description: quinone oxidoreductase [Brucella suis 1330]
MVKSKAIRVHELGGPEVLRWEEVEVGEPGEGEIRIRTTAVGVNFIDIYFRKGVYAAPTMPFTPGMEAVGVVTAVGPGLTGRKVGDVVAYAGNPMGSYAQEQILPAAVAVPVPPSVDHKQAASVMLKGMTAHVLLRRVFKVESGHTILVHAAAGGVGSLLCQWANALGATVIGTVSNQEKAAQAAQDGCHHPIIYTSEDVVARVKDITSGKGVNVVYDSVGKDTYKASLECLASRGFLVSFGQSSGKPDPIPTSDLASKSLFLTRPSLMHYTATRDELLESAGEVFANVAKALFG

SEQ ID NO: 27552 - protein, 236 aa, Zea mays subsp. mays
  peptide (1)..(236): Ceres Seq. ID no. 12379429
  misc_feature (1)..(234): NCBI GI NO: 7430955 NR Description: quinone oxidoreductase homolog - cowpea
  misc_feature (1)..(234): NCBI GI NO: 15240274 NR Description: quinone oxidoreductase - like protein
  misc_feature (1)..(231): NCBI GI NO: 13570000 NR Description: putative quinone oxidoreductase [Oryza sativa]
  misc_feature (1)..(81): NCBI GI NO: 37536850 NR Description: putative quinone oxidoreductase
  misc_feature (103)..(231): NCBI GI NO: 37536850 NR Description: putative quinone oxidoreductase
  misc_feature (1)..(234): NCBI GI NO: 23014744 NR Description: hypothetical protein
  misc_feature (1)..(234): NCBI GI NO: 531096 NR Description: TED2 [Zinnia elegans]
  misc_feature (1)..(227): NCBI GI NO: 22982287 NR Description: hypothetical protein [Burkholderia fungorum]
  misc_feature (1)..(233): NCBI GI NO: 27381248 NR Description: quinone oxidoreductase [Bradyrhizobium japonicum]
  misc_feature (1)..(227): NCBI GI NO: 23500315 NR Description: quinone oxidoreductase [Brucella suis 1330]
MPFTPGMEAVGVVTAVGPGLTGRKVGDVVAYAGNPMGSYAQEQILPAAVAVPVPPSVDHKQAASVMLKGMTAHVLLRRVFKVESGHTILVHAAAGGVGSLLCQWANALGATVIGTVSNQEKAAQAAQDGCHHPIIYTSEDVVARVKDITSGKGVNVVYDSVGKDTYKASLECLASRGFLVSFGQSSGKPDPIPTSDLASKSLFLTRPSLMHYTATRDELLESAGEVFANVAKALFG

SEQ ID NO: 27553 - DNA, 1318 bp, Zea mays subsp. mays
  misc_feature (1)..(1318): Ceres Seq. ID no. 13498544
gcacttggttggagctcctctaccttttccatcgctctgctctgctccgcgtctccgtccgccccggcaaaagcaaaacacagccatggaggggtacgaccgcgagttctggcagttcagcgaccagctgcgcctgcagacgaccgccttctccggcctctccctcggcgactccatctggtctccggccaccggcgccggcgggcggcgcaacaacaacaccgacctactcgcggcctccgcgtcggcagccgacgccggcaagcacaacggcgtgggcctcagcctgaatgatggagggcccggactcattggctccgggaagctcgccttcggcggcagcaaggccggccgctacaacaacctcccatccgagaaggccgcgcccgtctacaaccacagcggcgccacgatcaacggcggctacgccaggagcgacaacgccggcctggcggcgttcaacaagatggggagctacttccacaacagtaacggcaacggcggcggcggcggggaggtgaagagctacttcaacaagtccgccggacgggcggcgagcaacaacagccacgggcacgccggcggcggcaagaagggcggcggcggcgggaagcacggcaagaacgagggcaacggcggcgcggtggcggccacggacaagcggttcaagacgctgccggcgtcggaggcgctgccgcggggcgaggccatcggcggctacatcttcgtctgcaacaacgacaccatggacgagaacctcaggagggagctgttcgggctgccgtcgaggtacagggactcggtgcgggccatccgcccggggctgcccctcttcctctacaactactccacccaccagctgccggcatcttcaaggccgccagcttcggcgggaccaacatcgacccgacggcgtgggaggacaagaagtgccccggcgagtcgcgcttccctgcacaggtgcgagtggcaacgcggaagatctacgatccactggaggaggacgccttccgccccatccttcaccactacgacgggcccaagtttcggctcgagctctccgtcgccgagaccctcgccctcctcgacatcttcgctgacaaggatgacgcctgagccttccttgccgccccctcgcccgccagtgccaatccattaatgcacagacaataaaatggctggagggacagaccaaactatccacctttgtttgatatgataaagggctatgtatgaggcacgcgtcccattatttttgtttttattataagactagacctcgttccgtaagatacatgtatcaatattatataaaaac

SEQ ID NO: 27554 - protein, 385 aa, Zea mays subsp. mays
  peptide (1)..(385): Ceres Seq. ID no. 13498545
  misc_feature (285)..(381): Pfam Name: Pfam Description:  Extensin-like region
  misc_feature (29)..(287): NCBI GI NO: 34913876 NR Description: B1156H12.22
  misc_feature (34)..(287): NCBI GI NO: 18422167 NR Description: expressed protein [Arabidopsis thaliana]
  misc_feature (178)..(287): NCBI GI NO: 9757950 NR Description: gene_id:MJC20
  misc_feature (162)..(287): NCBI GI NO: 21665866 NR Description: GDA2 protein [Pisum sativum]
  misc_feature (179)..(287): NCBI GI NO: 15232081 NR Description: gda-1 -related [Arabidopsis thaliana]
  misc_feature (179)..(287): NCBI GI NO: 21592623 NR Description: gda-1, putative [Arabidopsis thaliana]
  misc_feature (173)..(287): NCBI GI NO: 2369766 NR Description: hypothetical protein [Citrus x paradisi]
  misc_feature (162)..(322): NCBI GI NO: 584825 NR Description: B2 PROTEIN
  misc_feature (249)..(287): NCBI GI NO: 7488804 NR Description: gda-1 protein - garden pea
  misc_feature (283)..(381): NCBI GI NO: 188864 NR Description: mucin
HLVGAPLPFPSLCSAPRLRPPRQKQNTAMEGYDREFWQFSDQLRLQTTAFSGLSLGDSIWSPATGAGGRRNNNTDLLAASASAADAGKHNGVGLSLNDGGPGLIGSGKLAFGGSKAGRYNNLPSEKAAPVYNHSGATINGGYARSDNAGLAAFNKMGSYFHNSNGNGGGGGEVKSYFNKSAGRAASNNSHGHAGGGKKGGGGGKHGKNEGNGGAVAATDKRFKTLPASEALPRGEAIGGYIFVCNNDTMDENLRRELFGLPSRYRDSVRAIRPGLPLFLYNYSTHQLPASSRPPASAGPTSTRRRGRTRSAPASRASLHRCEWQRGRSTIHWRRTPSAPSFTTTTGPSFGSSSPSPRPSPSSTSSLTRMTPEPSLPPPRPPVPIH

SEQ ID NO: 27555 - protein, 357 aa, Zea mays subsp. mays
  peptide (1)..(357): Ceres Seq. ID no. 13498546
  misc_feature (257)..(353): Pfam Name: Pfam Description:  Extensin-like region
  misc_feature (1)..(259): NCBI GI NO: 34913876 NR Description: B1156H12.22
  misc_feature (6)..(259): NCBI GI NO: 18422167 NR Description: expressed protein [Arabidopsis thaliana]
  misc_feature (150)..(259): NCBI GI NO: 9757950 NR Description: gene_id:MJC20
  misc_feature (134)..(259): NCBI GI NO: 21665866 NR Description: GDA2 protein [Pisum sativum]
  misc_feature (151)..(259): NCBI GI NO: 15232081 NR Description: gda-1 -related [Arabidopsis thaliana]
  misc_feature (151)..(259): NCBI GI NO: 21592623 NR Description: gda-1, putative [Arabidopsis thaliana]
  misc_feature (145)..(259): NCBI GI NO: 2369766 NR Description: hypothetical protein [Citrus x paradisi]
  misc_feature (134)..(294): NCBI GI NO: 584825 NR Description: B2 PROTEIN
  misc_feature (221)..(259): NCBI GI NO: 7488804 NR Description: gda-1 protein - garden pea
  misc_feature (255)..(353): NCBI GI NO: 188864 NR Description: mucin
MEGYDREFWQFSDQLRLQTTAFSGLSLGDSIWSPATGAGGRRNNNTDLLAASASAADAGKHNGVGLSLNDGGPGLIGSGKLAFGGSKAGRYNNLPSEKAAPVYNHSGATINGGYARSDNAGLAAFNKMGSYFHNSNGNGGGGGEVKSYFNKSAGRAASNNSHGHAGGGKKGGGGGKHGKNEGNGGAVAATDKRFKTLPASEALPRGEAIGGYIFVCNNDTMDENLRRELFGLPSRYRDSVRAIRPGLPLFLYNYSTHQLPASSRPPASAGPTSTRRRGRTRSAPASRASLHRCEWQRGRSTIHWRRTPSAPSFTTTTGPSFGSSSPSPRPSPSSTSSLTRMTPEPSLPPPRPPVPIH

SEQ ID NO: 27556 - protein, 230 aa, Zea mays subsp. mays
  peptide (1)..(230): Ceres Seq. ID no. 13498547
  misc_feature (130)..(226): Pfam Name: Pfam Description:  Extensin-like region
  misc_feature (1)..(132): NCBI GI NO: 34913876 NR Description: B1156H12.22
  misc_feature (1)..(132): NCBI GI NO: 18422167 NR Description: expressed protein [Arabidopsis thaliana]
  misc_feature (23)..(132): NCBI GI NO: 9757950 NR Description: gene_id:MJC20
  misc_feature (7)..(132): NCBI GI NO: 21665866 NR Description: GDA2 protein [Pisum sativum]
  misc_feature (24)..(132): NCBI GI NO: 15232081 NR Description: gda-1 -related [Arabidopsis thaliana]
  misc_feature (24)..(132): NCBI GI NO: 21592623 NR Description: gda-1, putative [Arabidopsis thaliana]
  misc_feature (18)..(132): NCBI GI NO: 2369766 NR Description: hypothetical protein [Citrus x paradisi]
  misc_feature (7)..(167): NCBI GI NO: 584825 NR Description: B2 PROTEIN
  misc_feature (94)..(132): NCBI GI NO: 7488804 NR Description: gda-1 protein - garden pea
  misc_feature (128)..(226): NCBI GI NO: 188864 NR Description: mucin
MGSYFHNSNGNGGGGGEVKSYFNKSAGRAASNNSHGHAGGGKKGGGGGKHGKNEGNGGAVAATDKRFKTLPASEALPRGEAIGGYIFVCNNDTMDENLRRELFGLPSRYRDSVRAIRPGLPLFLYNYSTHQLPASSRPPASAGPTSTRRRGRTRSAPASRASLHRCEWQRGRSTIHWRRTPSAPSFTTTTGPSFGSSSPSPRPSPSSTSSLTRMTPEPSLPPPRPPVPIH

SEQ ID NO: 27557 - DNA, 1309 bp, Zea mays subsp. mays
  misc_feature (1)..(1309): Ceres Seq. ID no. 12369060
aaactgctggaatatacttacaccgggaagaaggcgaaggccgtcgcgctctcggcggcggcggcggcggcggcagcggcgatgcttgcgttcgagcagcaggtgttggcggatctggtggaagatccgaacggaggtctggtggtgctctcctcgggtctccgctctcgcttccctagccgctaccctcctcctccatctccaccagacccccggcaacgcggctggaggaggatgtctcctcgtcctctccgccaccgataccctcaaggcccggatccggcgccgcctccaagacaagctgcaggttcacgacgtgccccctgacctcgccgcgcagcagcgcgccaccctttacgcctctggcgctgctctcttcctctctccccgcgccctcgccgccgacctcctcacctcccgcctcctcccctcccgcgtccaagccctactcctcctctccgcccaccgctccaccgatacctcctccgatgccttcatctgccgcctcctccgtcaacgcaatcttctccccgtttacgccttctccgattgcccccatgccatggtcgccggtttctccaaggccgagcgtaccatgaagagcctctacgtccgccgtctccacctctggccccgcttccacgttctcgccgcagccgacctggaacgcgccccgcctgacgtcgtagacgtgcgcgttcccatgacgccgcccatgaggggtatccaggctgctgtcctcgctaccatggacgcttgtctcaaggaacttaggcgcaccaacaaggtggatgttgaggacctcaccgtcgacaagggcctcttcaagtccttcgatgagatcgtccggaggcagctcgaccccatctggcacactcttgggaagaagacaaagcagcttgtggctgacctcaggacgctacgcaagctgcttgattacctcgtcaggatgaacctgatgagaaaaaagcaacaagagttggcgtgccatccgaggatggtatcgtggaggatgatgtgaggtctgaaaattacaacacatcagccattgagttcttaagaaggcttcctggggtgacggattctaactaccgagcaatcatggatggatgcaatagcttggccgagctggccctgcttccagtggaaaggttggcggagctaatgggtggtcagaaagctgcgcggacgctcaaggagtttctcgatgccaagtgcccaaccatgttgtagccagagtgacgctgtactgtttgtattgtgtcctgtgggatacaaatacttcagttgatgtgccttatatatatat

SEQ ID NO: 27558 - protein, 339 aa, Zea mays subsp. mays
  peptide (1)..(339): Ceres Seq. ID no. 12369061
  misc_feature (55)..(316): NCBI GI NO: 8926611 NR Description: 5' repair endonuclease [Arabidopsis thaliana]
  misc_feature (55)..(316): NCBI GI NO: 15237571 NR Description: repair endonuclease (gb|AAF01274
  misc_feature (55)..(316): NCBI GI NO: 6503090 NR Description: nucleotide excision repair protein XP-F homolog
  misc_feature (106)..(314): NCBI GI NO: 20073215 NR Description: excision repair cross-complementing rodent repairdeficiency
  misc_feature (106)..(314): NCBI GI NO: 2896801 NR Description: ERCC4_MOUSE [Mus musculus]
  misc_feature (106)..(314): NCBI GI NO: 7657064 NR Description: excision repair cross-complementing rodent repairdeficiency
  misc_feature (106)..(314): NCBI GI NO: 1524411 NR Description: DNA repair endonuclease subunit
  misc_feature (106)..(314): NCBI GI NO: 2842712 NR Description: DNA-REPAIR PROTEIN COMPLEMENTING XP-F CELL
  misc_feature (106)..(314): NCBI GI NO: 4885217 NR Description: excision repair cross-complementing rodent repairdeficiency
  misc_feature (63)..(316): NCBI GI NO: 32766570 NR Description: Unknown (protein for MGC:63468) [Danio rerio]
NCWNILTPGRRRRPSRSRRRRRRRQRRCLRSSSRCWRIWWKIRTEVWWCSPRVSALASLAATLLLHLHQTPGNAAGGGCLLVLSATDTLKARIRRRLQDKLQVHDVPPDLAAQQRATLYASGAALFLSPRALAADLLTSRLLPSRVQALLLLSAHRSTDTSSDAFICRLLRQRNLLPVYAFSDCPHAMVAGFSKAERTMKSLYVRRLHLWPRFHVLAAADLERAPPDVVDVRVPMTPPMRGIQAAVLATMDACLKELRRTNKVDVEDLTVDKGLFKSFDEIVRRQLDPIWHTLGKKTKQLVADLRTLRKLLDYLVRMNLMRKKQQELACHPRMVSWRMM

SEQ ID NO: 27559 - DNA, 1174 bp, Zea mays subsp. mays
  misc_feature (1)..(1174): Ceres Seq. ID no. 12381799
acgcggtcgttctcacgttggcggctggccaccattccctgtctcgtgctcacggcgggcggcagaccgccaggcgccaccgcgccagaccagctgaccagcaggcggcagtgcaggccatcagccgtcacggctctccctcaggtcggcagtgcaggccatcagccgccaaccgatctagtagtgcagaccgccagaggccaggtgaccaggtcggcagtgcagccgtgcaggcggccagccctctccaggcgtccagctaccaccacacacacgaagagcaggcgatgaaaatgtccgcttccgttgcggccgcctcccccaccctccgcttctcctccgccactcatcctctccaccgaccgctccgccggcggctcccgtcggttcgatgctccctcgccgccgccgccggccccggtgtccgggcgccccctgagctcgtcgactccatcctctccaaggtgaagggaactgaccgaggagtgctgctgccaaaagatgggcaccaggaagtggctgaggtcgcgctgcagctggggaagtactgcatagacgaccccgtcaagtccccgcttatattcggagaatgggaggttgtgtactgctcggtgccaacctcgccgggagggctctaccggacgccccttggccgcctggtattcaaaaccgacgagatggtccaggcggtggaagcgcctgacgtggtcaggaacaaggtgtcgttctccgtctttggcctagagggcgcagtgtcattgaaaggtaagctgaatgtgctggacagtaaatggattcaggtcgtgttcgaagcaccagaactgaaggtcggctccttggggtttcagtacggtggcgagagcgaagtcaagctggagatcacctatgtcgatgagaagatcaggctagggagagggtccagaggctcgcttttcgtcttccttagacgatgatagaatggcatgcatgtgtgttgagacttcagacccacaagcaccgatgaggggtggcgctgacgcggtcgtttgtacaatactgtgttcaggacttctatacgtttatgtaaaaattctggcgtccagctgggtaattctggcgtttcagtacggtggcctgatgaatgttgttgtgtagtttgtagcatccattattagtgctgtaagatgatgttttg

SEQ ID NO: 27560 - protein, 316 aa, Zea mays subsp. mays
  peptide (1)..(316): Ceres Seq. ID no. 12381800
  misc_feature (146)..(313): Pfam Name: Pfam Description:  PAP_fibrillin
  misc_feature (103)..(316): NCBI GI NO: 38346556 NR Description: OSJNBa0035M09.17
  misc_feature (119)..(316): NCBI GI NO: 15241221 NR Description: putative protein; protein id: At5g19940
AVVLTLAAGHHSLSRAHGGRQTARRHRARPADQQAAVQAISRHGSPSGRQCRPSAANRSSSADRQRPGDQVGSAAVQAASPLQASSYHHTHEEQAMKMSASVAAASPTLRFSSATHPLHRPLRRRLPSVRCSLAAAAGPGVRAPPELVDSILSKVKGTDRGVLLPKDGHQEVAEVALQLGKYCIDDPVKSPLIFGEWEVVYCSVPTSPGGLYRTPLGRLVFKTDEMVQAVEAPDVVRNKVSFSVFGLEGAVSLKGKLNVLDSKWIQVVFEAPELKVGSLGFQYGGESEVKLEITYVDEKIRLGRGSRGSLFVFLRR

SEQ ID NO: 27561 - protein, 221 aa, Zea mays subsp. mays
  peptide (1)..(221): Ceres Seq. ID no. 12381801
  misc_feature (51)..(218): Pfam Name: Pfam Description:  PAP_fibrillin
  misc_feature (8)..(221): NCBI GI NO: 38346556 NR Description: OSJNBa0035M09.17
  misc_feature (24)..(221): NCBI GI NO: 15241221 NR Description: putative protein; protein id: At5g19940
MKMSASVAAASPTLRFSSATHPLHRPLRRRLPSVRCSLAAAAGPGVRAPPELVDSILSKVKGTDRGVLLPKDGHQEVAEVALQLGKYCIDDPVKSPLIFGEWEVVYCSVPTSPGGLYRTPLGRLVFKTDEMVQAVEAPDVVRNKVSFSVFGLEGAVSLKGKLNVLDSKWIQVVFEAPELKVGSLGFQYGGESEVKLEITYVDEKIRLGRGSRGSLFVFLRR

SEQ ID NO: 27562 - protein, 219 aa, Zea mays subsp. mays
  peptide (1)..(219): Ceres Seq. ID no. 12381802
  misc_feature (49)..(216): Pfam Name: Pfam Description:  PAP_fibrillin
  misc_feature (6)..(219): NCBI GI NO: 38346556 NR Description: OSJNBa0035M09.17
  misc_feature (22)..(219): NCBI GI NO: 15241221 NR Description: putative protein; protein id: At5g19940
MSASVAAASPTLRFSSATHPLHRPLRRRLPSVRCSLAAAAGPGVRAPPELVDSILSKVKGTDRGVLLPKDGHQEVAEVALQLGKYCIDDPVKSPLIFGEWEVVYCSVPTSPGGLYRTPLGRLVFKTDEMVQAVEAPDVVRNKVSFSVFGLEGAVSLKGKLNVLDSKWIQVVFEAPELKVGSLGFQYGGESEVKLEITYVDEKIRLGRGSRGSLFVFLRR

SEQ ID NO: 27563 - DNA, 1282 bp, Zea mays subsp. mays
  misc_feature (1)..(1282): Ceres Seq. ID no. 12409311
  misc_feature (307)..(307): n is a, c, t, g, unknown, or other
  misc_feature (1103)..(1103): n is a, c, t, g, unknown, or other
  misc_feature (220)..(220): n is a, c, t, g, unknown, or other
  misc_feature (113)..(113): n is a, c, t, g, unknown, or other
aaactctgctgcatcttcttccactctccagtctccactagcatcagtcgccgctgcctatcctcgagcaccatttccatcaacagcatccgcctctggcaagctagcgacanaactcatggcactccgcgcgctcgacaacacgatgcccgccgccgtcgaggagcggcccaagaaggtggctaaggtgggcgtccccgccgccgccgccaaggccgcngcctcccccgggagtggcggcaagaagaagaaggggaacgacgagaactcggcgccaagggccacggccgcggcggcggagcaggcngtggagtacatctcgtcggaggagctggaggcggcggccaaccctaaggccaagggccgcgggggctggtcgcgggccttgactccaaggactgggtcaggacctgcgaggcgctcaacgacgcgcgccgcctcgcgatccaccaccccgcgctgctgaacccgatcctggagaaggtggtgctggcggtcgtgaagacgatgaagagcccccgcagcgcggtgctcaagacgtccatcatggcctgcgccgacatcttcagctccttcggcaacctcctcgcctccgtctccgacgacgccttcgacaagctgctgctccagctcctgctgaaggcgtcccaggacaagcggttcgtgtgcgaggaggccgagaaggcgacgcgcgcgatggcggcgtcgatgccgccgctgccgctgctgaagaagctcaaggcgtacgtccaccacgccaacctcagggtcagggctaaggccgccgtcgccatctcccactgcgccgcccggatggacatcggcgcgatgaaggagttcgggatgtcggcgctgctgcagctggcggcggagctgctgaacgaccggctgccggaggcgagggaggccgcccgcggcgtggtggcgtcgacgcacgcggccttcgccaaggaggccgccgcgagcggccaggaggaggacgcggccgcgtcctgggagagcctctgcgcgctcagcctcccgcccatctccgcgcaggccgtcgccaagatcgctgccgccgcctcctcctcgcagtagccacggcacgcgtgcggacttgnccgctggcgttgtttttgggggtcgtctggttcggttcagaagtagcgctcgtgagtcttcagacagagctcgtttgtcgccgccgccgagtctgtttgtttgttctttctactccatgctatctcgcatggttagtgttctgtttatggcttcgtcaagtaataacatagtatcaatt

SEQ ID NO: 27564 - protein, 190 aa, Zea mays subsp. mays
  peptide (1)..(190): Ceres Seq. ID no. 12409312
  misc_feature (1)..(185): NCBI GI NO: 21593517 NR Description: unknown [Arabidopsis thaliana]
  misc_feature (1)..(185): NCBI GI NO: 18414533 NR Description: expressed protein; protein id: At4g15830
  misc_feature (1)..(186): NCBI GI NO: 21537265 NR Description: unknown [Arabidopsis thaliana]
  misc_feature (1)..(186): NCBI GI NO: 18395821 NR Description: expressed protein; protein id: At3g01450
  misc_feature (1)..(185): NCBI GI NO: 7485173 NR Description: hypothetical protein - Arabidopsis thaliana
  misc_feature (1)..(182): NCBI GI NO: 15241493 NR Description: putative protein; protein id: At5g14790
  misc_feature (1)..(141): NCBI GI NO: 9294314 NR Description: gb|AAF24615
  misc_feature (1)..(104): NCBI GI NO: 15229670 NR Description: unknown protein; protein id: At3g18530.1
MKSPRSAVLKTSIMACADIFSSFGNLLASVSDDAFDKLLLQLLLKASQDKRFVCEEAEKATRAMAASMPPLPLLKKLKAYVHHANLRVRAKAAVAISHCAARMDIGAMKEFGMSALLQLAAELLNDRLPEAREAARGVVASTHAAFAKEAAASGQEEDAAASWESLCALSLPPISAQAVAKIAAAASSSQ

SEQ ID NO: 27565 - protein, 177 aa, Zea mays subsp. mays
  peptide (1)..(177): Ceres Seq. ID no. 12409313
  misc_feature (1)..(172): NCBI GI NO: 21593517 NR Description: unknown [Arabidopsis thaliana]
  misc_feature (1)..(172): NCBI GI NO: 18414533 NR Description: expressed protein; protein id: At4g15830
  misc_feature (1)..(173): NCBI GI NO: 21537265 NR Description: unknown [Arabidopsis thaliana]
  misc_feature (1)..(173): NCBI GI NO: 18395821 NR Description: expressed protein; protein id: At3g01450
  misc_feature (1)..(172): NCBI GI NO: 7485173 NR Description: hypothetical protein - Arabidopsis thaliana
  misc_feature (1)..(169): NCBI GI NO: 15241493 NR Description: putative protein; protein id: At5g14790
  misc_feature (1)..(128): NCBI GI NO: 9294314 NR Description: gb|AAF24615
  misc_feature (1)..(91): NCBI GI NO: 15229670 NR Description: unknown protein; protein id: At3g18530.1
MACADIFSSFGNLLASVSDDAFDKLLLQLLLKASQDKRFVCEEAEKATRAMAASMPPLPLLKKLKAYVHHANLRVRAKAAVAISHCAARMDIGAMKEFGMSALLQLAAELLNDRLPEAREAARGVVASTHAAFAKEAAASGQEEDAAASWESLCALSLPPISAQAVAKIAAAASSSQ

SEQ ID NO: 27566 - protein, 154 aa, Zea mays subsp. mays
  peptide (1)..(154): Ceres Seq. ID no. 12409314
  misc_feature (122)..(154): NCBI GI NO: 30424862 NR Description: RIKEN cDNA 5033413A03 [Mus musculus]
  misc_feature (11)..(154): NCBI GI NO: 5821145 NR Description: RNA binding protein [Homo sapiens]
  misc_feature (11)..(154): NCBI GI NO: 5821143 NR Description: RNA binding protein [Homo sapiens]
  misc_feature (11)..(154): NCBI GI NO: 6649242 NR Description: splicing coactivator subunit SRm300 [Homo sapiens]
  misc_feature (1)..(154): NCBI GI NO: 13592175 NR Description: ppg3 [Leishmania major]
  misc_feature (11)..(154): NCBI GI NO: 19923466 NR Description: splicing coactivator subunit SRm300
  misc_feature (69)..(154): NCBI GI NO: 25989119 NR Description: unknown [Streptomyces aureofaciens]
  misc_feature (38)..(38): Xaa is any aa, unknown or other
  misc_feature (73)..(73): Xaa is any aa, unknown or other
  misc_feature (102)..(102): Xaa is any aa, unknown or other
NSAASSSTLQSPLASVAAAYPRAPFPSTASASGKLATXLMALRALDNTMPAAVEERPKKVAKVGVPAAAAKAXASPGSGGKKKKGNDENSAPRATAAAAEQXVEYISSEELEAAANPKAKGRGGWSRALTPRTGSGPARRSTTRAASRSTTPRC

SEQ ID NO: 27567 - DNA, 1453 bp, Zea mays subsp. mays
  misc_feature (1)..(1453): Ceres Seq. ID no. 12353850
cagaaagcgacccgaccgtctctccgctccctccctcccccacaccacccacctgtgatctcccgcgcgggagatccgcccgccccatggcgccgtcgcgcccgctcatgcgggggatccgcccgccgcgcgtcttcccgacccgcggcggccgcgcctcgccgtacgctgtcgccctcacggccctgctcctcgtctccgccgccctcctcgcgctcatcgccttcggcgtcttctcgctccccgtgtcagcgccgaacgccgccgccaccaccacagccggaggggagaccgaatccgccgacacccgccccgcgcgcccccgcgcccgccgggacctgggggaggggctgggagagcgcggcgcgcagtggaccgaggtcatctcgtgggagccaagggcattcgtctaccacaacttcctgtctaaggaagagtgtgaatacctaattggattggccaagcctcacatggtaaaatcaacagttgtcgacagcactactggtaaaagcaaggacagcagggtccggacaagttcgggcatgtttcttcaaagaggaagggacaaggttattcgagtaattgaaaagaggattgcagactataccttcatacctgtagatcatggagagggactccaagtactgcattatgaagtcgggcagaagtatgagcctcactttgattattttcttgatgagtttaacaccaagaatggtggtcagaggatggctactcttctgatgtatctatcagatgttgaagaagggggcgagactattttccctgatgcaaatgtgaacgtcagttctttaccatggtacaatgagctttcagagtgtgccaagagaggcctttctgtcaaaccaaagatgggagatgcacttcttttctggagcatgaaaccagatgccaccctggacccattaagtttgcatgggggttgtcctgtgattagaggaaataaatggtcgtcaaccaagtggatgcatatccacgagtacaaagcttgagccttcaagactcgagagtcgagcgtaccaaagatggatctctatgcatgtgacttggggctgtctactgggttgacacccatgtatgctttacagacccactgaagctgtattctttgctcctttgttggaggggggagaattgcagataataggggccaataagcaggggccttgctcatccctgcagtatttttgggtctgatccttgctgacttggcttttgtcttttcttttctttttcttaccttgccgtaccccagctatagaggaatggtttagtgtctgggggcatagagtttgagattttgttttgtgccacacctgtgttactagtataagctttggtactaatgaataacgaggcctaagctcacatctactacatgaatggtgtaatattgttgaagatagaaagcatctaatgttcggtggttttg

SEQ ID NO: 27568 - protein, 336 aa, Zea mays subsp. mays
  peptide (1)..(336): Ceres Seq. ID no. 12353851
  misc_feature (208)..(331): Pfam Name: II Pfam Description: 2OG-Fe
  misc_feature (53)..(335): NCBI GI NO: 18394842 NR Description: expressed protein; protein id: At1g20270
  misc_feature (53)..(335): NCBI GI NO: 21537370 NR Description: putative prolyl 4-hydroxylase, alpha subunit
  misc_feature (58)..(335): NCBI GI NO: 15227885 NR Description: putative prolyl 4-hydroxylase, alpha subunit
  misc_feature (58)..(335): NCBI GI NO: 21593091 NR Description: putative prolyl 4-hydroxylase, alpha subunit
  misc_feature (49)..(318): NCBI GI NO: 37535718 NR Description: putative prolyl 4-hydroxylase, alpha subunit
  misc_feature (40)..(313): NCBI GI NO: 15239240 NR Description: prolyl 4-hydroxylase, alpha subunit-like protein
  misc_feature (58)..(313): NCBI GI NO: 7488226 NR Description: procollagen-proline dioxygenase alpha chain homologA_TM017A05
  misc_feature (128)..(334): NCBI GI NO: 20260280 NR Description: unknown protein [Arabidopsis thaliana]
  misc_feature (109)..(334): NCBI GI NO: 29150365 NR Description: putative oxidoreductase
  misc_feature (128)..(334): NCBI GI NO: 15239594 NR Description: putative protein; protein id: At5g18900
ESDPTVSPLPPSPTPPTCDLPRGRSARPMAPSRPLMRGIRPPRVFPTRGGRASPYAVALTALLLVSAALLALIAFGVFSLPVSAPNAAATTTAGGETESADTRPARPRARRDLGEGLGERGAQWTEVISWEPRAFVYHNFLSKEECEYLIGLAKPHMVKSTVVDSTTGKSKDSRVRTSSGMFLQRGRDKVIRVIEKRIADYTFIPVDHGEGLQVLHYEVGQKYEPHFDYFLDEFNTKNGGQRMATLLMYLSDVEEGGETIFPDANVNVSSLPWYNELSECAKRGLSVKPKMGDALLFWSMKPDATLDPLSLHGGCPVIRGNKWSSTKWMHIHEYKA

SEQ ID NO: 27569 - protein, 308 aa, Zea mays subsp. mays
  peptide (1)..(308): Ceres Seq. ID no. 12353852
  misc_feature (180)..(303): Pfam Name: II Pfam Description: 2OG-Fe
  misc_feature (25)..(307): NCBI GI NO: 18394842 NR Description: expressed protein; protein id: At1g20270
  misc_feature (25)..(307): NCBI GI NO: 21537370 NR Description: putative prolyl 4-hydroxylase, alpha subunit
  misc_feature (30)..(307): NCBI GI NO: 15227885 NR Description: putative prolyl 4-hydroxylase, alpha subunit
  misc_feature (30)..(307): NCBI GI NO: 21593091 NR Description: putative prolyl 4-hydroxylase, alpha subunit
  misc_feature (21)..(290): NCBI GI NO: 37535718 NR Description: putative prolyl 4-hydroxylase, alpha subunit
  misc_feature (12)..(285): NCBI GI NO: 15239240 NR Description: prolyl 4-hydroxylase, alpha subunit-like protein
  misc_feature (30)..(285): NCBI GI NO: 7488226 NR Description: procollagen-proline dioxygenase alpha chain homologA_TM017A05
  misc_feature (100)..(306): NCBI GI NO: 20260280 NR Description: unknown protein [Arabidopsis thaliana]
  misc_feature (81)..(306): NCBI GI NO: 29150365 NR Description: putative oxidoreductase
  misc_feature (100)..(306): NCBI GI NO: 15239594 NR Description: putative protein; protein id: At5g18900
MAPSRPLMRGIRPPRVFPTRGGRASPYAVALTALLLVSAALLALIAFGVFSLPVSAPNAAATTTAGGETESADTRPARPRARRDLGEGLGERGAQWTEVISWEPRAFVYHNFLSKEECEYLIGLAKPHMVKSTVVDSTTGKSKDSRVRTSSGMFLQRGRDKVIRVIEKRIADYTFIPVDHGEGLQVLHYEVGQKYEPHFDYFLDEFNTKNGGQRMATLLMYLSDVEEGGETIFPDANVNVSSLPWYNELSECAKRGLSVKPKMGDALLFWSMKPDATLDPLSLHGGCPVIRGNKWSSTKWMHIHEYKA

SEQ ID NO: 27570 - protein, 301 aa, Zea mays subsp. mays
  peptide (1)..(301): Ceres Seq. ID no. 12353853
  misc_feature (173)..(296): Pfam Name: II Pfam Description: 2OG-Fe
  misc_feature (18)..(300): NCBI GI NO: 18394842 NR Description: expressed protein; protein id: At1g20270
  misc_feature (18)..(300): NCBI GI NO: 21537370 NR Description: putative prolyl 4-hydroxylase, alpha subunit
  misc_feature (23)..(300): NCBI GI NO: 15227885 NR Description: putative prolyl 4-hydroxylase, alpha subunit
  misc_feature (23)..(300): NCBI GI NO: 21593091 NR Description: putative prolyl 4-hydroxylase, alpha subunit
  misc_feature (14)..(283): NCBI GI NO: 37535718 NR Description: putative prolyl 4-hydroxylase, alpha subunit
  misc_feature (5)..(278): NCBI GI NO: 15239240 NR Description: prolyl 4-hydroxylase, alpha subunit-like protein
  misc_feature (23)..(278): NCBI GI NO: 7488226 NR Description: procollagen-proline dioxygenase alpha chain homologA_TM017A05
  misc_feature (93)..(299): NCBI GI NO: 20260280 NR Description: unknown protein [Arabidopsis thaliana]
  misc_feature (74)..(299): NCBI GI NO: 29150365 NR Description: putative oxidoreductase
  misc_feature (93)..(299): NCBI GI NO: 15239594 NR Description: putative protein; protein id: At5g18900
MRGIRPPRVFPTRGGRASPYAVALTALLLVSAALLALIAFGVFSLPVSAPNAAATTTAGGETESADTRPARPRARRDLGEGLGERGAQWTEVISWEPRAFVYHNFLSKEECEYLIGLAKPHMVKSTVVDSTTGKSKDSRVRTSSGMFLQRGRDKVIRVIEKRIADYTFIPVDHGEGLQVLHYEVGQKYEPHFDYFLDEFNTKNGGQRMATLLMYLSDVEEGGETIFPDANVNVSSLPWYNELSECAKRGLSVKPKMGDALLFWSMKPDATLDPLSLHGGCPVIRGNKWSSTKWMHIHEYKA

SEQ ID NO: 27571 - DNA, 1160 bp, Zea mays subsp. mays
  misc_feature (1)..(1160): Ceres Seq. ID no. 12358324
agtactcgtcctccttgcagagcttgcaccaacacgccaccttaccttgctttgctcgcactcgcacacagttgcgagcgcattgcttgcattgcgcagccgcaggccgcagcacgaagctagccagtaggcggtagatggcgagcagcgcggggaaccgcttcctgaggcagctgagcgcgagcaacggcgacgaagcggtctgcggcggcctgcagatggaccagcaggagtacggcggcgccggcgtggggaggaggggatcccggcggtggtcgaagaagcgggccgccgccgccgccgccgcgaggggctacggcgccggcagcgggaatggcgtgaagcagccggcctctgccgcggggaagcgggtgatggtggtggtggacgagagctcgggagccaaccacgccatgatgtgggcgctcacccacgtcgccgacaagggggacttcctcacgctgctccacgtcctgccgcgctccggcagcggcaggggcgaggaggcctcctccctcgccaactcgctcggcacgctctgcaaggcctccaggccagaggtggaggtcgaagcgcttgtgatccaagggcccaagctgggcaccgtgctcagccaggtgaagaatctggaggcctccgtgctggtgctcagccagtgcaggccatctccctgctggttaagctgcttccctgcggagcagcggcgaggagtttgtggagcagtgcatcaaccaggcggagtgcctgacgctggcggtgaggaagcagagcaagggcgtcggtgggtacctcatcagcacccggtggcagaagaacttctggctcctggcctgacaaccatgcattttacctagctagttactactgctacatgatcacatttgttttaagtcactcccgtatatttgctgtcatttcgtgtcatcaagtgcgtcacaagaaagaccatctctctctctccttcatcctgttgtaaagcgaaaagagcctccgaatctgaccacctttctacgaacctgtatcttccctgcaagtctttagcgtgcgtgtagtactgtgatctgcactgaacaatcatgtaatgctgcataaatgaccaattctgttgtacggcgcttcttgcttgctgcaattgacacttgaggctgtacagcttgcgg

SEQ ID NO: 27572 - protein, 238 aa, Zea mays subsp. mays
  peptide (1)..(238): Ceres Seq. ID no. 12358325
  misc_feature (77)..(183): Pfam Name: Pfam Description:  Universal stress protein family
  misc_feature (1)..(183): NCBI GI NO: 34907308 NR Description: hypothetical protein~similar to Arabidopsisthaliana chromosome 1
  misc_feature (40)..(189): NCBI GI NO: 15219439 NR Description: hypothetical protein; protein id: At1g44760
  misc_feature (57)..(191): NCBI GI NO: 15237955 NR Description: putative protein; protein id: At5g17390.1
  misc_feature (68)..(196): NCBI GI NO: 15228516 NR Description: hypothetical protein; protein id: At3g03290.1
  misc_feature (76)..(175): NCBI GI NO: 18409190 NR Description: expressed protein; protein id: At1g69080
  misc_feature (76)..(175): NCBI GI NO: 21592322 NR Description: unknown [Arabidopsis thaliana]
  misc_feature (80)..(196): NCBI GI NO: 15227695 NR Description: unknown protein; protein id: At2g03720.1
MASSAGNRFLRQLSASNGDEAVCGGLQMDQQEYGGAGVGRRGSRRWSKKRAAAAAAARGYGAGSGNGVKQPASAAGKRVMVVVDESSGANHAMMWALTHVADKGDFLTLLHVLPRSGSGRGEEASSLANSLGTLCKASRPEVEVEALVIQGPKLGTVLSQVKNLEASVLVLSQCRPSPCWLSCFPAEQRRGVCGAVHQPGGVPDAGGEEAEQGRRWVPHQHPVAEELLAPGLTTMHFT

SEQ ID NO: 27573 - protein, 211 aa, Zea mays subsp. mays
  peptide (1)..(211): Ceres Seq. ID no. 12358326
  misc_feature (50)..(156): Pfam Name: Pfam Description:  Universal stress protein family
  misc_feature (1)..(156): NCBI GI NO: 34907308 NR Description: hypothetical protein~similar to Arabidopsisthaliana chromosome 1
  misc_feature (13)..(162): NCBI GI NO: 15219439 NR Description: hypothetical protein; protein id: At1g44760
  misc_feature (30)..(164): NCBI GI NO: 15237955 NR Description: putative protein; protein id: At5g17390.1
  misc_feature (41)..(169): NCBI GI NO: 15228516 NR Description: hypothetical protein; protein id: At3g03290.1
  misc_feature (49)..(148): NCBI GI NO: 18409190 NR Description: expressed protein; protein id: At1g69080
  misc_feature (49)..(148): NCBI GI NO: 21592322 NR Description: unknown [Arabidopsis thaliana]
  misc_feature (53)..(169): NCBI GI NO: 15227695 NR Description: unknown protein; protein id: At2g03720.1
MDQQEYGGAGVGRRGSRRWSKKRAAAAAAARGYGAGSGNGVKQPASAAGKRVMVVVDESSGANHAMMWALTHVADKGDFLTLLHVLPRSGSGRGEEASSLANSLGTLCKASRPEVEVEALVIQGPKLGTVLSQVKNLEASVLVLSQCRPSPCWLSCFPAEQRRGVCGAVHQPGGVPDAGGEEAEQGRRWVPHQHPVAEELLAPGLTTMHFT

SEQ ID NO: 27574 - protein, 159 aa, Zea mays subsp. mays
  peptide (1)..(159): Ceres Seq. ID no. 12358327
  misc_feature (1)..(104): Pfam Name: Pfam Description:  Universal stress protein family
  misc_feature (1)..(104): NCBI GI NO: 34907308 NR Description: hypothetical protein~similar to Arabidopsisthaliana chromosome 1
  misc_feature (1)..(110): NCBI GI NO: 15219439 NR Description: hypothetical protein; protein id: At1g44760
  misc_feature (1)..(112): NCBI GI NO: 15237955 NR Description: putative protein; protein id: At5g17390.1
  misc_feature (1)..(117): NCBI GI NO: 15228516 NR Description: hypothetical protein; protein id: At3g03290.1
  misc_feature (1)..(96): NCBI GI NO: 18409190 NR Description: expressed protein; protein id: At1g69080
  misc_feature (1)..(96): NCBI GI NO: 21592322 NR Description: unknown [Arabidopsis thaliana]
  misc_feature (1)..(117): NCBI GI NO: 15227695 NR Description: unknown protein; protein id: At2g03720.1
MVVVDESSGANHAMMWALTHVADKGDFLTLLHVLPRSGSGRGEEASSLANSLGTLCKASRPEVEVEALVIQGPKLGTVLSQVKNLEASVLVLSQCRPSPCWLSCFPAEQRRGVCGAVHQPGGVPDAGGEEAEQGRRWVPHQHPVAEELLAPGLTTMHFT

SEQ ID NO: 27575 - DNA, 1420 bp, Zea mays subsp. mays
  misc_feature (1)..(1420): Ceres Seq. ID no. 12373624
ctctctcgtgcggcaactgggctattggcgaccgccaacgccgacgattacatttacaccaagtgcccaagccgtcttcgactacaccaggtgccaagttttcttcgcgtccttcacccgcgacgagcacccaccaggcatagagagagatggcaagtctaaccggcctcaccgcgaaccctaatccgaacaagtcattcgagatactgccgaacccaggtgactctgtctccagcctcagctttagtcccaagagtaatctgcttgtggcaacctcctgggataaccaggtgaggtgctgggagattgttggtggtaacagtcagccaaaggcgtccatttctcatgatcagccggttctctgctcggcttggaaggatgatggaactactgtcttctctggaggctgtgacaagcaggtcaaaatgtggcctcttctgtcaggtgggcagcctcagacggttgctatgcatgatgcccctgtcaaggaggtcgcctggattcctcagatgaatcttcttgtatccggaagctgggataagactttaaggtactgggatacaaggcaatcaaatcctgtgcatattcagcaacttcctgaacgttgctatgctcttactgtgaattatccccttatgattgttggaactgctgaccgtcatcttgttgtcttcaatttgcagaatcctcagacggagttcaagcgaatccaatcaccactaaaataccagacacggtgccttgctgcattccctgatcaacaagggtttttggttggttcaatagaaggaagagttggcgttcatcatatcgatgacgcacagcaaagcaaaaacttcacattcaaatgccacagggaaggaaatgatatattctctgtcaattcactcaacttccaccctgtccatcacacatttgcaactgctggatctgacggtgctttcaacttctgggataaggatagcaagcagaggctaaaggcttttagtagatgcccccttcccattccttgcagtaccttcaacagtgatggttccatatttgcttatgcggtttgctatgactggagccgtggggccgaaaatcacaaccctgcagctgcaaagacatccatctatctccacagtccacaggaaaccgaggtcaaaggaaagccgcgcattgcaacaggcaggaagtgattgcattgaaggtgttgcaaggaaccatgatgtcatccagcagttttgtcatgcctccctcctgtcttggaagtctggtagagtgtaaatttcagctaacttatgcgccgattatagggtttctgtagtacctggtgtttgtggtgtcttcaaaatagattctgtcgacgttctgtgatgatctccttactgcttatttctggcagtaaaatcagtgtatcttaaaaaggttgtgatgt

SEQ ID NO: 27576 - protein, 343 aa, Zea mays subsp. mays
  peptide (1)..(343): Ceres Seq. ID no. 12373625
  misc_feature (1)..(343): NCBI GI NO: 38636797 NR Description: putative RAE1 (RNA export 1, S.pombe) homolog
  misc_feature (1)..(338): NCBI GI NO: 34913020 NR Description: putative mRNA export protein
  misc_feature (8)..(343): NCBI GI NO: 15220198 NR Description: mRNA export protein, putative
  misc_feature (8)..(208): NCBI GI NO: 3122671 NR Description: Hypothetical RAE1-like protein At1g80670
  misc_feature (8)..(337): NCBI GI NO: 4506399 NR Description: RAE1 (RNA export 1, S
  misc_feature (8)..(337): NCBI GI NO: 28201956 NR Description: RAE1 RNA export 1 homolog
  misc_feature (8)..(337): NCBI GI NO: 34860864 NR Description: similar to RAE1 RNA export 1 homolog
  misc_feature (8)..(337): NCBI GI NO: 2231592 NR Description: mRNA-associated protein mrnp41 [Homo sapiens]
  misc_feature (3)..(337): NCBI GI NO: 30039225 NR Description: Rae1/Gle2 [Xenopus laevis]
  misc_feature (8)..(308): NCBI GI NO: 26330564 NR Description: unnamed protein product [Mus musculus]
MASLTGLTANPNPNKSFEILPNPGDSVSSLSFSPKSNLLVATSWDNQVRCWEIVGGNSQPKASISHDQPVLCSAWKDDGTTVFSGGCDKQVKMWPLLSGGQPQTVAMHDAPVKEVAWIPQMNLLVSGSWDKTLRYWDTRQSNPVHIQQLPERCYALTVNYPLMIVGTADRHLVVFNLQNPQTEFKRIQSPLKYQTRCLAAFPDQQGFLVGSIEGRVGVHHIDDAQQSKNFTFKCHREGNDIFSVNSLNFHPVHHTFATAGSDGAFNFWDKDSKQRLKAFSRCPLPIPCSTFNSDGSIFAYAVCYDWSRGAENHNPAAAKTSIYLHSPQETEVKGKPRIATGRK

SEQ ID NO: 27577 - protein, 251 aa, Zea mays subsp. mays
  peptide (1)..(251): Ceres Seq. ID no. 12373626
  misc_feature (1)..(251): NCBI GI NO: 38636797 NR Description: putative RAE1 (RNA export 1, S.pombe) homolog
  misc_feature (1)..(246): NCBI GI NO: 34913020 NR Description: putative mRNA export protein
  misc_feature (1)..(251): NCBI GI NO: 15220198 NR Description: mRNA export protein, putative
  misc_feature (1)..(116): NCBI GI NO: 3122671 NR Description: Hypothetical RAE1-like protein At1g80670
  misc_feature (1)..(245): NCBI GI NO: 4506399 NR Description: RAE1 (RNA export 1, S
  misc_feature (1)..(245): NCBI GI NO: 28201956 NR Description: RAE1 RNA export 1 homolog
  misc_feature (1)..(245): NCBI GI NO: 34860864 NR Description: similar to RAE1 RNA export 1 homolog
  misc_feature (1)..(245): NCBI GI NO: 2231592 NR Description: mRNA-associated protein mrnp41 [Homo sapiens]
  misc_feature (1)..(245): NCBI GI NO: 30039225 NR Description: Rae1/Gle2 [Xenopus laevis]
  misc_feature (1)..(216): NCBI GI NO: 26330564 NR Description: unnamed protein product [Mus musculus]
MWPLLSGGQPQTVAMHDAPVKEVAWIPQMNLLVSGSWDKTLRYWDTRQSNPVHIQQLPERCYALTVNYPLMIVGTADRHLVVFNLQNPQTEFKRIQSPLKYQTRCLAAFPDQQGFLVGSIEGRVGVHHIDDAQQSKNFTFKCHREGNDIFSVNSLNFHPVHHTFATAGSDGAFNFWDKDSKQRLKAFSRCPLPIPCSTFNSDGSIFAYAVCYDWSRGAENHNPAAAKTSIYLHSPQETEVKGKPRIATGRK

SEQ ID NO: 27578 - protein, 237 aa, Zea mays subsp. mays
  peptide (1)..(237): Ceres Seq. ID no. 12373627
  misc_feature (1)..(237): NCBI GI NO: 38636797 NR Description: putative RAE1 (RNA export 1, S.pombe) homolog
  misc_feature (1)..(232): NCBI GI NO: 34913020 NR Description: putative mRNA export protein
  misc_feature (1)..(237): NCBI GI NO: 15220198 NR Description: mRNA export protein, putative
  misc_feature (1)..(102): NCBI GI NO: 3122671 NR Description: Hypothetical RAE1-like protein At1g80670
  misc_feature (1)..(231): NCBI GI NO: 4506399 NR Description: RAE1 (RNA export 1, S
  misc_feature (1)..(231): NCBI GI NO: 28201956 NR Description: RAE1 RNA export 1 homolog
  misc_feature (1)..(231): NCBI GI NO: 34860864 NR Description: similar to RAE1 RNA export 1 homolog
  misc_feature (1)..(231): NCBI GI NO: 2231592 NR Description: mRNA-associated protein mrnp41 [Homo sapiens]
  misc_feature (1)..(231): NCBI GI NO: 30039225 NR Description: Rae1/Gle2 [Xenopus laevis]
  misc_feature (1)..(202): NCBI GI NO: 26330564 NR Description: unnamed protein product [Mus musculus]
MHDAPVKEVAWIPQMNLLVSGSWDKTLRYWDTRQSNPVHIQQLPERCYALTVNYPLMIVGTADRHLVVFNLQNPQTEFKRIQSPLKYQTRCLAAFPDQQGFLVGSIEGRVGVHHIDDAQQSKNFTFKCHREGNDIFSVNSLNFHPVHHTFATAGSDGAFNFWDKDSKQRLKAFSRCPLPIPCSTFNSDGSIFAYAVCYDWSRGAENHNPAAAKTSIYLHSPQETEVKGKPRIATGRK

SEQ ID NO: 27579 - DNA, 1510 bp, Zea mays subsp. mays
  misc_feature (1)..(1510): Ceres Seq. ID no. 12349160
aacacaacacatctgagagacatacagcaagctctctccccattggccatatctagctcgtagtctacactgcctctaaaccttgacatttcctttgtattcccctttccaatttgcagtagtttgtaggtagaccgcaaggtggttttttcttgcagcaatggcggccaaggtttgacaaggcatgacgtcctgattaagccccctcgcggcagccacaagatttgttgcagcgtgagacaggagctgcggctgcggaggaagtgagcaaaagcatggatctttccggcacgcagggcgagctgccgatggcaacaatgcacgccggcgggtcgccgtacctggggctgcaccacgggcacccacagcagcacaaccatggcgcgaacggccggcacatgtcgccgccggatgtggtggcggaggaggccaagaaccggcagctggcggtggtgcccgtgggcacaggaggcggaggcggggcaggggtgaggtaccgcgagtgcctgaagaaccacgcggctgccatcggcgggagcgcgacggacgggtgcggcgagttcatgcccgcgggcgaggaggggtcgctggacgcgctccggtgctcggcgtgcgggtgccaccgcaacttccaccgcaaggagccgccgggcggcgacgggcggcagctgtacgggcaccaccaccaccacccgctgagcccgctggccgcggtgcacccccaccatcaccgggggctgctggtggcggcgcttcccccggcgccgacgcgcatggtgatgccgctgagcgccgccatgcaccatcaccagcagccgccgcagcagcaccacagctcggcgtcagcggactccgacgacgcacacgtgccaggggtgcgcgggggggaggtgcagcagcagcagcaggcaccggcacggaagcggttccggaccaagttcaccgcggagcagaaggcccggatgctggggttcgccggaggacgccgggtggcggctgcagaagctggacgaggcggcggtgcagcgcttctgccaggaggtcggcgtgaagcggcgcgtgctcaaggtgtggatgcacaacaacaagcacaccctggcgcggcgcggccacgccgggctccccggcgacccggagctgctggggccgcacgacggccagctcggcatgccgctcccggagccggcggcggagcccgcagttgctgctgcggctgcggctggacttggagtgaccgaccaagccatgtctttcgggactggacgacattgatcaagagagtctaatgctgactgaatcagccttgcggcatagggaagctgttttctttgttaatctgctgctgatctcatcaatctagccgtagctttagctgcatttgcattccactgttccatccatcctagctatccatcaaccacaaactgatgatgcggagtctccatggatttctattccttgttgatttctgtagctgctctccccgctcttgactttaattttttagtgc

SEQ ID NO: 27580 - protein, 336 aa, Zea mays subsp. mays
  peptide (1)..(336): Ceres Seq. ID no. 12349161
  misc_feature (72)..(126): Pfam Name: Pfam Description:  ZF-HD protein dimerisation region
  misc_feature (65)..(234): NCBI GI NO: 13374061 NR Description: ZF-HD homeobox protein [Flaveria bidentis]
  misc_feature (72)..(234): NCBI GI NO: 15223757 NR Description: hypothetical protein; protein id: At1g14440
  misc_feature (57)..(234): NCBI GI NO: 32480091 NR Description: OSJNBb0086G13.8
  misc_feature (72)..(234): NCBI GI NO: 15226993 NR Description: hypothetical protein; protein id: At2g02540
  misc_feature (72)..(234): NCBI GI NO: 20148768 NR Description: hypothetical protein At2g02540/T822.16
  misc_feature (72)..(185): NCBI GI NO: 18410804 NR Description: expressed protein; protein id: At1g75240
  misc_feature (66)..(226): NCBI GI NO: 15238445 NR Description: hypothetical protein common family
  misc_feature (62)..(166): NCBI GI NO: 15233925 NR Description: putative protein; protein id: At4g24660
  misc_feature (74)..(234): NCBI GI NO: 18421904 NR Description: putative protein; protein id: At5g39760
  misc_feature (74)..(234): NCBI GI NO: 21592512 NR Description: unknown [Arabidopsis thaliana]
MDLSGTQGELPMATMHAGGSPYLGLHHGHPQQHNHGANGRHMSPPDVVAEEAKNRQLAVVPVGTGGGGGAGVRYRECLKNHAAAIGGSATDGCGEFMPAGEEGSLDALRCSACGCHRNFHRKEPPGGDGRQLYGHHHHHPLSPLAAVHPHHHRGLLVAALPPAPTRMVMPLSAAMHHHQQPPQQHHSSASADSDDAHVPGVRGGEVQQQQQAPARKRFRTKFTAEQKARMLGFAGGRRVAAAEAGRGGGAALLPGGRREAARAQGVDAQQQAHPGAARPRRAPRRPGAAGAARRPARHAAPGAGGGARSCCCGCGWTWSDRPSHVFRDWTTLIKRV

SEQ ID NO: 27581 - protein, 325 aa, Zea mays subsp. mays
  peptide (1)..(325): Ceres Seq. ID no. 12349162
  misc_feature (61)..(115): Pfam Name: Pfam Description:  ZF-HD protein dimerisation region
  misc_feature (54)..(223): NCBI GI NO: 13374061 NR Description: ZF-HD homeobox protein [Flaveria bidentis]
  misc_feature (61)..(223): NCBI GI NO: 15223757 NR Description: hypothetical protein; protein id: At1g14440
  misc_feature (46)..(223): NCBI GI NO: 32480091 NR Description: OSJNBb0086G13.8
  misc_feature (61)..(223): NCBI GI NO: 15226993 NR Description: hypothetical protein; protein id: At2g02540
  misc_feature (61)..(223): NCBI GI NO: 20148768 NR Description: hypothetical protein At2g02540/T822.16
  misc_feature (61)..(174): NCBI GI NO: 18410804 NR Description: expressed protein; protein id: At1g75240
  misc_feature (55)..(215): NCBI GI NO: 15238445 NR Description: hypothetical protein common family
  misc_feature (51)..(155): NCBI GI NO: 15233925 NR Description: putative protein; protein id: At4g24660
  misc_feature (63)..(223): NCBI GI NO: 18421904 NR Description: putative protein; protein id: At5g39760
  misc_feature (63)..(223): NCBI GI NO: 21592512 NR Description: unknown [Arabidopsis thaliana]
MATMHAGGSPYLGLHHGHPQQHNHGANGRHMSPPDVVAEEAKNRQLAVVPVGTGGGGGAGVRYRECLKNHAAAIGGSATDGCGEFMPAGEEGSLDALRCSACGCHRNFHRKEPPGGDGRQLYGHHHHHPLSPLAAVHPHHHRGLLVAALPPAPTRMVMPLSAAMHHHQQPPQQHHSSASADSDDAHVPGVRGGEVQQQQQAPARKRFRTKFTAEQKARMLGFAGGRRVAAAEAGRGGGAALLPGGRREAARAQGVDAQQQAHPGAARPRRAPRRPGAAGAARRPARHAAPGAGGGARSCCCGCGWTWSDRPSHVFRDWTTLIKRV

SEQ ID NO: 27582 - protein, 322 aa, Zea mays subsp. mays
  peptide (1)..(322): Ceres Seq. ID no. 12349163
  misc_feature (58)..(112): Pfam Name: Pfam Description:  ZF-HD protein dimerisation region
  misc_feature (51)..(220): NCBI GI NO: 13374061 NR Description: ZF-HD homeobox protein [Flaveria bidentis]
  misc_feature (58)..(220): NCBI GI NO: 15223757 NR Description: hypothetical protein; protein id: At1g14440
  misc_feature (43)..(220): NCBI GI NO: 32480091 NR Description: OSJNBb0086G13.8
  misc_feature (58)..(220): NCBI GI NO: 15226993 NR Description: hypothetical protein; protein id: At2g02540
  misc_feature (58)..(220): NCBI GI NO: 20148768 NR Description: hypothetical protein At2g02540/T822.16
  misc_feature (58)..(171): NCBI GI NO: 18410804 NR Description: expressed protein; protein id: At1g75240
  misc_feature (52)..(212): NCBI GI NO: 15238445 NR Description: hypothetical protein common family
  misc_feature (48)..(152): NCBI GI NO: 15233925 NR Description: putative protein; protein id: At4g24660
  misc_feature (60)..(220): NCBI GI NO: 18421904 NR Description: putative protein; protein id: At5g39760
  misc_feature (60)..(220): NCBI GI NO: 21592512 NR Description: unknown [Arabidopsis thaliana]
MHAGGSPYLGLHHGHPQQHNHGANGRHMSPPDVVAEEAKNRQLAVVPVGTGGGGGAGVRYRECLKNHAAAIGGSATDGCGEFMPAGEEGSLDALRCSACGCHRNFHRKEPPGGDGRQLYGHHHHHPLSPLAAVHPHHHRGLLVAALPPAPTRMVMPLSAAMHHHQQPPQQHHSSASADSDDAHVPGVRGGEVQQQQQAPARKRFRTKFTAEQKARMLGFAGGRRVAAAEAGRGGGAALLPGGRREAARAQGVDAQQQAHPGAARPRRAPRRPGAAGAARRPARHAAPGAGGGARSCCCGCGWTWSDRPSHVFRDWTTLIKRV

SEQ ID NO: 27583 - DNA, 1347 bp, Zea mays subsp. mays
  misc_feature (1)..(1347): Ceres Seq. ID no. 12381237
ccggaacgcccgtcccgtccgtcctctccccatccacatccatcccgtgtgctcctactgctcctcgatttgatcaccgattaggggaggcggtttaccagtgagcacgcgcgagagataggataggaggaaagggaagctagcggcttcgctctcgcggggagatggcgcaggcggtggaggagtggtaccggcagatgcccatcatcacgcgctcctacctcaccgccgctgtcgtcaccaccgtcggctgcaccctcgaaatcatttcgccgtatcacctgtaccttaacccgaagctcgtggtgcagcactacgagatttggcgcctcgtcaccaacttcctctacttccgcaagatggatttggattttctattccacatgttctttcttgcacgatactgcaagcttctggaggaaaactcatttagaggaagaactgctgactttttttacatgctcttgtttggtgctactgtcctaactggcattgttctgatcggagggatgataccttacatttctgagacatttgccagaattctgttcttgagcaattcattgacatttatgatggtttatgtctggagcaagcacaacccttttatccatatgagctttctgggcctgtttacctttacggctgcgtacttaccatgggttctgttgggcttctctatcctcgttggaagcagcacatgggtggacctcttgggtatgattgctggacatatgtactacttcctggaagatgtatacccacgtatgactgggcgtcgccccctaaagacaccgtccttcatcaaggcgctatttgctgatgacaatgttgtggtggcacagccacccaatgctgggattggtgctggtgcaaggttcggtgctattggtgtagatccccaggctcaatgatgaattactttcagtgacctgagggccgaggctgtgactgatctgggatgcggcagtttgtattctctgcgcaaattgcggaactgtacaagccattgttcttgtgtatttatacaggctagatgagagttattgtgcataacaaaaagattagtagtatcggaggcggctaagtttgtcacctgttggcagggcccggaggaaaatggatcgtgatgggcaaacaggccaacccctgttgcagaaacttgttcatgtgacggtttaacatctgacctgctaccctttcatgcatcggtgaatttagtctaggaaactgtttgaagtggggaaatttggtgctttggcagcgagaatttggatggagcgctgtaattgcagaatggtgcaaggaatgactcctaacattgtggacgcctggatggtgttcgtc

SEQ ID NO: 27584 - protein, 249 aa, Zea mays subsp. mays
  peptide (1)..(249): Ceres Seq. ID no. 12381238
  misc_feature (12)..(212): Pfam Name: Pfam Description:  Der1-like family
  misc_feature (1)..(249): NCBI GI NO: 27573354 NR Description: putative Der1-like protein
  misc_feature (1)..(245): NCBI GI NO: 15234480 NR Description: unknown protein; protein id: At4g04860
  misc_feature (1)..(245): NCBI GI NO: 17473759 NR Description: putative protein [Arabidopsis thaliana]
  misc_feature (1)..(245): NCBI GI NO: 22328865 NR Description: putative protein; protein id: At4g21810
  misc_feature (15)..(245): NCBI GI NO: 7487831 NR Description: hypothetical protein T8O5
  misc_feature (34)..(245): NCBI GI NO: 25407582 NR Description: hypothetical protein AT4g21810
  misc_feature (1)..(218): NCBI GI NO: 40352706 NR Description: Unknown (protein for MGC:63991) [Danio rerio]
  misc_feature (3)..(240): NCBI GI NO: 16151831 NR Description: F-LANa [Mus musculus]
  misc_feature (3)..(218): NCBI GI NO: 15808990 NR Description: carcinoma related gene [Mus musculus]
  misc_feature (1)..(220): NCBI GI NO: 13435738 NR Description: RIKEN cDNA 1810063P04 gene [Mus musculus]
MAQAVEEWYRQMPIITRSYLTAAVVTTVGCTLEIISPYHLYLNPKLVVQHYEIWRLVTNFLYFRKMDLDFLFHMFFLARYCKLLEENSFRGRTADFFYMLLFGATVLTGIVLIGGMIPYISETFARILFLSNSLTFMMVYVWSKHNPFIHMSFLGLFTFTAAYLPWVLLGFSILVGSSTWVDLLGMIAGHMYYFLEDVYPRMTGRRPLKTPSFIKALFADDNVVVAQPPNAGIGAGARFGAIGVDPQAQ

SEQ ID NO: 27585 - protein, 238 aa, Zea mays subsp. mays
  peptide (1)..(238): Ceres Seq. ID no. 12381239
  misc_feature (1)..(201): Pfam Name: Pfam Description:  Der1-like family
  misc_feature (1)..(238): NCBI GI NO: 27573354 NR Description: putative Der1-like protein
  misc_feature (1)..(234): NCBI GI NO: 15234480 NR Description: unknown protein; protein id: At4g04860
  misc_feature (1)..(234): NCBI GI NO: 17473759 NR Description: putative protein [Arabidopsis thaliana]
  misc_feature (1)..(234): NCBI GI NO: 22328865 NR Description: putative protein; protein id: At4g21810
  misc_feature (4)..(234): NCBI GI NO: 7487831 NR Description: hypothetical protein T8O5
  misc_feature (23)..(234): NCBI GI NO: 25407582 NR Description: hypothetical protein AT4g21810
  misc_feature (1)..(207): NCBI GI NO: 40352706 NR Description: Unknown (protein for MGC:63991) [Danio rerio]
  misc_feature (1)..(229): NCBI GI NO: 16151831 NR Description: F-LANa [Mus musculus]
  misc_feature (1)..(207): NCBI GI NO: 15808990 NR Description: carcinoma related gene [Mus musculus]
  misc_feature (1)..(209): NCBI GI NO: 13435738 NR Description: RIKEN cDNA 1810063P04 gene [Mus musculus]
MPIITRSYLTAAVVTTVGCTLEIISPYHLYLNPKLVVQHYEIWRLVTNFLYFRKMDLDFLFHMFFLARYCKLLEENSFRGRTADFFYMLLFGATVLTGIVLIGGMIPYISETFARILFLSNSLTFMMVYVWSKHNPFIHMSFLGLFTFTAAYLPWVLLGFSILVGSSTWVDLLGMIAGHMYYFLEDVYPRMTGRRPLKTPSFIKALFADDNVVVAQPPNAGIGAGARFGAIGVDPQAQ

SEQ ID NO: 27586 - protein, 184 aa, Zea mays subsp. mays
  peptide (1)..(184): Ceres Seq. ID no. 12381240
  misc_feature (1)..(147): Pfam Name: Pfam Description:  Der1-like family
  misc_feature (1)..(184): NCBI GI NO: 27573354 NR Description: putative Der1-like protein
  misc_feature (1)..(180): NCBI GI NO: 15234480 NR Description: unknown protein; protein id: At4g04860
  misc_feature (1)..(180): NCBI GI NO: 17473759 NR Description: putative protein [Arabidopsis thaliana]
  misc_feature (1)..(180): NCBI GI NO: 22328865 NR Description: putative protein; protein id: At4g21810
  misc_feature (1)..(180): NCBI GI NO: 7487831 NR Description: hypothetical protein T8O5
  misc_feature (1)..(180): NCBI GI NO: 25407582 NR Description: hypothetical protein AT4g21810
  misc_feature (1)..(153): NCBI GI NO: 40352706 NR Description: Unknown (protein for MGC:63991) [Danio rerio]
  misc_feature (1)..(175): NCBI GI NO: 16151831 NR Description: F-LANa [Mus musculus]
  misc_feature (1)..(153): NCBI GI NO: 15808990 NR Description: carcinoma related gene [Mus musculus]
  misc_feature (1)..(155): NCBI GI NO: 13435738 NR Description: RIKEN cDNA 1810063P04 gene [Mus musculus]
MDLDFLFHMFFLARYCKLLEENSFRGRTADFFYMLLFGATVLTGIVLIGGMIPYISETFARILFLSNSLTFMMVYVWSKHNPFIHMSFLGLFTFTAAYLPWVLLGFSILVGSSTWVDLLGMIAGHMYYFLEDVYPRMTGRRPLKTPSFIKALFADDNVVVAQPPNAGIGAGARFGAIGVDPQAQ

SEQ ID NO: 27587 - DNA, 1244 bp, Zea mays subsp. mays
  misc_feature (1)..(1244): Ceres Seq. ID no. 12356309
acccatccaagataccgacgagcaggccagagcgaaggaatggactccatggccagcgacgacagcaaccaaggagcagcagccaagccgaagccgaagccaccaccgctaccgctgtccgtgcgcctccagctggccgggctgacagcggccatcgacgccgtggagcgccgcgacgggacggtgaaccgctgcctgtacggcgtgatcgaccggctcctgagcgcgcgcgccagcccgcgcccggacgcctccggggtgcgctcctacgacgtgaccatggacgcgtcccgcggcatctgggcgcgcgtcttcgcgccggccgcggcggaccgcccgctccccgtggtggtgtacttccacggcggcggcttcgcgctcttctccccggccatcgggcccttcaacggcgtgtgccgccgcctctgcgccgcgctcggcgccgtcgtggtgtccgtcaactaccgcctggccccggagcaccgctggcccgccgcctacgacgacggcgtcgacgcgctgcgcttcctcgacgcccgcggcggcgtcccgggcctggacgacggcgtgcccgtcgacctcggcacctgcttcctggccggggagagcgcgggcggaaacatcgtgcaccacgtcgccaaccgctgggcggcggcgtggcagccgtccgcgcgggccctccgcgtcgcgggcgtcttccccgtgcagccctacttcggcggcgtggagcgcacgccgtcggagctggagctagagggcgtggcgcccgtggtcaacctcaggcgctccgacttctcgtggaccgcgttcctgcccgacggcgccacccgcgaccacccggccgcgcacgtcaccgacgacaacgccgacctcgccgacgacttcccgcccgccatggtcattatcggcggcttcgacccgctcatggactggcagcgacgctacgccgacgtgctgcgccggaaggggaaggaggtgctggtggccgagtacccaggcatgttccacggcttctacggcttcccggagctccccgaggctaccaaggtgctgcaggatatgaaggccttcgtcgacagccacatacccacgcccaagctcgccgacgcgtgatgcacgaacaccatcccattccattctagtgtcatgagtcatgactgcttggttcatctatctgctgtcaaaatatatacttcctatatattaaagcagggcgcaaagcttccatctggtgcgcccacgcc

SEQ ID NO: 27588 - protein, 379 aa, Zea mays subsp. mays
  peptide (1)..(379): Ceres Seq. ID no. 12356310
  misc_feature (129)..(299): Pfam Name: Pfam Description:  Aminotransferase class-III
  misc_feature (47)..(350): NCBI GI NO: 23018055 NR Description: hypothetical protein [Thermobifida fusca]
  misc_feature (25)..(351): NCBI GI NO: 73648 NR Description: immediate-early protein IE180 - suid herpesvirus 1
  misc_feature (20)..(369): NCBI GI NO: 23105183 NR Description: hypothetical protein [Azotobacter vinelandii]
  misc_feature (1)..(291): NCBI GI NO: 23018055 NR Description: hypothetical protein [Thermobifida fusca]
PSKIPTSRPERRNGLHGQRRQQPRSSSQAEAEATTATAVRAPPAGRADSGHRRRGAPRRDGEPLPVRRDRPAPERARQPAPGRLRGALLRRDHGRVPRHLGARLRAGRGGPPAPRGGVLPRRRLRALLPGHRALQRRVPPPLRRARRRRGVRQLPPGPGAPLARRLRRRRRRAALPRRPRRRPGPGRRRARRPRHLLPGRGERGRKHRAPRRQPLGGGVAAVRAGPPRRGRLPRAALLRRRGAHAVGAGARGRGARGQPQALRLLVDRVPARRRHPRPPGRARHRRQRRPRRRLPARHGHYRRLRPAHGLAATLRRRAAPEGEGGAGGRVPRHVPRLLRLPGAPRGYQGAAGYEGLRRQPHTHAQARRRVMHEHHPIPF

SEQ ID NO: 27589 - protein, 370 aa, Zea mays subsp. mays
  peptide (1)..(370): Ceres Seq. ID no. 12356311
  misc_feature (9)..(361): NCBI GI NO: 34393714 NR Description: putative esterase
  misc_feature (13)..(361): NCBI GI NO: 34904774 NR Description: similar to carboxylesterase
  misc_feature (31)..(366): NCBI GI NO: 34904770 NR Description: similar to carboxylesterase
  misc_feature (34)..(361): NCBI GI NO: 34904760 NR Description: similar to carboxylesterase
  misc_feature (26)..(362): NCBI GI NO: 34904772 NR Description: similar to carboxylesterase
  misc_feature (33)..(361): NCBI GI NO: 34904758 NR Description: hypothetical protein~predicted by GeneMark
  misc_feature (37)..(362): NCBI GI NO: 15237783 NR Description: putative protein; protein id: At5g23530
  misc_feature (37)..(362): NCBI GI NO: 21618039 NR Description: unknown [Arabidopsis thaliana]
  misc_feature (37)..(360): NCBI GI NO: 15240483 NR Description: putative protein; protein id: At5g27320
  misc_feature (37)..(360): NCBI GI NO: 15229905 NR Description: unknown protein; protein id: At3g05120.1
THPRYRRAGQSEGMDSMASDDSNQGAAAKPKPKPPPLPLSVRLQLAGLTAAIDAVERRDGTVNRCLYGVIDRLLSARASPRPDASGVRSYDVTMDASRGIWARVFAPAAADRPLPVVVYFHGGGFALFSPAIGPFNGVCRRLCAALGAVVVSVNYRLAPEHRWPAAYDDGVDALRFLDARGGVPGLDDGVPVDLGTCFLAGESAGGNIVHHVANRWAAAWQPSARALRVAGVFPVQPYFGGVERTPSELELEGVAPVVNLRRSDFSWTAFLPDGATRDHPAAHVTDDNADLADDFPPAMVIIGGFDPLMDWQRRYADVLRRKGKEVLVAEYPGMFHGFYGFPELPEATKVLQDMKAFVDSHIPTPKLADA

SEQ ID NO: 27590 - protein, 357 aa, Zea mays subsp. mays
  peptide (1)..(357): Ceres Seq. ID no. 12356312
  misc_feature (1)..(348): NCBI GI NO: 34393714 NR Description: putative esterase
  misc_feature (1)..(348): NCBI GI NO: 34904774 NR Description: similar to carboxylesterase
  misc_feature (18)..(353): NCBI GI NO: 34904770 NR Description: similar to carboxylesterase
  misc_feature (21)..(348): NCBI GI NO: 34904760 NR Description: similar to carboxylesterase
  misc_feature (13)..(349): NCBI GI NO: 34904772 NR Description: similar to carboxylesterase
  misc_feature (20)..(348): NCBI GI NO: 34904758 NR Description: hypothetical protein~predicted by GeneMark
  misc_feature (24)..(349): NCBI GI NO: 15237783 NR Description: putative protein; protein id: At5g23530
  misc_feature (24)..(349): NCBI GI NO: 21618039 NR Description: unknown [Arabidopsis thaliana]
  misc_feature (24)..(347): NCBI GI NO: 15240483 NR Description: putative protein; protein id: At5g27320
  misc_feature (24)..(347): NCBI GI NO: 15229905 NR Description: unknown protein; protein id: At3g05120.1
MDSMASDDSNQGAAAKPKPKPPPLPLSVRLQLAGLTAAIDAVERRDGTVNRCLYGVIDRLLSARASPRPDASGVRSYDVTMDASRGIWARVFAPAAADRPLPVVVYFHGGGFALFSPAIGPFNGVCRRLCAALGAVVVSVNYRLAPEHRWPAAYDDGVDALRFLDARGGVPGLDDGVPVDLGTCFLAGESAGGNIVHHVANRWAAAWQPSARALRVAGVFPVQPYFGGVERTPSELELEGVAPVVNLRRSDFSWTAFLPDGATRDHPAAHVTDDNADLADDFPPAMVIIGGFDPLMDWQRRYADVLRRKGKEVLVAEYPGMFHGFYGFPELPEATKVLQDMKAFVDSHIPTPKLADA

SEQ ID NO: 27591 - DNA, 1290 bp, Zea mays subsp. mays
  misc_feature (1)..(1290): Ceres Seq. ID no. 12409295
ctactgtttcggactttcgggttttggccgacacccgacaatcttaacatcaaactcgtcgtccacgccctcctcggcaaggttgcgtacggcgtggccctaaggttcatctcgccgcctccctcaacctcttgattccgcctccctcaacctcttgattccgcctccctgaaggcataccagcgggatcaagctattttgctggccaaccgaacggtcaagccgacgatgacgctcggatcggcggcacacaagatcccgctggaggttgcgcacaccctcgtcgagatcgccgaggtcgcgcgctacgcctaccaccaccgccccggccgccctgcaacccacgagggggacccgactgcgccgcccgcaggggctgatagcagcgggggcaccaacgaggatgccgcgcggctgctggaggagaacgccatgctccgcgcccgactcgcagatgacctcgcgctcctgcgtgagctccacggcgcgccctgcgtctccaaggagtgccctcctgatctatacaaccgattgatggcggcggtcaacaatgttagcttccttgctcatctcgagaaattacaggatgagtcagcacgtcaacttaatgaactaacttctggcgacatgacaggttcattcctcgttaagtattgtgaagtttgtttctagactacattttatggtcactgttggttcttctaatacattttgcgaagtgctattccattttctgcttcaatggaactagaggtggaagctgcagacattccggacaaagcgggtaacgggaagaaaggattgtgggtcttggtcccttgtgatacagctggagctaatttggaggaaattagtgggattgatgatgaaaattatgtcatagtaaatgaagacgatatagtcgatggtattgccgcctttgttgctaggtgcattcttgaagatccaaaatccaagtcgttatcgccaatgcagctccaaaaggctgttgcaaaggcattagatagcatgaaagctcgatggagatggtcaaccttttgggaggctggacagattatatatatcttggctacttggggcatcacattagcagggttgtacaagagccgccatgtcctgaaggtggcagcaaagggtgctgctgtgtctgccagatttgttatgaaggccatttgagtgtaagaggcactcatgtgggatcagcaatttgcaaaatgtaaatacaaaactcgtcccgtcagttgtgcatatggttgtggcatgtttatcatgatgaagttatgatcatcc

SEQ ID NO: 27592 - protein, 147 aa, Zea mays subsp. mays
  peptide (1)..(147): Ceres Seq. ID no. 12409296
  misc_feature (7)..(135): NCBI GI NO: 19033559 NR Description: putative growth factor
  misc_feature (12)..(119): NCBI GI NO: 15219442 NR Description: unknown protein; protein id: At1g44770.1
  misc_feature (12)..(119): NCBI GI NO: 25373234 NR Description: hypothetical protein T12C22.4
MTLGSAAHKIPLEVAHTLVEIAEVARYAYHHRPGRPATHEGDPTAPPAGADSSGGTNEDAARLLEENAMLRARLADDLALLRELHGAPCVSKECPPDLYNRLMAAVNNVSFLAHLEKLQDESARQLNELTSGDMTGSFLVKYCEVCF

SEQ ID NO: 27593 - protein, 144 aa, Zea mays subsp. mays
  peptide (1)..(144): Ceres Seq. ID no. 12409297
  misc_feature (9)..(135): NCBI GI NO: 19033559 NR Description: putative growth factor
  misc_feature (1)..(144): NCBI GI NO: 15219442 NR Description: unknown protein; protein id: At1g44770.1
  misc_feature (1)..(144): NCBI GI NO: 25373234 NR Description: hypothetical protein T12C22.4
  misc_feature (2)..(144): NCBI GI NO: 30686591 NR Description: expressed protein [Arabidopsis thaliana]
  misc_feature (1)..(144): NCBI GI NO: 30695733 NR Description: expressed protein [Arabidopsis thaliana]
MELEVEAADIPDKAGNGKKGLWVLVPCDTAGANLEEISGIDDENYVIVNEDDIVDGIAAFVARCILEDPKSKSLSPMQLQKAVAKALDSMKARWRWSTFWEAGQIIYILATWGITLAGLYKSRHVLKVAAKGAAVSARFVMKAI

SEQ ID NO: 27594 - protein, 79 aa, Zea mays subsp. mays
  peptide (1)..(79): Ceres Seq. ID no. 12409298
  misc_feature (1)..(67): NCBI GI NO: 19033559 NR Description: putative growth factor
  misc_feature (1)..(51): NCBI GI NO: 15219442 NR Description: unknown protein; protein id: At1g44770.1
  misc_feature (1)..(51): NCBI GI NO: 25373234 NR Description: hypothetical protein T12C22.4
MLRARLADDLALLRELHGAPCVSKECPPDLYNRLMAAVNNVSFLAHLEKLQDESARQLNELTSGDMTGSFLVKYCEVCF

SEQ ID NO: 27595 - DNA, 1164 bp, Zea mays subsp. mays
  misc_feature (1)..(1164): Ceres Seq. ID no. 12405567
aaaaaagtaccactacgactccgcctccggctccgagagcagcagcctcagtaccaccagtccagtccagcctccagctaggggaagaagaagaagagcgaaggaaggggacgggggcgaggaaggagccagagcagacccaatccctcaatggcttcctctcgcgctctcgctctcgctctcttcctcctctgcgccctgctgcccgcgccccctgtctcggccacattgctgttcggcggcggcgagtcggccaagaaggcgggcgtcgacgcggagtggcggccggccactgcgacgtggtacggcgaggcagagggcgacggcagcgacggcggcgcgtgcgggtacgggacgctggtggacgtggtgccgatgaaggcgcgggtggggtcggtgagccccgtgctgttcaaggacggcgagggctgcggcgcctgctacaaggtcaggtgcctggaccgcggcgtgtgctcgcgccgtgccgtcacggtggtcgtcacggactagtgccccggcgggctgtgcgcgttcggccgcacccacttcgacctcagcggcgccgcgttcagcaggatggccgtcgccggggccggcggccggctgcgcgaccggggccagctgtccgtcgtgtacaggaggacggcctgcaagtacggcgggaagaacatcgcgttccgtgtgaacgagggctcgactaacttctggctctcgctgctcgtcgagttcgaggacggcgagggcgacataggatccatgcagataaagcaggccaactcggtggagtggctggacatgcggcacgtgtggggggcaacctggtgcctggtgcggggcccgctcgtgggccccttctccgtgaggctcaccacgctgtccgcgcggaagacgctcacgggcccgcgacgtgatccccaggaactggacgcccaaggccacctacacctcgcgcctcaacttccagccgtctctctaggtctaggacgagggagggacccaccgcggcgactggggcccacgttttatcggccccggacactgccctgtgggcccgttgcaaaacgaggaatcagtcagtccagagtgtttttttttttttttccctgtatgcagatgcaggcaaccttcgtatggtttggtttttatcttatcgtagtcgtagct

SEQ ID NO: 27596 - protein, 232 aa, Zea mays subsp. mays
  peptide (1)..(232): Ceres Seq. ID no. 12405568
  misc_feature (79)..(232): Pfam Name: Pfam Description:  HlyD family secretion protein
KSTTTTPPPAPRAAASVPPVQSSLQLGEEEEERRKGTGARKEPEQTQSLNGFLSRSRSRSLPPLRPAARAPCLGHIAVRRRRVGQEGGRRRGVAAGHCDVVRRGRGRRQRRRRVRVRDAGGRGADEGAGGVGEPRAVQGRRGLRRLLQGQVPGPRRVLAPCRHGGRHGLVPRRAVRVRPHPLRPQRRRVQQDGRRRGRRPAARPGPAVRRVQEDGLQVRREEHRVPCERGLD

SEQ ID NO: 27597 - protein, 196 aa, Zea mays subsp. mays
  peptide (1)..(196): Ceres Seq. ID no. 12405569
  misc_feature (32)..(107): Pfam Name: Pfam Description:  Pollen allergen
  misc_feature (1)..(107): NCBI GI NO: 38346623 NR Description: OSJNBa0074L08.17
  misc_feature (1)..(65): NCBI GI NO: 21666634 NR Description: beta-expansin [Oryza sativa]
  misc_feature (1)..(107): NCBI GI NO: 11357194 NR Description: beta-expansin
  misc_feature (1)..(107): NCBI GI NO: 15225423 NR Description: beta-expansin pollen allergen protein
  misc_feature (1)..(128): NCBI GI NO: 18417157 NR Description: beta-expansin pollen allergen protein
  misc_feature (1)..(128): NCBI GI NO: 21592834 NR Description: putative beta-expansin/allergen protein
  misc_feature (1)..(111): NCBI GI NO: 7484871 NR Description: cim1 protein homolog F26K10
  misc_feature (1)..(106): NCBI GI NO: 20138423 NR Description: Putative beta-expansin 2 precursor
  misc_feature (1)..(106): NCBI GI NO: 25404942 NR Description: protein F1E22.6 [imported] - Arabidopsis thaliana
  misc_feature (1)..(106): NCBI GI NO: 30697231 NR Description: beta-expansin, putative (EXBP2)
MAVAGAGGRLRDRGQLSVVYRRTACKYGGKNIAFRVNEGSTNFWLSLLVEFEDGEGDIGSMQIKQANSVEWLDMRHVWGATWCLVRGPLVGPFSVRLTTLSARKTLTGPRRDPQELDAQGHLHLAPQLPAVSLGLGRGRDPPRRLGPTFYRPRTLPCGPVAKRGISQSRVFFFFFPCMQMQATFVWFGFYLIVVVA

SEQ ID NO: 27598 - protein, 136 aa, Zea mays subsp. mays
  peptide (1)..(136): Ceres Seq. ID no. 12405570
  misc_feature (1)..(47): NCBI GI NO: 38346623 NR Description: OSJNBa0074L08.17
  misc_feature (1)..(47): NCBI GI NO: 11357194 NR Description: beta-expansin
  misc_feature (1)..(47): NCBI GI NO: 15225423 NR Description: beta-expansin pollen allergen protein
  misc_feature (1)..(68): NCBI GI NO: 18417157 NR Description: beta-expansin pollen allergen protein
  misc_feature (1)..(68): NCBI GI NO: 21592834 NR Description: putative beta-expansin/allergen protein
  misc_feature (1)..(51): NCBI GI NO: 7484871 NR Description: cim1 protein homolog F26K10
  misc_feature (1)..(46): NCBI GI NO: 20138423 NR Description: Putative beta-expansin 2 precursor
  misc_feature (1)..(46): NCBI GI NO: 25404942 NR Description: protein F1E22.6 [imported] - Arabidopsis thaliana
  misc_feature (1)..(46): NCBI GI NO: 30697231 NR Description: beta-expansin, putative (EXBP2)
  misc_feature (1)..(46): NCBI GI NO: 1076486 NR Description: cim1 protein - soybean
MQIKQANSVEWLDMRHVWGATWCLVRGPLVGPFSVRLTTLSARKTLTGPRRDPQELDAQGHLHLAPQLPAVSLGLGRGRDPPRRLGPTFYRPRTLPCGPVAKRGISQSRVFFFFFPCMQMQATFVWFGFYLIVVVA

SEQ ID NO: 27599 - DNA, 1774 bp, Zea mays subsp. mays
  misc_feature (1)..(1774): Ceres Seq. ID no. 12409287
aacgcctccgctttcattcttctcttcccctcggcttcgagggttgtttttatttctttctttcctttttccgttttttattttatttttttcttttttcgttccttttctcgttccccccgttggggttttgagctccgacgaaccctaataatcgccggggaccggcggacgatcgcccgccggcatgcaccatcagcagcggatgaagcaggcggcggcggccgcggccgcggcgcagcagcagcagctgatgcagcaggcactgctcctgcagcagcagcagcagtcgcaggcgcagccgccctttttccccgggcaccacccgcaccccggcctcctcgccgcaccacagatagagcccatagtcagtggaaacctgcctcctgggtttgattcaagtacatgccgcagcgtgtatgttggcaatatccatcttcaagtgacggacacagtactgcaggaagtcttccaaagcattggtccagtagaagggtgcaagctcatcagaaaagaaaagtcatcctttggtttcattgactactatgaccgcagatatgctgcactggcaattttatctctcaatggcagacaactgtatggtcagccgattaaagtcaattgggcatatacaagtactccgagggaggacacatcaggtcattttaatatttttgttggggatctttgcccggaagtcactgatgctactttgtttgcatttttctctggatactctacttgctcagatgctagggttatgtgggaccagaaaacaggacgatccagagggtttggttttgtttctttcaggaaccagcaggatgctcaaagtgcgataaatgacttgaatgggaagtggcttgggaaccgtcaaattcgttgcaattgggcaacgaaaggtgctaatgctggtgaagagaaacaaattctggacactaaggttgacctgtcaaatggttcatcagaatctggaaaagagaatccaaatgatgatggtcctgaaaataaccctcagtttactactgtttatgttggcaatcttcctcacgaggctaccatgaatgatgtgcacctgtttttccattcactgggggctggttcaattgaggaagtccgtgtaactcgtgataaaggctttggctttgtgaggtacagcacccatgaggaggctgcattggcaattcagatgggtaatggccaacttattggcgggaggcagataaagtgttcctggggaagcaagccgactccacaagggacagcatccttgcctctgcctcccccagcactggcaccattctccactggagtgtcggccaccgacttgctggcctaccagcgcctgactctgagcaagatggcctcgaacccagccctaatgggtcagcacgccttgaagcaggtcgctgcattggggattggcggcggagccagccagtccatctatgatggcggcttccagggcatcaatactgccaccagcacaacttccgtccagcagcagcagcagctcatgtactactagagtactactactccatgaggcacccagctacctatcccttcaagaggaaggcgaggatgaatggatgatgccccttactatacccctatacatatagtagatgaagtcattactaggacctttttttccctaatctttttaagacccatctaagtaacatgtcctgtctatgctagctatataattgtgtatttctggatacataaaggcaaggttcttagtagtataatcttctgtgtttgaccg

SEQ ID NO: 27600 - protein, 446 aa, Zea mays subsp. mays
  peptide (1)..(446): Ceres Seq. ID no. 12409288
  misc_feature (77)..(137): Pfam Name: a.k.a. RRM, RBD, or RNP domain Pfam Description: RNA recognition motif.
  misc_feature (55)..(349): NCBI GI NO: 23928438 NR Description: putative oligouridylate binding protein [Zea mays]
  misc_feature (343)..(446): NCBI GI NO: 23928438 NR Description: putative oligouridylate binding protein [Zea mays]
  misc_feature (1)..(57): NCBI GI NO: 23928438 NR Description: putative oligouridylate binding protein [Zea mays]
  misc_feature (3)..(347): NCBI GI NO: 22208507 NR Description: putative oligouridylate binding protein
  misc_feature (348)..(446): NCBI GI NO: 22208507 NR Description: putative oligouridylate binding protein
  misc_feature (188)..(429): NCBI GI NO: 4680340 NR Description: putative nucleolysin [Oryza sativa subsp. indica]
  misc_feature (1)..(137): NCBI GI NO: 4680340 NR Description: putative nucleolysin [Oryza sativa subsp. indica]
  misc_feature (188)..(429): NCBI GI NO: 4680498 NR Description: TIA-1 related protein [Oryza sativa]
  misc_feature (57)..(137): NCBI GI NO: 4680498 NR Description: TIA-1 related protein [Oryza sativa]
  misc_feature (18)..(446): NCBI GI NO: 23237933 NR Description: putative oligouridylate binding protein
MHHQQRMKQAAAAAAAAQQQQLMQQALLLQQQQQSQAQPPFFPGHHPHPGLLAAPQIEPIVSGNLPPGFDSSTCRSVYVGNIHLQVTDTVLQEVFQSIGPVEGCKLIRKEKSSFGFIDYYDRRYAALAILSLNGRQLYGQPIKVNWAYTSTPREDTSGHFNIFVGDLCPEVTDATLFAFFSGYSTCSDARVMWDQKTGRSRGFGFVSFRNQQDAQSAINDLNGKWLGNRQIRCNWATKGANAGEEKQILDTKVDLSNGSSESGKENPNDDGPENNPQFTTVYVGNLPHEATMNDVHLFFHSLGAGSIEEVRVTRDKGFGFVRYSTHEEAALAIQMGNGQLIGGRQIKCSWGSKPTPQGTASLPLPPPALAPFSTGVSATDLLAYQRLTLSKMASNPALMGQHALKQVAALGIGGGASQSIYDGGFQGINTATSTTSVQQQQQLMYY

SEQ ID NO: 27601 - protein, 440 aa, Zea mays subsp. mays
  peptide (1)..(440): Ceres Seq. ID no. 12409289
  misc_feature (71)..(131): Pfam Name: a.k.a. RRM, RBD, or RNP domain Pfam Description: RNA recognition motif.
  misc_feature (49)..(343): NCBI GI NO: 23928438 NR Description: putative oligouridylate binding protein [Zea mays]
  misc_feature (337)..(440): NCBI GI NO: 23928438 NR Description: putative oligouridylate binding protein [Zea mays]
  misc_feature (1)..(51): NCBI GI NO: 23928438 NR Description: putative oligouridylate binding protein [Zea mays]
  misc_feature (1)..(341): NCBI GI NO: 22208507 NR Description: putative oligouridylate binding protein
  misc_feature (342)..(440): NCBI GI NO: 22208507 NR Description: putative oligouridylate binding protein
  misc_feature (182)..(423): NCBI GI NO: 4680340 NR Description: putative nucleolysin [Oryza sativa subsp. indica]
  misc_feature (1)..(131): NCBI GI NO: 4680340 NR Description: putative nucleolysin [Oryza sativa subsp. indica]
  misc_feature (182)..(423): NCBI GI NO: 4680498 NR Description: TIA-1 related protein [Oryza sativa]
  misc_feature (51)..(131): NCBI GI NO: 4680498 NR Description: TIA-1 related protein [Oryza sativa]
  misc_feature (12)..(440): NCBI GI NO: 23237933 NR Description: putative oligouridylate binding protein
MKQAAAAAAAAQQQQLMQQALLLQQQQQSQAQPPFFPGHHPHPGLLAAPQIEPIVSGNLPPGFDSSTCRSVYVGNIHLQVTDTVLQEVFQSIGPVEGCKLIRKEKSSFGFIDYYDRRYAALAILSLNGRQLYGQPIKVNWAYTSTPREDTSGHFNIFVGDLCPEVTDATLFAFFSGYSTCSDARVMWDQKTGRSRGFGFVSFRNQQDAQSAINDLNGKWLGNRQIRCNWATKGANAGEEKQILDTKVDLSNGSSESGKENPNDDGPENNPQFTTVYVGNLPHEATMNDVHLFFHSLGAGSIEEVRVTRDKGFGFVRYSTHEEAALAIQMGNGQLIGGRQIKCSWGSKPTPQGTASLPLPPPALAPFSTGVSATDLLAYQRLTLSKMASNPALMGQHALKQVAALGIGGGASQSIYDGGFQGINTATSTTSVQQQQQLMYY

SEQ ID NO: 27602 - protein, 424 aa, Zea mays subsp. mays
  peptide (1)..(424): Ceres Seq. ID no. 12409290
  misc_feature (55)..(115): Pfam Name: a.k.a. RRM, RBD, or RNP domain Pfam Description: RNA recognition motif.
  misc_feature (33)..(327): NCBI GI NO: 23928438 NR Description: putative oligouridylate binding protein [Zea mays]
  misc_feature (321)..(424): NCBI GI NO: 23928438 NR Description: putative oligouridylate binding protein [Zea mays]
  misc_feature (1)..(35): NCBI GI NO: 23928438 NR Description: putative oligouridylate binding protein [Zea mays]
  misc_feature (1)..(325): NCBI GI NO: 22208507 NR Description: putative oligouridylate binding protein
  misc_feature (326)..(424): NCBI GI NO: 22208507 NR Description: putative oligouridylate binding protein
  misc_feature (166)..(407): NCBI GI NO: 4680340 NR Description: putative nucleolysin [Oryza sativa subsp. indica]
  misc_feature (1)..(115): NCBI GI NO: 4680340 NR Description: putative nucleolysin [Oryza sativa subsp. indica]
  misc_feature (166)..(407): NCBI GI NO: 4680498 NR Description: TIA-1 related protein [Oryza sativa]
  misc_feature (35)..(115): NCBI GI NO: 4680498 NR Description: TIA-1 related protein [Oryza sativa]
  misc_feature (1)..(424): NCBI GI NO: 23237933 NR Description: putative oligouridylate binding protein
MQQALLLQQQQQSQAQPPFFPGHHPHPGLLAAPQIEPIVSGNLPPGFDSSTCRSVYVGNIHLQVTDTVLQEVFQSIGPVEGCKLIRKEKSSFGFIDYYDRRYAALAILSLNGRQLYGQPIKVNWAYTSTPREDTSGHFNIFVGDLCPEVTDATLFAFFSGYSTCSDARVMWDQKTGRSRGFGFVSFRNQQDAQSAINDLNGKWLGNRQIRCNWATKGANAGEEKQILDTKVDLSNGSSESGKENPNDDGPENNPQFTTVYVGNLPHEATMNDVHLFFHSLGAGSIEEVRVTRDKGFGFVRYSTHEEAALAIQMGNGQLIGGRQIKCSWGSKPTPQGTASLPLPPPALAPFSTGVSATDLLAYQRLTLSKMASNPALMGQHALKQVAALGIGGGASQSIYDGGFQGINTATSTTSVQQQQQLMYY

SEQ ID NO: 27603 - DNA, 1320 bp, Zea mays subsp. mays
  misc_feature (1)..(1320): Ceres Seq. ID no. 12409283
agaaaggattctatactaatgcttgagtgtcgccttgttcaacttctcaaccaaggcagagagagttttcatccggcagccgccgagcctgagatccctgcaccgccgcccgccggcccgccggaatggagttcgccttagtcgagagtgaatcgttctcgccttcctgccccacgcttaccatgccagcgctgtcgattggcaacgtggggcagctcgccgtcgaccttctcatatcctcgtcgcgggcgaggcgggtggcctacctcgacgagccctccgtgctgccctgcgccggcaacgacgccttcggccctgacgccgtcggcgacctcgcactcgctctcgaagcttatgaatctacatctcataagctggctttcattcagcaaaggtctccagttactacaggaatgatggtttcatttgcaaaaaatgttgctgatttcataagcagcatcgggaaggaccatattgtcattatatcaagtttagattctggaaagaggagagtgattgatgcatccagtgacatgcaggtgtattacctttcaagttgcaatgaagatggttctgatccagaatatgagaaattggggtggaaaaagcttgaggattacgatccatctcagaaacgttggaattatcttgctagcctggttaagggtggtggtctttcagaagatatggatgatgatactgatgagatgacaataaatgattactatgcaagcttgccatttgcagcactattctctgcctgcaaggctaaaggcttgaaagtttcttgtgtcctgtgctactgctcggaaggcgacaacatgccagaatctttccagttagctgaagcaatatgcaaacttctaggtcatggccctgagaaattccatggaaatgggtcaaatgggtggatcgttcccttgtcatggaaatcagtttatggaccaccacctgatatgtctatcttttagtgttgaattatgatctggtgaagttgccatcacggaaaatgctgagtagaatcgaggatgttgaactcttcatttagacagagtaccagaagtatccaggaaggtgagttgcagacgtttgtggtcagttggtaaaggattactgaacactcaaggatggaacttctgcaggcaccatgatactgaacccttaaatgcatgaatcagaatatttttgcaacttgtactgtggctactgagagtcagatctttgtcaactcaggtctgctagggtgcttaccatcatactgccgtttccattctaaccatggaattccaagcttctcgtctgccgttttggcagttttgc

SEQ ID NO: 27604 - protein, 281 aa, Zea mays subsp. mays
  peptide (1)..(281): Ceres Seq. ID no. 12409284
  misc_feature (1)..(281): NCBI GI NO: 18402055 NR Description: expressed protein; protein id: At3g18940
  misc_feature (1)..(281): NCBI GI NO: 21594933 NR Description: unknown [Arabidopsis thaliana]
  misc_feature (101)..(281): NCBI GI NO: 30794081 NR Description: unknown protein [Arabidopsis thaliana]
  misc_feature (17)..(163): NCBI GI NO: 37589726 NR Description: Unknown (protein for MGC:73278) [Danio rerio]
  misc_feature (209)..(276): NCBI GI NO: 37589726 NR Description: Unknown (protein for MGC:73278) [Danio rerio]
  misc_feature (17)..(192): NCBI GI NO: 19527372 NR Description: Clast3 protein; expressed sequence AW545363
  misc_feature (17)..(148): NCBI GI NO: 28829982 NR Description: similar to Arabidopsis thaliana (Mouse-ear cress)
  misc_feature (17)..(192): NCBI GI NO: 22726189 NR Description: hepatocellular carcinoma susceptibility protein
  misc_feature (17)..(192): NCBI GI NO: 27680767 NR Description: similar to Clast3 protein
  misc_feature (12)..(163): NCBI GI NO: 6841170 NR Description: HSPC260 [Homo sapiens]
MEFALVESESFSPSCPTLTMPALSIGNVGQLAVDLLISSSRARRVAYLDEPSVLPCAGNDAFGPDAVGDLALALEAYESTSHKLAFIQQRSPVTTGMMVSFAKNVADFISSIGKDHIVIISSLDSGKRRVIDASSDMQVYYLSSCNEDGSDPEYEKLGWKKLEDYDPSQKRWNYLASLVKGGGLSEDMDDDTDEMTINDYYASLPFAALFSACKAKGLKVSCVLCYCSEGDNMPESFQLAEAICKLLGHGPEKFHGNGSNGWIVPLSWKSVYGPPPDMSIF

SEQ ID NO: 27605 - protein, 262 aa, Zea mays subsp. mays
  peptide (1)..(262): Ceres Seq. ID no. 12409285
  misc_feature (1)..(262): NCBI GI NO: 18402055 NR Description: expressed protein; protein id: At3g18940
  misc_feature (1)..(262): NCBI GI NO: 21594933 NR Description: unknown [Arabidopsis thaliana]
  misc_feature (82)..(262): NCBI GI NO: 30794081 NR Description: unknown protein [Arabidopsis thaliana]
  misc_feature (1)..(144): NCBI GI NO: 37589726 NR Description: Unknown (protein for MGC:73278) [Danio rerio]
  misc_feature (190)..(257): NCBI GI NO: 37589726 NR Description: Unknown (protein for MGC:73278) [Danio rerio]
  misc_feature (1)..(173): NCBI GI NO: 19527372 NR Description: Clast3 protein; expressed sequence AW545363
  misc_feature (1)..(129): NCBI GI NO: 28829982 NR Description: similar to Arabidopsis thaliana (Mouse-ear cress)
  misc_feature (1)..(173): NCBI GI NO: 22726189 NR Description: hepatocellular carcinoma susceptibility protein
  misc_feature (1)..(173): NCBI GI NO: 27680767 NR Description: similar to Clast3 protein
  misc_feature (1)..(144): NCBI GI NO: 6841170 NR Description: HSPC260 [Homo sapiens]
MPALSIGNVGQLAVDLLISSSRARRVAYLDEPSVLPCAGNDAFGPDAVGDLALALEAYESTSHKLAFIQQRSPVTTGMMVSFAKNVADFISSIGKDHIVIISSLDSGKRRVIDASSDMQVYYLSSCNEDGSDPEYEKLGWKKLEDYDPSQKRWNYLASLVKGGGLSEDMDDDTDEMTINDYYASLPFAALFSACKAKGLKVSCVLCYCSEGDNMPESFQLAEAICKLLGHGPEKFHGNGSNGWIVPLSWKSVYGPPPDMSIF

SEQ ID NO: 27606 - protein, 185 aa, Zea mays subsp. mays
  peptide (1)..(185): Ceres Seq. ID no. 12409286
  misc_feature (1)..(185): NCBI GI NO: 18402055 NR Description: expressed protein; protein id: At3g18940
  misc_feature (1)..(185): NCBI GI NO: 21594933 NR Description: unknown [Arabidopsis thaliana]
  misc_feature (5)..(185): NCBI GI NO: 30794081 NR Description: unknown protein [Arabidopsis thaliana]
  misc_feature (1)..(67): NCBI GI NO: 37589726 NR Description: Unknown (protein for MGC:73278) [Danio rerio]
  misc_feature (113)..(180): NCBI GI NO: 37589726 NR Description: Unknown (protein for MGC:73278) [Danio rerio]
  misc_feature (1)..(96): NCBI GI NO: 19527372 NR Description: Clast3 protein; expressed sequence AW545363
  misc_feature (1)..(52): NCBI GI NO: 28829982 NR Description: similar to Arabidopsis thaliana (Mouse-ear cress)
  misc_feature (1)..(96): NCBI GI NO: 22726189 NR Description: hepatocellular carcinoma susceptibility protein
  misc_feature (1)..(96): NCBI GI NO: 27680767 NR Description: similar to Clast3 protein
  misc_feature (1)..(67): NCBI GI NO: 6841170 NR Description: HSPC260 [Homo sapiens]
MMVSFAKNVADFISSIGKDHIVIISSLDSGKRRVIDASSDMQVYYLSSCNEDGSDPEYEKLGWKKLEDYDPSQKRWNYLASLVKGGGLSEDMDDDTDEMTINDYYASLPFAALFSACKAKGLKVSCVLCYCSEGDNMPESFQLAEAICKLLGHGPEKFHGNGSNGWIVPLSWKSVYGPPPDMSIF

SEQ ID NO: 27607 - DNA, 1518 bp, Zea mays subsp. mays
  misc_feature (1)..(1518): Ceres Seq. ID no. 12409279
ttttttcgcctataattactcttccccgtgcgccctcgcgaggtcgaacccccaaggcgaggcgacgaaaccctcgccagtccccaactcgaacctcagtcaggcggcgtgagggagggagagttcgaggaccgaggcggcgtcgggcgagatgaagcttaacgtcaagaccctcaagggcaccaacttcgagatcgaggcgagccccgatgcgtcggttgctgacgtgaagaggatcattgagaccactcagggtcagagtacctaccgggcggaccagcaaatgcttatataccaagggaaaattctcaaggatgagaccactttggaaagcaacggagttgctgagaacagcttccttgttataatgttgtccaaggctaaggcatcgtcgagtggagcttctaccactactgctgcaaaagctcctgcaactctggcccaacctgctgcccctgtgccccctgctgcatcagttgcaagaacaccaacacaggctcctgttgccacagctgaaacggcacctccaagtgcccaacctcaggctgctccagctgctacggttgctgctactgatgatgctgatgtgtacagtcaggcagcttcaaaccttgtatctggcaacagtctagaacagactatccaacaaattcttgacatgggtggtggtacatgggaacgtgatacagttgttcgtgctctacgtgctgcatacaataaccctgagagagctatagactacctgtattctggaattcctgagaatgtggaggctcagcctgttgcccgagcacctgctgctggccaacaaacaaatcagcaggccgcatcacccgctcagccagcagttgcattgccagtgcagccatcacctgcctctgcagggcctaatgcaaatcctttgaacctttttcctcagggtgttccaagtggtgggtccaacccaggcgttattccaggtgctggatctggtgcccttgatgccttgcgacagcttccacagtttcaagcactccttcagttagtccaggctaatcctcaaatcttgcagccaatgcttcaagagctaggtaaacaaaacccacaaattctgcggttgattcaggaaaatcaagctgagtttctccgcttggtgaatgaatctcctgagggtggtcctggagggaacatactaggtcaactggcagctgctgtgccacaaacgctgacagttaccccagaggaacgggaggctatccagcggctcgagggaatggggttcaaccgtgagcttgtgctagaagttttctttgcatgcaacaaggacgaagagcttacagccaactaccttctggatcatggccatgagtttgacgagcagcagcaatagacgtggggtggatggaggaaaccgaggcagttgcagaacagcgagtgtcgttcttatgctatgctgctgactatcttttatttccatatatatttgttcggaatgctttctaagtacatattaattcaatatcaagcgttataccgtgc

SEQ ID NO: 27608 - protein, 405 aa, Zea mays subsp. mays
  peptide (1)..(405): Ceres Seq. ID no. 12409280
  misc_feature (1)..(78): Pfam Name: Pfam Description:  Ubiquitin family
  misc_feature (1)..(402): NCBI GI NO: 5640111 NR Description: RAD23 protein [Lycopersicon esculentum]
  misc_feature (1)..(403): NCBI GI NO: 15240922 NR Description: DNA repair protein RAD23 homolog
  misc_feature (1)..(403): NCBI GI NO: 14335004 NR Description: unknown protein [Arabidopsis thaliana]
  misc_feature (1)..(402): NCBI GI NO: 38175472 NR Description: putative osRAD23
  misc_feature (1)..(402): NCBI GI NO: 7446462 NR Description: RAD23 protein homolog - rice
  misc_feature (1)..(351): NCBI GI NO: 7446459 NR Description: RAD23 protein, isoform I - carrot
  misc_feature (1)..(402): NCBI GI NO: 15232924 NR Description: putative RAD23; protein id: At3g02540
  misc_feature (1)..(402): NCBI GI NO: 7446460 NR Description: RAD23 protein, isoform II - carrot
  misc_feature (51)..(402): NCBI GI NO: 30409726 NR Description: RAD23-like protein [Arabidopsis thaliana]
  misc_feature (1)..(327): NCBI GI NO: 30409730 NR Description: RAD23-like protein [Arabidopsis thaliana]
MKLNVKTLKGTNFEIEASPDASVADVKRIIETTQGQSTYRADQQMLIYQGKILKDETTLESNGVAENSFLVIMLSKAKASSSGASTTTAAKAPATLAQPAAPVPPAASVARTPTQAPVATAETAPPSAQPQAAPAATVAATDDADVYSQAASNLVSGNSLEQTIQQILDMGGGTWERDTVVRALRAAYNNPERAIDYLYSGIPENVEAQPVARAPAAGQQTNQQAASPAQPAVALPVQPSPASAGPNANPLNLFPQGVPSGGSNPGVIPGAGSGALDALRQLPQFQALLQLVQANPQILQPMLQELGKQNPQILRLIQENQAEFLRLVNESPEGGPGGNILGQLAAAVPQTLTVTPEEREAIQRLEGMGFNRELVLEVFFACNKDEELTANYLLDHGHEFDEQQQ

SEQ ID NO: 27609 - protein, 361 aa, Zea mays subsp. mays
  peptide (1)..(361): Ceres Seq. ID no. 12409281
  misc_feature (115)..(157): Pfam Name: Pfam Description:  UBA/TS-N domain
  misc_feature (1)..(358): NCBI GI NO: 5640111 NR Description: RAD23 protein [Lycopersicon esculentum]
  misc_feature (1)..(359): NCBI GI NO: 15240922 NR Description: DNA repair protein RAD23 homolog
  misc_feature (1)..(359): NCBI GI NO: 14335004 NR Description: unknown protein [Arabidopsis thaliana]
  misc_feature (1)..(358): NCBI GI NO: 38175472 NR Description: putative osRAD23
  misc_feature (1)..(358): NCBI GI NO: 7446462 NR Description: RAD23 protein homolog - rice
  misc_feature (1)..(307): NCBI GI NO: 7446459 NR Description: RAD23 protein, isoform I - carrot
  misc_feature (1)..(358): NCBI GI NO: 15232924 NR Description: putative RAD23; protein id: At3g02540
  misc_feature (1)..(358): NCBI GI NO: 7446460 NR Description: RAD23 protein, isoform II - carrot
  misc_feature (7)..(358): NCBI GI NO: 30409726 NR Description: RAD23-like protein [Arabidopsis thaliana]
  misc_feature (1)..(283): NCBI GI NO: 30409730 NR Description: RAD23-like protein [Arabidopsis thaliana]
MLIYQGKILKDETTLESNGVAENSFLVIMLSKAKASSSGASTTTAAKAPATLAQPAAPVPPAASVARTPTQAPVATAETAPPSAQPQAAPAATVAATDDADVYSQAASNLVSGNSLEQTIQQILDMGGGTWERDTVVRALRAAYNNPERAIDYLYSGIPENVEAQPVARAPAAGQQTNQQAASPAQPAVALPVQPSPASAGPNANPLNLFPQGVPSGGSNPGVIPGAGSGALDALRQLPQFQALLQLVQANPQILQPMLQELGKQNPQILRLIQENQAEFLRLVNESPEGGPGGNILGQLAAAVPQTLTVTPEEREAIQRLEGMGFNRELVLEVFFACNKDEELTANYLLDHGHEFDEQQQ

SEQ ID NO: 27610 - protein, 333 aa, Zea mays subsp. mays
  peptide (1)..(333): Ceres Seq. ID no. 12409282
  misc_feature (87)..(129): Pfam Name: Pfam Description:  UBA/TS-N domain
  misc_feature (1)..(330): NCBI GI NO: 5640111 NR Description: RAD23 protein [Lycopersicon esculentum]
  misc_feature (1)..(331): NCBI GI NO: 15240922 NR Description: DNA repair protein RAD23 homolog
  misc_feature (1)..(331): NCBI GI NO: 14335004 NR Description: unknown protein [Arabidopsis thaliana]
  misc_feature (1)..(330): NCBI GI NO: 38175472 NR Description: putative osRAD23
  misc_feature (1)..(330): NCBI GI NO: 7446462 NR Description: RAD23 protein homolog - rice
  misc_feature (1)..(279): NCBI GI NO: 7446459 NR Description: RAD23 protein, isoform I - carrot
  misc_feature (1)..(330): NCBI GI NO: 15232924 NR Description: putative RAD23; protein id: At3g02540
  misc_feature (1)..(330): NCBI GI NO: 7446460 NR Description: RAD23 protein, isoform II - carrot
  misc_feature (1)..(330): NCBI GI NO: 30409726 NR Description: RAD23-like protein [Arabidopsis thaliana]
  misc_feature (1)..(255): NCBI GI NO: 30409730 NR Description: RAD23-like protein [Arabidopsis thaliana]
MLSKAKASSSGASTTTAAKAPATLAQPAAPVPPAASVARTPTQAPVATAETAPPSAQPQAAPAATVAATDDADVYSQAASNLVSGNSLEQTIQQILDMGGGTWERDTVVRALRAAYNNPERAIDYLYSGIPENVEAQPVARAPAAGQQTNQQAASPAQPAVALPVQPSPASAGPNANPLNLFPQGVPSGGSNPGVIPGAGSGALDALRQLPQFQALLQLVQANPQILQPMLQELGKQNPQILRLIQENQAEFLRLVNESPEGGPGGNILGQLAAAVPQTLTVTPEEREAIQRLEGMGFNRELVLEVFFACNKDEELTANYLLDHGHEFDEQQQ

SEQ ID NO: 27611 - DNA, 1676 bp, Zea mays subsp. mays
  misc_feature (1)..(1676): Ceres Seq. ID no. 12359529
gtacaagtacaaggatacagccgcaggcccgcagaggaagaggagagcctactctcctgccatggccgcgccgagtccgctcccccgcttcctgatactcctgctcgccgtaacctcctccgcgtttgccgccgccgcggcaaccggggctccggtggtgggggaggactacgtccgtccgccgccggcgcggtgccaccgcaaggcactccttagcctcttcccttggagcaagaaggaggagtccgccgcctcctccgatccgcagcaggtgcacatttctctagctggagaaaagcacatgagaataacatgggttaccaatgataactctgtcccatctgtggtggactatggaactaaagaaagtacatacacaatgaaatctcaaggagaaagcacatcctacagctacttattgtatagttcaggaaaaattcatcatgttgtcatcggacctcttgaagataacactatttattactaccgatgtggagggcagggtccagaattccaatttaagaccccgccctcccaatttcctttgtcattggctgttgttggtgatcttggtcagactagttggacaacatcaaccctgaatcacattaagcagtgtgagcatgatatgcttttactccctggtgatctatcttatgctgattatatgcaacacttgtgggattccttcggcacattggtggagccacttgctagcaaccggccttggatggtgacagaaggcaaccatgagaaggagcacattccattttttgagtcaggatttcaatcttataatgcacgatggaaaatgccttatgaagagagcggatctagatcaaatttgtactactcttttgaagttgctggtgcacacatcataatgctaggttcatacacagattatgatgatagctcagatcagtatgcttggctaaaggctgatcttgccaaggttgatagaaagaggacaccctggctcattgtgttgttgcacgtaccatggtacaatagcaattgggctcatcagggtgaaggcgacagtatgatggcttcaatggagcctttgctgtacgctgctcatgtggatatggtaatagcaggtcatgtccatgcttatgaacgtgcggagcgagtctacaattccagacctgatccttgtggcgctgtccacataactatcggcgacggtgggaaccgtgaaggcttggcccgcaggtaccgtaacccgaagccagcgtggtcggtcttcagggaagcgagctttgggcacggcgagctaaagatcgtgaactccacccatgcccactggacctggcacagaaacgacgacgaagagccggtgagaaccgatgacgtgtggataaactctcttgctggttcagggtgcatccaggagggcagccgtgaccgtgagtcgaggaagatcctgatgtctccttgatgcttagcagtatagcttgggcctgcgatgtactgtgtatataatgcgtgctacttgataatctaacacctagtaaaagttaatgcgtcgtgctgcttgcctgcgtgtatactggagactggtttgatctggcgcgtttgctgctcttgttgtgttgtaccactatggatgtttgtagcaaagtgacatacgacggtgttgtaatggactgaagatgaatagatgatgttcc

SEQ ID NO: 27612 - protein, 480 aa, Zea mays subsp. mays
  peptide (1)..(480): Ceres Seq. ID no. 12359530
  misc_feature (182)..(373): Pfam Name: Pfam Description:  Calcineurin-like phosphoesterase
  misc_feature (21)..(480): NCBI GI NO: 34896986 NR Description: putative purple acid phosphatase [Oryza sativa]
  misc_feature (33)..(480): NCBI GI NO: 22331208 NR Description: purple acid phosphatase, putative
  misc_feature (33)..(480): NCBI GI NO: 25229112 NR Description: putative purple acid phosphatase
  misc_feature (84)..(472): NCBI GI NO: 22331756 NR Description: purple acid phosphatase-like protein
  misc_feature (84)..(472): NCBI GI NO: 11358734 NR Description: acid phosphatase (EC 3
  misc_feature (35)..(468): NCBI GI NO: 21741737 NR Description: OSJNBa0073L04.17
  misc_feature (88)..(457): NCBI GI NO: 15231688 NR Description:
  misc_feature (88)..(463): NCBI GI NO: 15231682 NR Description:
  misc_feature (88)..(375): NCBI GI NO: 30693705 NR Description: purple acid phosphatase (PAP20)
  misc_feature (88)..(453): NCBI GI NO: 19879917 NR Description: acid phosphatase [Oryza sativa]
YKYKDTAAGPQRKRRAYSPAMAAPSPLPRFLILLLAVTSSAFAAAAATGAPVVGEDYVRPPPARCHRKALLSLFPWSKKEESAASSDPQQVHISLAGEKHMRITWVTNDNSVPSVVDYGTKESTYTMKSQGESTSYSYLLYSSGKIHHVVIGPLEDNTIYYYRCGGQGPEFQFKTPPSQFPLSLAVVGDLGQTSWTTSTLNHIKQCEHDMLLLPGDLSYADYMQHLWDSFGTLVEPLASNRPWMVTEGNHEKEHIPFFESGFQSYNARWKMPYEESGSRSNLYYSFEVAGAHIIMLGSYTDYDDSSDQYAWLKADLAKVDRKRTPWLIVLLHVPWYNSNWAHQGEGDSMMASMEPLLYAAHVDMVIAGHVHAYERAERVYNSRPDPCGAVHITIGDGGNREGLARRYRNPKPAWSVFREASFGHGELKIVNSTHAHWTWHRNDDEEPVRTDDVWINSLAGSGCIQEGSRDRESRKILMSP

SEQ ID NO: 27613 - protein, 460 aa, Zea mays subsp. mays
  peptide (1)..(460): Ceres Seq. ID no. 12359531
  misc_feature (162)..(353): Pfam Name: Pfam Description:  Calcineurin-like phosphoesterase
  misc_feature (1)..(460): NCBI GI NO: 34896986 NR Description: putative purple acid phosphatase [Oryza sativa]
  misc_feature (13)..(460): NCBI GI NO: 22331208 NR Description: purple acid phosphatase, putative
  misc_feature (13)..(460): NCBI GI NO: 25229112 NR Description: putative purple acid phosphatase
  misc_feature (64)..(452): NCBI GI NO: 22331756 NR Description: purple acid phosphatase-like protein
  misc_feature (64)..(452): NCBI GI NO: 11358734 NR Description: acid phosphatase (EC 3
  misc_feature (15)..(448): NCBI GI NO: 21741737 NR Description: OSJNBa0073L04.17
  misc_feature (68)..(437): NCBI GI NO: 15231688 NR Description:
  misc_feature (68)..(443): NCBI GI NO: 15231682 NR Description:
  misc_feature (68)..(355): NCBI GI NO: 30693705 NR Description: purple acid phosphatase (PAP20)
  misc_feature (68)..(433): NCBI GI NO: 19879917 NR Description: acid phosphatase [Oryza sativa]
MAAPSPLPRFLILLLAVTSSAFAAAAATGAPVVGEDYVRPPPARCHRKALLSLFPWSKKEESAASSDPQQVHISLAGEKHMRITWVTNDNSVPSVVDYGTKESTYTMKSQGESTSYSYLLYSSGKIHHVVIGPLEDNTIYYYRCGGQGPEFQFKTPPSQFPLSLAVVGDLGQTSWTTSTLNHIKQCEHDMLLLPGDLSYADYMQHLWDSFGTLVEPLASNRPWMVTEGNHEKEHIPFFESGFQSYNARWKMPYEESGSRSNLYYSFEVAGAHIIMLGSYTDYDDSSDQYAWLKADLAKVDRKRTPWLIVLLHVPWYNSNWAHQGEGDSMMASMEPLLYAAHVDMVIAGHVHAYERAERVYNSRPDPCGAVHITIGDGGNREGLARRYRNPKPAWSVFREASFGHGELKIVNSTHAHWTWHRNDDEEPVRTDDVWINSLAGSGCIQEGSRDRESRKILMSP

SEQ ID NO: 27614 - protein, 380 aa, Zea mays subsp. mays
  peptide (1)..(380): Ceres Seq. ID no. 12359532
  misc_feature (82)..(273): Pfam Name: Pfam Description:  Calcineurin-like phosphoesterase
  misc_feature (1)..(380): NCBI GI NO: 34896986 NR Description: putative purple acid phosphatase [Oryza sativa]
  misc_feature (1)..(380): NCBI GI NO: 22331208 NR Description: purple acid phosphatase, putative
  misc_feature (1)..(380): NCBI GI NO: 25229112 NR Description: putative purple acid phosphatase
  misc_feature (1)..(372): NCBI GI NO: 22331756 NR Description: purple acid phosphatase-like protein
  misc_feature (1)..(372): NCBI GI NO: 11358734 NR Description: acid phosphatase (EC 3
  misc_feature (1)..(368): NCBI GI NO: 21741737 NR Description: OSJNBa0073L04.17
  misc_feature (1)..(357): NCBI GI NO: 15231688 NR Description:
  misc_feature (1)..(363): NCBI GI NO: 15231682 NR Description:
  misc_feature (1)..(275): NCBI GI NO: 30693705 NR Description: purple acid phosphatase (PAP20)
  misc_feature (1)..(353): NCBI GI NO: 19879917 NR Description: acid phosphatase [Oryza sativa]
MRITWVTNDNSVPSVVDYGTKESTYTMKSQGESTSYSYLLYSSGKIHHVVIGPLEDNTIYYYRCGGQGPEFQFKTPPSQFPLSLAVVGDLGQTSWTTSTLNHIKQCEHDMLLLPGDLSYADYMQHLWDSFGTLVEPLASNRPWMVTEGNHEKEHIPFFESGFQSYNARWKMPYEESGSRSNLYYSFEVAGAHIIMLGSYTDYDDSSDQYAWLKADLAKVDRKRTPWLIVLLHVPWYNSNWAHQGEGDSMMASMEPLLYAAHVDMVIAGHVHAYERAERVYNSRPDPCGAVHITIGDGGNREGLARRYRNPKPAWSVFREASFGHGELKIVNSTHAHWTWHRNDDEEPVRTDDVWINSLAGSGCIQEGSRDRESRKILMSP

SEQ ID NO: 27615 - DNA, 1551 bp, Zea mays subsp. mays
  misc_feature (1)..(1551): Ceres Seq. ID no. 12344145
attcctactccgagtcgccacctgcatttgtctatcggtcaggagcatggaggggagacggctttcacgccagcagttgcgctcgctaccggacgccgcgtccttctcgccggaagtcgcggccagcccggggctcgtcggctccggccagttgggtctcggtctctcggcggcgttcgagactctgccgccgattttggtagaagtgaatggctttacaaggacactgattttgaataggccaaagcagttaaatgcactctcctcgaccatgattatgggactcttgaggtgtttcactgcttatgagaaagacgatggagttaaattgttgattatgaagggtaaaggaagagcattttgtgctggaggtgatgttgctgcagttgttcgatctatacataaagacagctggaaatatggtgctgatttcttccgaaatgaatttttgttgaattacataattgcaacttataccaaacctcaggtttctcttcttagtggaatcgtcatgggtggaggtgctggcgtttctttacatggaaggtttagagttgccaccgataacacggtttttgcaatgccagaaacagctctgggtctctttccagatataggggcctcatattttctgtctcggcttcctggattctatggagagtatgttggtcttgctggtgccagattggatggtggggaaatgcttgcatgtggtctggcaactcattttgtccagtcaaatagtctgctatcgctggaagaatcacttaaaaaggtggatacttccaatgcttttgcagtgtgtggtatcatcgatcaatttgctcaacaaccatcactgaaagaaagcagctctttgaataggttggaaatcatcaacaaatgcttttccaaaaggacagtcgaagaaattatatccgctcttgaagtagaggcctcaaattcggcagatgaatgggttgctacaacaatccagtccttgaagaaggcttctcctaccagtctgaaaatctctctgagatcgataagagaagggaggacacaaactgttggggagtgcttgcagcgggaatatagaatggtctgccatgtcatgcgtggtgacttcagcagagacttctttgagggatgcagggctatattgctagataaagatcgaaacccaaagtggatgcctccaaggttggaacaagtgcatgatgaggctgttgaacagtatttctccagaattgatgatccacagtgggaagacttgaacctacctgctagacgctcccacggaagaaatatcgagtccaagctttgatcgaaggtcatgggagaaaggtggaactctggaacggagcctcggtagtggtcagaataacacattattgcacatcatctcaagtttgaagagtctgcagactattgataaaataaaaacatgaatgtgccatataggtcaacttgtatcacagaaagaaactctttgctgtttatacgtggagactggagtcatatgcatttttaaataattataagtaataaaatcgaaaaagaaatcgttgg

SEQ ID NO: 27616 - protein, 434 aa, Zea mays subsp. mays
  peptide (1)..(434): Ceres Seq. ID no. 12344146
  misc_feature (74)..(244): Pfam Name: Pfam Description:  Enoyl-CoA hydratase/isomerase family
  misc_feature (65)..(425): NCBI GI NO: 15239206 NR Description: 3-hydroxyisobutyryl-coenzyme A hydrolase
  misc_feature (65)..(434): NCBI GI NO: 15224549 NR Description: 3-hydroxyisobutyryl-coenzyme A hydrolase
  misc_feature (91)..(423): NCBI GI NO: 6014701 NR Description: enoyl-CoA-hydratase [Avicennia marina]
  misc_feature (65)..(425): NCBI GI NO: 15224539 NR Description: 3-hydroxyisobutyryl-coenzyme A hydrolase
  misc_feature (65)..(323): NCBI GI NO: 30695218 NR Description: enoyl-CoA hydratase/isomerase family
  misc_feature (304)..(423): NCBI GI NO: 30695218 NR Description: enoyl-CoA hydratase/isomerase family
  misc_feature (223)..(434): NCBI GI NO: 37537052 NR Description: putative enoyl-CoA-hydratase
  misc_feature (161)..(423): NCBI GI NO: 2688820 NR Description: enoyl-CoA hydratase [Prunus armeniaca]
  misc_feature (65)..(424): NCBI GI NO: 22329062 NR Description: enoyl-CoA hydratase - like protein
  misc_feature (63)..(421): NCBI GI NO: 30679729 NR Description: 3-hydroxyisobutyryl-coenzyme A hydrolase
FLLRVATCICLSVRSMEGRRLSRQQLRSLPDAASFSPEVAASPGLVGSGQLGLGLSAAFETLPPILVEVNGFTRTLILNRPKQLNALSSTMIMGLLRCFTAYEKDDGVKLLIMKGKGRAFCAGGDVAAVVRSIHKDSWKYGADFFRNEFLLNYIIATYTKPQVSLLSGIVMGGGAGVSLHGRFRVATDNTVFAMPETALGLFPDIGASYFLSRLPGFYGEYVGLAGARLDGGEMLACGLATHFVQSNSLLSLEESLKKVDTSNAFAVCGIIDQFAQQPSLKESSSLNRLEIINKCFSKRTVEEIISALEVEASNSADEWVATTIQSLKKASPTSLKISLRSIREGRTQTVGECLQREYRMVCHVMRGDFSRDFFEGCRAILLDKDRNPKWMPPRLEQVHDEAVEQYFSRIDDPQWEDLNLPARRSHGRNIESKL

SEQ ID NO: 27617 - protein, 419 aa, Zea mays subsp. mays
  peptide (1)..(419): Ceres Seq. ID no. 12344147
  misc_feature (59)..(229): Pfam Name: Pfam Description:  Enoyl-CoA hydratase/isomerase family
  misc_feature (50)..(410): NCBI GI NO: 15239206 NR Description: 3-hydroxyisobutyryl-coenzyme A hydrolase
  misc_feature (50)..(419): NCBI GI NO: 15224549 NR Description: 3-hydroxyisobutyryl-coenzyme A hydrolase
  misc_feature (76)..(408): NCBI GI NO: 6014701 NR Description: enoyl-CoA-hydratase [Avicennia marina]
  misc_feature (50)..(410): NCBI GI NO: 15224539 NR Description: 3-hydroxyisobutyryl-coenzyme A hydrolase
  misc_feature (50)..(308): NCBI GI NO: 30695218 NR Description: enoyl-CoA hydratase/isomerase family
  misc_feature (289)..(408): NCBI GI NO: 30695218 NR Description: enoyl-CoA hydratase/isomerase family
  misc_feature (208)..(419): NCBI GI NO: 37537052 NR Description: putative enoyl-CoA-hydratase
  misc_feature (146)..(408): NCBI GI NO: 2688820 NR Description: enoyl-CoA hydratase [Prunus armeniaca]
  misc_feature (50)..(409): NCBI GI NO: 22329062 NR Description: enoyl-CoA hydratase - like protein
  misc_feature (48)..(406): NCBI GI NO: 30679729 NR Description: 3-hydroxyisobutyryl-coenzyme A hydrolase
MEGRRLSRQQLRSLPDAASFSPEVAASPGLVGSGQLGLGLSAAFETLPPILVEVNGFTRTLILNRPKQLNALSSTMIMGLLRCFTAYEKDDGVKLLIMKGKGRAFCAGGDVAAVVRSIHKDSWKYGADFFRNEFLLNYIIATYTKPQVSLLSGIVMGGGAGVSLHGRFRVATDNTVFAMPETALGLFPDIGASYFLSRLPGFYGEYVGLAGARLDGGEMLACGLATHFVQSNSLLSLEESLKKVDTSNAFAVCGIIDQFAQQPSLKESSSLNRLEIINKCFSKRTVEEIISALEVEASNSADEWVATTIQSLKKASPTSLKISLRSIREGRTQTVGECLQREYRMVCHVMRGDFSRDFFEGCRAILLDKDRNPKWMPPRLEQVHDEAVEQYFSRIDDPQWEDLNLPARRSHGRNIESKL

SEQ ID NO: 27618 - protein, 344 aa, Zea mays subsp. mays
  peptide (1)..(344): Ceres Seq. ID no. 12344148
  misc_feature (1)..(154): Pfam Name: Pfam Description:  Enoyl-CoA hydratase/isomerase family
  misc_feature (1)..(335): NCBI GI NO: 15239206 NR Description: 3-hydroxyisobutyryl-coenzyme A hydrolase
  misc_feature (1)..(344): NCBI GI NO: 15224549 NR Description: 3-hydroxyisobutyryl-coenzyme A hydrolase
  misc_feature (1)..(333): NCBI GI NO: 6014701 NR Description: enoyl-CoA-hydratase [Avicennia marina]
  misc_feature (1)..(335): NCBI GI NO: 15224539 NR Description: 3-hydroxyisobutyryl-coenzyme A hydrolase
  misc_feature (1)..(233): NCBI GI NO: 30695218 NR Description: enoyl-CoA hydratase/isomerase family
  misc_feature (214)..(333): NCBI GI NO: 30695218 NR Description: enoyl-CoA hydratase/isomerase family
  misc_feature (133)..(344): NCBI GI NO: 37537052 NR Description: putative enoyl-CoA-hydratase
  misc_feature (71)..(333): NCBI GI NO: 2688820 NR Description: enoyl-CoA hydratase [Prunus armeniaca]
  misc_feature (1)..(334): NCBI GI NO: 22329062 NR Description: enoyl-CoA hydratase - like protein
  misc_feature (1)..(331): NCBI GI NO: 30679729 NR Description: 3-hydroxyisobutyryl-coenzyme A hydrolase
MIMGLLRCFTAYEKDDGVKLLIMKGKGRAFCAGGDVAAVVRSIHKDSWKYGADFFRNEFLLNYIIATYTKPQVSLLSGIVMGGGAGVSLHGRFRVATDNTVFAMPETALGLFPDIGASYFLSRLPGFYGEYVGLAGARLDGGEMLACGLATHFVQSNSLLSLEESLKKVDTSNAFAVCGIIDQFAQQPSLKESSSLNRLEIINKCFSKRTVEEIISALEVEASNSADEWVATTIQSLKKASPTSLKISLRSIREGRTQTVGECLQREYRMVCHVMRGDFSRDFFEGCRAILLDKDRNPKWMPPRLEQVHDEAVEQYFSRIDDPQWEDLNLPARRSHGRNIESKL

SEQ ID NO: 27619 - DNA, 2017 bp, Zea mays subsp. mays
  misc_feature (1)..(2017): Ceres Seq. ID no. 12405563
aatcaggctcgcggccgagccaccgaggagcaaagcaaagctctcgttggtcgtggcggcagcggcggcgcgcggtgtcgagctgcggcgctgaaggcaagagagccgcgcgccgtgaagagtcgtcgtcgatccccgtccgagctccgtcgcttcattgatgaatgccgaagctatagcggtccttgctcgttccaaggttcgatgccccggtcgccgcccggatgacactgccaaccccggtggtagccggcgttgcggctggcgccgccgcgctgctactggccgccgccctcgccgtggcgtggtggtggctcgtgatcgtgaggcggcgccggcgccgtgaccggagctccgacaccggatcctcgtcggaggctcctcctcccacgctggcggagtggggccggtgcggccgcacctcgtcggcgcccgagttccacggcgccaggcagttctcgctggaggagctggcgcacgccaccaacggcttcgccgaggccaacctggtcggcgcgggggcctttggcctggtgtacaagggcctgctgctagacggcaccgtcgtcgccatcaagcgccgcgcgggcgcgccgcgccaggacttcgcaaacgagatcaggaggctgtcagagatctggcaccgcaacgtcgtgacgttgatcggcttctgccaagaaggcggtctacagatgctggtgttcgaatacctgcccaacgccagtgtcagcggccacttgtacgacaccggcaaggagaggatgaccaggctggagttcaagcagaggctgtcaatagccattggagcagctaaaggtctgagtcacctccacagcctggcgccgccgctgatccacagggacttcaagacgagcaacgtgctggtcgacgagaacttcatcgccaaggtgtccgacgccgggatccacaggctgctgcgagggactgatggtggcgccgtcgccgctccggcgagtcgcggtgtcttccaagacccggagtgagtagtagcaaaccagcccggcctggatgaaatgtacgttctgctgccatctggattcttaccatgcatgcatgcactgcgttcctggcgtgctcgcttgcactgcagggtacattcatcggcgcaggcgcagctctctgagagcagcgacgtgtacagcttcggggtgttccttgtggagctggtcacaggcagggaggctgcggggctgatgccgccggggtccagcaaggactctctcgctcaatggatggaggcgcgtttcggctcgaacgagctggtcgacccgaggctgggagggagcttcacctcggagggtatggcggaggtggtgggcctggcgtccagctgcctgagcccgtcggcgaggcggcggcccaggatgcggctggtggcggcggagctggaccggatcctggagaaggagatggccctgaccaccgtcatgggcgatggcggcaccgccatcgtcacgctcggcagccagctcttcacgtcctgactgaccgggatccgatggctggcatggcatcatcgacccaaggaggaagcatggtcgccgacgacgagacccccgcgttgcttccttcgtgtcctgggccgggagctgaacgacgcaacgcaacgcgatgcaagcagttcgtggccggtgattctccagctcactgctccacctcaggaaatttcaagagaccgcgacaggcgcgcgaacctgtgtcctgcattttcttcagtcttccatgttcagagttccgttggatttcatccagcagctcagccaaaatatgtgcatatgtaaaaattcacatctggaattggaagatggaatttatactagtactagattagacgcagaggctgagaggcatattttggggtgtggaacctcatcagccagggtcacttatttccatttgtttattctttctctgaaacaacaacatgcgatgcgacactgcagctctcccaaaccgaactgtacccaaccgaagcgtgtcagtccagttcaatttt

SEQ ID NO: 27620 - protein, 259 aa, Zea mays subsp. mays
  peptide (1)..(259): Ceres Seq. ID no. 12405564
  misc_feature (1)..(259): NCBI GI NO: 34907204 NR Description: serine/threonine protein kinase-like protein
  misc_feature (7)..(259): NCBI GI NO: 30688460 NR Description: protein kinase family [Arabidopsis thaliana]
  misc_feature (7)..(259): NCBI GI NO: 26453311 NR Description: putative protein kinase [Arabidopsis thaliana]
  misc_feature (7)..(259): NCBI GI NO: 1402888 NR Description: unknown [Arabidopsis thaliana]
  misc_feature (15)..(258): NCBI GI NO: 34907096 NR Description: putative serine/threonine protein kinase
  misc_feature (1)..(259): NCBI GI NO: 34909240 NR Description: putative receptor protein kinase
  misc_feature (5)..(242): NCBI GI NO: 15218207 NR Description: protein kinase, putative; protein id: At1g52290.1
  misc_feature (78)..(234): NCBI GI NO: 29367569 NR Description: putative receptor protein kinase
  misc_feature (2)..(259): NCBI GI NO: 15240547 NR Description: leucine-rich repeat transmembrane protein kinase
  misc_feature (45)..(237): NCBI GI NO: 34896906 NR Description: putative kinase
MTLPTPVVAGVAAGAAALLLAAALAVAWWWLVIVRRRRRRDRSSDTGSSSEAPPPTLAEWGRCGRTSSAPEFHGARQFSLEELAHATNGFAEANLVGAGAFGLVYKGLLLDGTVVAIKRRAGAPRQDFANEIRRLSEIWHRNVVTLIGFCQEGGLQMLVFEYLPNASVSGHLYDTGKERMTRLEFKQRLSIAIGAAKGLSHLHSLAPPLIHRDFKTSNVLVDENFIAKVSDAGIHRLLRGTDGGAVAAPASRGVFQDPE

SEQ ID NO: 27621 - protein, 200 aa, Zea mays subsp. mays
  peptide (1)..(200): Ceres Seq. ID no. 12405565
MDGGAFRLERAGRPEAGRELHLGGYGGGGGPGVQLPEPVGEAAAQDAAGGGGAGPDPGEGDGPDHRHGRWRHRHRHARQPALHVLTDRDPMAGMASSTQGGSMVADDETPALLPSCPGPGAERRNATRCKQFVAGDSPAHCSTSGNFKRPRQAREPVSCIFFSLPCSEFRWISSSSSAKICAYVKIHIWNWKMEFILVLD

SEQ ID NO: 27622 - protein, 156 aa, Zea mays subsp. mays
  peptide (1)..(156): Ceres Seq. ID no. 12405566
  misc_feature (27)..(156): NCBI GI NO: 34907204 NR Description: serine/threonine protein kinase-like protein
  misc_feature (34)..(154): NCBI GI NO: 30688460 NR Description: protein kinase family [Arabidopsis thaliana]
  misc_feature (34)..(154): NCBI GI NO: 26453311 NR Description: putative protein kinase [Arabidopsis thaliana]
  misc_feature (34)..(154): NCBI GI NO: 1402888 NR Description: unknown [Arabidopsis thaliana]
  misc_feature (36)..(156): NCBI GI NO: 34907096 NR Description: putative serine/threonine protein kinase
  misc_feature (34)..(134): NCBI GI NO: 34909240 NR Description: putative receptor protein kinase
  misc_feature (30)..(156): NCBI GI NO: 15218207 NR Description: protein kinase, putative; protein id: At1g52290.1
  misc_feature (30)..(126): NCBI GI NO: 29367569 NR Description: putative receptor protein kinase
  misc_feature (34)..(129): NCBI GI NO: 15240547 NR Description: leucine-rich repeat transmembrane protein kinase
  misc_feature (30)..(135): NCBI GI NO: 34896906 NR Description: putative kinase
MYVLLPSGFLPCMHALRSWRARLHCRVHSSAQAQLSESSDVYSFGVFLVELVTGREAAGLMPPGSSKDSLAQWMEARFGSNELVDPRLGGSFTSEGMAEVVGLASSCLSPSARRRPRMRLVAAELDRILEKEMALTTVMGDGGTAIVTLGSQLFTS

SEQ ID NO: 27623 - DNA, 1047 bp, Zea mays subsp. mays
  misc_feature (1)..(1047): Ceres Seq. ID no. 12349973
cacgccacgctctccaacgccacagcttgcgcccgcaatggcactcgtctccgcctcctcgtcctccaccaccgccgtcacggcgctccccaggaatgggcagcgggcgtcgtcctccttcctcggcggcaagacgctgctgagacaggccgaggcggcccggccgtcgttcgccgtgcgcgccgcggcggaccccaacaggccgatctggttccccggcagcacccctccgccgtggctcgacggcagccttcccggcgacttcggctttgatccctggggcctcggatctgacccggagagcctgcggtggaacgtgcaggcggagctggtgcactgccggtgggcgatgctcggcgcggcgggcatcttcatcccggagttcctgaccaagatcggcgtcctcaacacgcccttctggtacaccgccggcgagcagcagtacttcaccgacaccaccaccctcttcatcatcgagctcatcctcatcggctgggccgagggccgccgctgggctgacatcatcaagcccggaagcgtcaacaccgaccccatcttccccagcaacaagctcaccggcaccgacgtcgggtaccctggtggcctctggtttgacccgctcggctggggcagcggctcgccggagaagatcaaggagctgcgcaccaaggagatcaagaacggacgcctcgccatgctcgccgtcatgggcgcctggttccaggccgagtacaccggcaccggccccatcgacaacctcttcgcccacctcgccgaccctggccacgccaccatcttccaggccttcacccccaaatgaggagttgaacttattattagcattttgaggagtgctaccacacatgcatcgtcaggttgatggccgatatatatgaaacttcacattttttttggtggggaaggactgctgagtagactgtcaatgatggaatgctcgtggtgcgagtgcgatgcatggtgtacttgtactatgttgtaaccagtgtaaaaaggggatactcgttagatgttatgccatgttcactg

SEQ ID NO: 27624 - protein, 272 aa, Zea mays subsp. mays
  peptide (1)..(272): Ceres Seq. ID no. 12349974
  misc_feature (75)..(243): Pfam Name: Pfam Description:  Chlorophyll A-B binding protein
  misc_feature (13)..(272): NCBI GI NO: 34393511 NR Description: putative photosystem I antenna protein
  misc_feature (13)..(272): NCBI GI NO: 1076724 NR Description: LHCI-680, photosystem I antenna protein - barley
  misc_feature (13)..(272): NCBI GI NO: 7443233 NR Description: chlorophyll a/b-binding protein type II
  misc_feature (15)..(272): NCBI GI NO: 115765 NR Description: Chlorophyll A-B binding protein 7
  misc_feature (16)..(272): NCBI GI NO: 11277627 NR Description: PS I antenna protein Lhca2
  misc_feature (15)..(272): NCBI GI NO: 115766 NR Description: Chlorophyll A-B binding protein
  misc_feature (16)..(272): NCBI GI NO: 15233120 NR Description: light-harvesting chlorophyll a/b binding protein
  misc_feature (13)..(272): NCBI GI NO: 2306981 NR Description: photosystem I antenna protein [Oryza sativa]
  misc_feature (14)..(272): NCBI GI NO: 18376587 NR Description: putative chlorophyll A-B binding protein of LHCItype II precursor
  misc_feature (15)..(272): NCBI GI NO: 2129879 NR Description: chlorophyll a/b-binding protein type II precursor
TPRSPTPQLAPAMALVSASSSSTTAVTALPRNGQRASSSFLGGKTLLRQAEAARPSFAVRAAADPNRPIWFPGSTPPPWLDGSLPGDFGFDPWGLGSDPESLRWNVQAELVHCRWAMLGAAGIFIPEFLTKIGVLNTPFWYTAGEQQYFTDTTTLFIIELILIGWAEGRRWADIIKPGSVNTDPIFPSNKLTGTDVGYPGGLWFDPLGWGSGSPEKIKELRTKEIKNGRLAMLAVMGAWFQAEYTGTGPIDNLFAHLADPGHATIFQAFTPK

SEQ ID NO: 27625 - protein, 260 aa, Zea mays subsp. mays
  peptide (1)..(260): Ceres Seq. ID no. 12349975
  misc_feature (63)..(231): Pfam Name: Pfam Description:  Chlorophyll A-B binding protein
  misc_feature (1)..(260): NCBI GI NO: 34393511 NR Description: putative photosystem I antenna protein
  misc_feature (1)..(260): NCBI GI NO: 1076724 NR Description: LHCI-680, photosystem I antenna protein - barley
  misc_feature (1)..(260): NCBI GI NO: 7443233 NR Description: chlorophyll a/b-binding protein type II
  misc_feature (3)..(260): NCBI GI NO: 115765 NR Description: Chlorophyll A-B binding protein 7
  misc_feature (4)..(260): NCBI GI NO: 11277627 NR Description: PS I antenna protein Lhca2
  misc_feature (3)..(260): NCBI GI NO: 115766 NR Description: Chlorophyll A-B binding protein
  misc_feature (4)..(260): NCBI GI NO: 15233120 NR Description: light-harvesting chlorophyll a/b binding protein
  misc_feature (1)..(260): NCBI GI NO: 2306981 NR Description: photosystem I antenna protein [Oryza sativa]
  misc_feature (2)..(260): NCBI GI NO: 18376587 NR Description: putative chlorophyll A-B binding protein of LHCItype II precursor
  misc_feature (3)..(260): NCBI GI NO: 2129879 NR Description: chlorophyll a/b-binding protein type II precursor
MALVSASSSSTTAVTALPRNGQRASSSFLGGKTLLRQAEAARPSFAVRAAADPNRPIWFPGSTPPPWLDGSLPGDFGFDPWGLGSDPESLRWNVQAELVHCRWAMLGAAGIFIPEFLTKIGVLNTPFWYTAGEQQYFTDTTTLFIIELILIGWAEGRRWADIIKPGSVNTDPIFPSNKLTGTDVGYPGGLWFDPLGWGSGSPEKIKELRTKEIKNGRLAMLAVMGAWFQAEYTGTGPIDNLFAHLADPGHATIFQAFTPK

SEQ ID NO: 27626 - protein, 156 aa, Zea mays subsp. mays
  peptide (1)..(156): Ceres Seq. ID no. 12349976
  misc_feature (1)..(127): Pfam Name: Pfam Description:  Chlorophyll A-B binding protein
  misc_feature (1)..(156): NCBI GI NO: 34393511 NR Description: putative photosystem I antenna protein
  misc_feature (1)..(156): NCBI GI NO: 1076724 NR Description: LHCI-680, photosystem I antenna protein - barley
  misc_feature (1)..(156): NCBI GI NO: 7443233 NR Description: chlorophyll a/b-binding protein type II
  misc_feature (1)..(156): NCBI GI NO: 115765 NR Description: Chlorophyll A-B binding protein 7
  misc_feature (1)..(156): NCBI GI NO: 11277627 NR Description: PS I antenna protein Lhca2
  misc_feature (1)..(156): NCBI GI NO: 115766 NR Description: Chlorophyll A-B binding protein
  misc_feature (1)..(156): NCBI GI NO: 15233120 NR Description: light-harvesting chlorophyll a/b binding protein
  misc_feature (1)..(156): NCBI GI NO: 2306981 NR Description: photosystem I antenna protein [Oryza sativa]
  misc_feature (1)..(156): NCBI GI NO: 18376587 NR Description: putative chlorophyll A-B binding protein of LHCItype II precursor
  misc_feature (1)..(156): NCBI GI NO: 2129879 NR Description: chlorophyll a/b-binding protein type II precursor
MLGAAGIFIPEFLTKIGVLNTPFWYTAGEQQYFTDTTTLFIIELILIGWAEGRRWADIIKPGSVNTDPIFPSNKLTGTDVGYPGGLWFDPLGWGSGSPEKIKELRTKEIKNGRLAMLAVMGAWFQAEYTGTGPIDNLFAHLADPGHATIFQAFTPK

SEQ ID NO: 27627 - DNA, 1531 bp, Zea mays subsp. mays
  misc_feature (1)..(1531): Ceres Seq. ID no. 12358328
atcagcgctagcttagctatccggccgcatccgctgctcgcctcctcacttgagcgtgtgtcgtgtagcatttagtcagctgctcctgcttgctagggttagggtttgcgggcgcgcgcgcgcgtgcccgcgcgcgagctggccgcgggagggatgacgccgcaccggtcgccggcggggaccggaggaagtggcggcggagggccgccggcgctacactacctgagcggcccttacggagacaccaccttcaccaaggttttcgtgggcggcctcgcctgggagacgcggagtgaggggcttcgcgcccactttgaggtctacggggacatcctcgaggccgttgtcatcaccgaccgcgccacaggccgctccaagggctacggattcgtaaccttccaggacccagagtcggcgaggatggcctgcatggacccatatccagtgatcgatggccggccgtgctaattgcaaccttgccatcttagggcgtcctggtccagctgtgcctttcggccatcagcatatggacctgaatacctatatcagcagctttgtagaatgcatatggtccatatgttggacaacagtatattccagtttacggtggcccaaggacagtaggcccagcagtctacccatatgggcagtctggccaacctgtaccaagtgatcatgcttattctcttggttatgccccaagtcgtgttctcccactatcgaatcagaatgttaacgctgcaaatgttgtgcgcataccaccacttcaacaatttcctccaggagctccacgacctcagcaacagcttttggcccctgctcgtgcaccgccattcccacagaacaacgtttctgaacaagcgacaggttgacaaggatgccagaaagtgacgaattttaggtatcctatagtctgcagcaggactaagaaaagttgtaccgctaaattgggcggcatgcttttttcttgcaaattgttttcgtttgctctctaaagtctgcaggttgtccctatccatggttacctgaacttcttataacgtgagtgtctgatctgctccgcgggaaggggcaggcaagctcgagcgactgaagatgaagcccctcttgctcagcttctgtcagtgtctgtacattccccatctgccagacatcctgatagctgatggtctgtgcaggaccaaagtggatgccggaaatggagtccggcctccaacctgtgtataatataggtcatgtagtggtccaaatcgtagaacaggtccattctttgaaaacatctggttgtgtatattaattctcttagcaccttcagtgcatgttttcatgtctcattagagggaataggtatttcaatgtcattgcattgtcagtgagtcatgtacattattatactgaaaatgtaaactatatatgtcatctgtgtcaactgacaactgtaatcaaataatgacatccctatcttgggaaagaacatgatttattgcaagttgcaacggatggggaaaactagggatggatacggatactt

SEQ ID NO: 27628 - protein, 104 aa, Zea mays subsp. mays
  peptide (1)..(104): Ceres Seq. ID no. 12358329
  misc_feature (36)..(91): Pfam Name: a.k.a. RRM, RBD, or RNP domain Pfam Description: RNA recognition motif.
  misc_feature (22)..(104): NCBI GI NO: 25406448 NR Description: probable RNA-binding protein, 24808-23340
  misc_feature (22)..(102): NCBI GI NO: 22330665 NR Description: RRM-containing protein; protein id: At1g76460.1
  misc_feature (22)..(102): NCBI GI NO: 15010636 NR Description: At1g20880/F9H16_14 [Arabidopsis thaliana]
  misc_feature (22)..(102): NCBI GI NO: 23505939 NR Description: At1g20880/F9H16_14 [Arabidopsis thaliana]
  misc_feature (22)..(102): NCBI GI NO: 18394923 NR Description: RRM-containing protein; protein id: At1g20880
  misc_feature (22)..(102): NCBI GI NO: 25518498 NR Description: hypothetical protein F9H16
  misc_feature (13)..(102): NCBI GI NO: 34905758 NR Description: similar to RNA-binding protein
  misc_feature (18)..(102): NCBI GI NO: 34907334 NR Description: P0698A10.29
  misc_feature (29)..(102): NCBI GI NO: 18395177 NR Description: RRM-containing protein; protein id: At1g22910
  misc_feature (29)..(102): NCBI GI NO: 25518372 NR Description: hypothetical protein F19G10
MTPHRSPAGTGGSGGGGPPALHYLSGPYGDTTFTKVFVGGLAWETRSEGLRAHFEVYGDILEAVVITDRATGRSKGYGFVTFQDPESARMACMDPYPVIDGRPC

SEQ ID NO: 27629 - protein, 82 aa, Zea mays subsp. mays
  peptide (1)..(82): Ceres Seq. ID no. 12358330
MGSLANLYQVIMLILLVMPQVVFSHYRIRMLTLQMLCAYHHFNNFLQELHDLSNSFWPLLVHRHSHRTTFLNKRQVDKDARK

SEQ ID NO: 27630 - protein, 73 aa, Zea mays subsp. mays
  peptide (1)..(73): Ceres Seq. ID no. 12358331
MAGRANCNLAILGRPGPAVPFGHQHMDLNTYISSFVECIWSICWTTVYSSLRWPKDSRPSSLPIWAVWPTCTK

SEQ ID NO: 27631 - DNA, 1400 bp, Zea mays subsp. mays
  misc_feature (1)..(1400): Ceres Seq. ID no. 12347987
gaacatcctaatcaaaaccgctcgatcgcgcccccatcaatcaatcaatcaattctcgacctcactactcgatctctcgtctcatcagtgtgactgtgtgagtgtccgagcacggtagcacgcgcaatggacgctctgctcgtgactaccttcctcgtccccgtggtggcgctcctcctcggttccgggtccgggtccgcggcaccgctgccgcgcgccttcttcgtgttcggtgactccctcgtggacaacggcaacaacaactacctgatgacgacggcgcgcgccgacgcgccgccctacgggatcgacttccccacgcacatggccacggggaggttctccaacgggctgaacatccccgacatcatcagcgagcacctgggctcccagcccgcgctgccgtacctgagccccgacctccgcggcgcccagctcctggtgggcgccaacttcgcgtccgccggcgtcggcatcctcaacgacaccggcatacagttcgtgaacatcatcaggatcggacagcagctgcgcaacttccaggagtaccagcagaggctggcggcgttcgtcggcgaggacgcggcgcggcaggccgtcagcgacgcgctcgtgctcatcacgctcggcggcaacgacttcgtcaacaactactacctggtgcccttctccgtccgctctcgccagtttgccatccaagactacgtcccctacctcatctccgagtacaggaagatcctcacgcggctgtacgagctcggggcccggcgcgtggtggtgacgggcaccgggatgatcgggtgcgtgccggcggagctcgccatgcacagcgtcgacggcgagtgcgcgcgcgacctcacggaggcggccgacctcttcaacccgcagctggtgcagatgctctccgagctcaacgccgacatcggcgccgacgtcttcatcgccgccaacaccaaccgggtcagcttcgacttcatgttcaacccgcaggactacgggttcgtgacgtccaaggtggcgtgctgcgggcagggcccctacaacgggatcgggctgtgcacgccggcgtccaacgtgtgccccaaccgggacgtgtacgcgtactgggacgcgttccaccccacggagcgcgccaaccggatcatcgtcggccagttcatgcacggatccaccgaccacatcagccccatgaacatcagcaccatcctcgccatggacaacaggaactaggccctgcgcgtggcgtgcctcgacctcgatccatccatctctagccggctgggattgagatgccaatctgcactgccatggatccgtcccgacactggcagctataatactacgagacgacacacatagctactgcatgcatgcgtaatactactagtataagttcgtgc

SEQ ID NO: 27632 - protein, 367 aa, Zea mays subsp. mays
  peptide (1)..(367): Ceres Seq. ID no. 12347988
  misc_feature (32)..(343): Pfam Name: Pfam Description:  GDSL-like Lipase/Acylhydrolase
  misc_feature (1)..(366): NCBI GI NO: 32489520 NR Description: OSJNBa0043L24.11
  misc_feature (30)..(365): NCBI GI NO: 15229265 NR Description: putative GDSL-motif lipase/acylhydrolase
  misc_feature (13)..(364): NCBI GI NO: 22758315 NR Description: putative early nodulin gene (Enod) related protein
  misc_feature (13)..(364): NCBI GI NO: 37535146 NR Description: putative early nodulin gene (Enod) related protein
  misc_feature (30)..(365): NCBI GI NO: 15242808 NR Description: putative protein; protein id: At5g33370
  misc_feature (29)..(364): NCBI GI NO: 28071322 NR Description: P0705A05.30
  misc_feature (1)..(366): NCBI GI NO: 15235421 NR Description: Proline-rich APG - like protein
  misc_feature (4)..(363): NCBI GI NO: 15238814 NR Description: putative protein; protein id: At5g18430.1
  misc_feature (16)..(360): NCBI GI NO: 34909504 NR Description: putative GDSL-motif lipase/hydrolase-like protein
  misc_feature (1)..(363): NCBI GI NO: 15227849 NR Description: putative GDSL-motif lipase/hydrolase
MDALLVTTFLVPVVALLLGSGSGSAAPLPRAFFVFGDSLVDNGNNNYLMTTARADAPPYGIDFPTHMATGRFSNGLNIPDIISEHLGSQPALPYLSPDLRGAQLLVGANFASAGVGILNDTGIQFVNIIRIGQQLRNFQEYQQRLAAFVGEDAARQAVSDALVLITLGGNDFVNNYYLVPFSVRSRQFAIQDYVPYLISEYRKILTRLYELGARRVVVTGTGMIGCVPAELAMHSVDGECARDLTEAADLFNPQLVQMLSELNADIGADVFIAANTNRVSFDFMFNPQDYGFVTSKVACCGQGPYNGIGLCTPASNVCPNRDVYAYWDAFHPTERANRIIVGQFMHGSTDHISPMNISTILAMDNRN

SEQ ID NO: 27633 - protein, 319 aa, Zea mays subsp. mays
  peptide (1)..(319): Ceres Seq. ID no. 12347989
  misc_feature (1)..(295): Pfam Name: Pfam Description:  GDSL-like Lipase/Acylhydrolase
  misc_feature (1)..(318): NCBI GI NO: 32489520 NR Description: OSJNBa0043L24.11
  misc_feature (1)..(317): NCBI GI NO: 15229265 NR Description: putative GDSL-motif lipase/acylhydrolase
  misc_feature (1)..(316): NCBI GI NO: 22758315 NR Description: putative early nodulin gene (Enod) related protein
  misc_feature (1)..(316): NCBI GI NO: 37535146 NR Description: putative early nodulin gene (Enod) related protein
  misc_feature (1)..(317): NCBI GI NO: 15242808 NR Description: putative protein; protein id: At5g33370
  misc_feature (1)..(316): NCBI GI NO: 28071322 NR Description: P0705A05.30
  misc_feature (1)..(318): NCBI GI NO: 15235421 NR Description: Proline-rich APG - like protein
  misc_feature (1)..(315): NCBI GI NO: 15238814 NR Description: putative protein; protein id: At5g18430.1
  misc_feature (1)..(312): NCBI GI NO: 34909504 NR Description: putative GDSL-motif lipase/hydrolase-like protein
  misc_feature (1)..(315): NCBI GI NO: 15227849 NR Description: putative GDSL-motif lipase/hydrolase
MTTARADAPPYGIDFPTHMATGRFSNGLNIPDIISEHLGSQPALPYLSPDLRGAQLLVGANFASAGVGILNDTGIQFVNIIRIGQQLRNFQEYQQRLAAFVGEDAARQAVSDALVLITLGGNDFVNNYYLVPFSVRSRQFAIQDYVPYLISEYRKILTRLYELGARRVVVTGTGMIGCVPAELAMHSVDGECARDLTEAADLFNPQLVQMLSELNADIGADVFIAANTNRVSFDFMFNPQDYGFVTSKVACCGQGPYNGIGLCTPASNVCPNRDVYAYWDAFHPTERANRIIVGQFMHGSTDHISPMNISTILAMDNRN

SEQ ID NO: 27634 - protein, 301 aa, Zea mays subsp. mays
  peptide (1)..(301): Ceres Seq. ID no. 12347990
  misc_feature (1)..(277): Pfam Name: Pfam Description:  GDSL-like Lipase/Acylhydrolase
  misc_feature (1)..(300): NCBI GI NO: 32489520 NR Description: OSJNBa0043L24.11
  misc_feature (1)..(299): NCBI GI NO: 15229265 NR Description: putative GDSL-motif lipase/acylhydrolase
  misc_feature (1)..(298): NCBI GI NO: 22758315 NR Description: putative early nodulin gene (Enod) related protein
  misc_feature (1)..(298): NCBI GI NO: 37535146 NR Description: putative early nodulin gene (Enod) related protein
  misc_feature (1)..(299): NCBI GI NO: 15242808 NR Description: putative protein; protein id: At5g33370
  misc_feature (1)..(298): NCBI GI NO: 28071322 NR Description: P0705A05.30
  misc_feature (1)..(300): NCBI GI NO: 15235421 NR Description: Proline-rich APG - like protein
  misc_feature (1)..(297): NCBI GI NO: 15238814 NR Description: putative protein; protein id: At5g18430.1
  misc_feature (1)..(294): NCBI GI NO: 34909504 NR Description: putative GDSL-motif lipase/hydrolase-like protein
  misc_feature (1)..(297): NCBI GI NO: 15227849 NR Description: putative GDSL-motif lipase/hydrolase
MATGRFSNGLNIPDIISEHLGSQPALPYLSPDLRGAQLLVGANFASAGVGILNDTGIQFVNIIRIGQQLRNFQEYQQRLAAFVGEDAARQAVSDALVLITLGGNDFVNNYYLVPFSVRSRQFAIQDYVPYLISEYRKILTRLYELGARRVVVTGTGMIGCVPAELAMHSVDGECARDLTEAADLFNPQLVQMLSELNADIGADVFIAANTNRVSFDFMFNPQDYGFVTSKVACCGQGPYNGIGLCTPASNVCPNRDVYAYWDAFHPTERANRIIVGQFMHGSTDHISPMNISTILAMDNRN

SEQ ID NO: 27635 - DNA, 1920 bp, Zea mays subsp. mays
  misc_feature (1)..(1920): Ceres Seq. ID no. 12368597
gcacgagaccattacctagaacatcctaatcgaaaagcactcgcttccttcgacggactcatcgccgatcacaccaggctagctagcccacccacagtcgtagggccaggaccgataggaggagctcggtttttccgaccaggaccgccgccgccacacccgaagaagccgacgatgcagacgacgacgacgacgtcctcggtggtggccgagctggagggcgcgctgctccggagcgcggacacgttcccgtacttcatgctcgtggcgttcgaggcgtccgggctgccgcgcttcgcgctgctgctggcgctgtggccgctgctgccggctgctggagctggcgggccggcgcggcctggcgctgcgcgccgccgcgttcgtggccaccgcgggcgtgccgcgcgccgaggtggaggcagtgtcgcgcgccgtgctgcccaagttcatggccgacgacgtcgaccccgccgcgtgggcggccttcgggagctgcgaggggacgcgcgtcgtcgtcacgcggatgccccgcgtcatggtcgaccgcttcgccagggagcacctaggcgcgcacgcggtcgtcggctgcgacctcgagtacagccggctcaggcggtccacgggtctgctaagaggcgcgagctatgaggacgtcgccacccgtgtgcgcgcgttgttcgccggcgacggctgccggccggcactcgggatcggcgggtcaaagatggcgcgctcattcttgacattctgcgaggagcagctcaggcagccattcccagcgcccaacgagacgaacgccccgccgttccggccggtcatcttccacgacgggcgcctcgtgtgccggcccacgccattcatgtccctcgtcatccttctctggctgccgctcggcgtgctggtcgccttcgtccggatcgccgtcgggctcatggtccccatctggaccgtcccctacatcgcgccggtcttcggcggcgccgtgatcacccacggccgcgcgcctccccccgccaagctcggcggcggctcgccctcgggggtcctcttcgtctgcacgcaccgcacgctcatggaccccgtggtgctggccgccgtgctcggccggcgcgtggcggccgtgacgtactccatctcccgcctctcggaggtcctctccccgatcccgacggtgcggctgacgcgcgaccgggacgcggacgcggcgcgcatgcgcgcggagctggcccgcggcggcgacgtggcggtgtgccccgagggcaccacgtgccgggagcccttcctgctccgcttctccaagctcttcgcggagctcagcgacagcatcgtgcccgtggcgatgaactaccgcgtggggctgttccacccgacgacggcgcgcgggtggaaggccatggaccccatcttcttcttcatgaacccgcggcccgtgtacgaggtgacgttcctgaaccagctccccgcggagtcgacgtgcgcggcggggaagagccccgtggacgtggccaactacgtgcagcggatactcgccgccacgctcgggttcgaatgcaccaccctcaccaggaaggacaagtacacggtgctcgcgggaaacgacggcgtcgtcaacgccaagccggcctggcagagccgcgtgaaggatgtcctcggcttcctgctccactaaccacattacttgcacggctctggactctgcgctcaaatacttcgctcaccgatttgattgagtttatactttacatttatttatacatgtaagtaagaataaccacacacaaaagcatgtagtagtaacatacagtagtgattattagcctttatttcttcacataataagtactgtatattgtattgttctttgttttacaagtgttttggtgaatttttactgggtgtaatcaaatatattttgtagtc

SEQ ID NO: 27636 - protein, 406 aa, Zea mays subsp. mays
  peptide (1)..(406): Ceres Seq. ID no. 12368598
  misc_feature (179)..(299): Pfam Name: Pfam Description:  Acyltransferase
  misc_feature (1)..(388): NCBI GI NO: 15229747 NR Description: unknown protein; protein id: At3g11430.1
  misc_feature (1)..(401): NCBI GI NO: 15239924 NR Description: putative protein; protein id: At5g06090.1
  misc_feature (1)..(388): NCBI GI NO: 37534314 NR Description: hypothetical protein
  misc_feature (1)..(391): NCBI GI NO: 38000002 NR Description: unknown protein
  misc_feature (1)..(390): NCBI GI NO: 15224445 NR Description: unknown protein; protein id: At2g38110
  misc_feature (1)..(391): NCBI GI NO: 29788867 NR Description: hypothetical protein
  misc_feature (1)..(389): NCBI GI NO: 15223437 NR Description: hypothetical protein; protein id: At1g01610
  misc_feature (1)..(389): NCBI GI NO: 17064780 NR Description: Unknown protein [Arabidopsis thaliana]
  misc_feature (1)..(386): NCBI GI NO: 18481713 NR Description: hypothetical protein [Sorghum bicolor]
  misc_feature (238)..(401): NCBI GI NO: 22330983 NR Description: hypothetical protein; protein id: At3g11325.1
MADDVDPAAWAAFGSCEGTRVVVTRMPRVMVDRFAREHLGAHAVVGCDLEYSRLRRSTGLLRGASYEDVATRVRALFAGDGCRPALGIGGSKMARSFLTFCEEQLRQPFPAPNETNAPPFRPVIFHDGRLVCRPTPFMSLVILLWLPLGVLVAFVRIAVGLMVPIWTVPYIAPVFGGAVITHGRAPPPAKLGGGSPSGVLFVCTHRTLMDPVVLAAVLGRRVAAVTYSISRLSEVLSPIPTVRLTRDRDADAARMRAELARGGDVAVCPEGTTCREPFLLRFSKLFAELSDSIVPVAMNYRVGLFHPTTARGWKAMDPIFFFMNPRPVYEVTFLNQLPAESTCAAGKSPVDVANYVQRILAATLGFECTTLTRKDKYTVLAGNDGVVNAKPAWQSRVKDVLGFLLH

SEQ ID NO: 27637 - protein, 381 aa, Zea mays subsp. mays
  peptide (1)..(381): Ceres Seq. ID no. 12368599
  misc_feature (154)..(274): Pfam Name: Pfam Description:  Acyltransferase
  misc_feature (1)..(363): NCBI GI NO: 15229747 NR Description: unknown protein; protein id: At3g11430.1
  misc_feature (1)..(376): NCBI GI NO: 15239924 NR Description: putative protein; protein id: At5g06090.1
  misc_feature (1)..(363): NCBI GI NO: 37534314 NR Description: hypothetical protein
  misc_feature (1)..(366): NCBI GI NO: 38000002 NR Description: unknown protein
  misc_feature (1)..(365): NCBI GI NO: 15224445 NR Description: unknown protein; protein id: At2g38110
  misc_feature (1)..(366): NCBI GI NO: 29788867 NR Description: hypothetical protein
  misc_feature (1)..(364): NCBI GI NO: 15223437 NR Description: hypothetical protein; protein id: At1g01610
  misc_feature (1)..(364): NCBI GI NO: 17064780 NR Description: Unknown protein [Arabidopsis thaliana]
  misc_feature (1)..(361): NCBI GI NO: 18481713 NR Description: hypothetical protein [Sorghum bicolor]
  misc_feature (213)..(376): NCBI GI NO: 22330983 NR Description: hypothetical protein; protein id: At3g11325.1
MPRVMVDRFAREHLGAHAVVGCDLEYSRLRRSTGLLRGASYEDVATRVRALFAGDGCRPALGIGGSKMARSFLTFCEEQLRQPFPAPNETNAPPFRPVIFHDGRLVCRPTPFMSLVILLWLPLGVLVAFVRIAVGLMVPIWTVPYIAPVFGGAVITHGRAPPPAKLGGGSPSGVLFVCTHRTLMDPVVLAAVLGRRVAAVTYSISRLSEVLSPIPTVRLTRDRDADAARMRAELARGGDVAVCPEGTTCREPFLLRFSKLFAELSDSIVPVAMNYRVGLFHPTTARGWKAMDPIFFFMNPRPVYEVTFLNQLPAESTCAAGKSPVDVANYVQRILAATLGFECTTLTRKDKYTVLAGNDGVVNAKPAWQSRVKDVLGFLLH

SEQ ID NO: 27638 - protein, 377 aa, Zea mays subsp. mays
  peptide (1)..(377): Ceres Seq. ID no. 12368600
  misc_feature (150)..(270): Pfam Name: Pfam Description:  Acyltransferase
  misc_feature (1)..(359): NCBI GI NO: 15229747 NR Description: unknown protein; protein id: At3g11430.1
  misc_feature (1)..(372): NCBI GI NO: 15239924 NR Description: putative protein; protein id: At5g06090.1
  misc_feature (1)..(359): NCBI GI NO: 37534314 NR Description: hypothetical protein
  misc_feature (1)..(362): NCBI GI NO: 38000002 NR Description: unknown protein
  misc_feature (1)..(361): NCBI GI NO: 15224445 NR Description: unknown protein; protein id: At2g38110
  misc_feature (1)..(362): NCBI GI NO: 29788867 NR Description: hypothetical protein
  misc_feature (1)..(360): NCBI GI NO: 15223437 NR Description: hypothetical protein; protein id: At1g01610
  misc_feature (1)..(360): NCBI GI NO: 17064780 NR Description: Unknown protein [Arabidopsis thaliana]
  misc_feature (1)..(357): NCBI GI NO: 18481713 NR Description: hypothetical protein [Sorghum bicolor]
  misc_feature (209)..(372): NCBI GI NO: 22330983 NR Description: hypothetical protein; protein id: At3g11325.1
MVDRFAREHLGAHAVVGCDLEYSRLRRSTGLLRGASYEDVATRVRALFAGDGCRPALGIGGSKMARSFLTFCEEQLRQPFPAPNETNAPPFRPVIFHDGRLVCRPTPFMSLVILLWLPLGVLVAFVRIAVGLMVPIWTVPYIAPVFGGAVITHGRAPPPAKLGGGSPSGVLFVCTHRTLMDPVVLAAVLGRRVAAVTYSISRLSEVLSPIPTVRLTRDRDADAARMRAELARGGDVAVCPEGTTCREPFLLRFSKLFAELSDSIVPVAMNYRVGLFHPTTARGWKAMDPIFFFMNPRPVYEVTFLNQLPAESTCAAGKSPVDVANYVQRILAATLGFECTTLTRKDKYTVLAGNDGVVNAKPAWQSRVKDVLGFLLH

SEQ ID NO: 27639 - DNA, 982 bp, Zea mays subsp. mays
  misc_feature (1)..(982): Ceres Seq. ID no. 12404445
gttttgtttccattccatcggtggcacgagacaggagacgccaaggccatagctagagcctagagcagcagcagaggcttgacctgaagctccacccgccatggcattcacgcccgctacggcctgctgcaaggcttccctggcgctggcaccgcgggcgtcgccccgcggcccggcggcctgcgcgcaggcggcgctcctctgcacgccctccacctccgtgttccgcggcctccgggcgcccgcatccgccgcgccggccccgcgccggcgccgctcggcggcgtccacgggcatagtctgcggcaaggtcgccaagggcagcgtgccgccgaacttcaccctcaaggaccagaacggcaagcccgtgtcgctgaacaagttcaagggcaagcccgtcgtggtttacttctaccccgccgacgagacgcccggatgcacaaagcaggcgtgcgcgttcagggactcgtacgagaagttcaagaaggccggggcggaggtgatcggcatcagcggcgacgacgcggcgtcgcacaaggcgttcgcgcagaagtaccggctgccgttcacgctgctgagcgacgaggggaaccgcgtgcgcaaggagtggggcgtcccctcggacctgttcgggacgctgccggggcgccagacgtacgtgctggacaagcagggcgtcgtgcagtacgtctacaacaaccagttccagcccgagaagcacatcggcgagacgctcaagatcctgcagaccctctgatccgatcaacctcctcactgttctgggccatgctctgcattcgtcgctgtaaaagtaccggactatgtagtagtgtagtgtatgtaaccaagagctgatgacctgatgttttgttccatccttcagtgagtctatctatcacacgattctggctcgtttgatcgaccagcatcttcctgtttgtcatggtcagtttcacttgtattacaactgtacttttggtcg

SEQ ID NO: 27640 - protein, 218 aa, Zea mays subsp. mays
  peptide (1)..(218): Ceres Seq. ID no. 12404446
  misc_feature (73)..(212): Pfam Name: Pfam Description:  AhpC/TSA family
  misc_feature (34)..(218): NCBI GI NO: 6899842 NR Description: peroxiredoxin Q [Sedum lineare]
  misc_feature (45)..(217): NCBI GI NO: 39748708 NR Description: peroxiredoxin Q [Gentiana triflora]
  misc_feature (60)..(216): NCBI GI NO: 15230982 NR Description: putative peroxiredoxin; protein id: At3g26060
  misc_feature (71)..(218): NCBI GI NO: 17230675 NR Description: bacterioferritin comigratory protein
  misc_feature (74)..(218): NCBI GI NO: 23125049 NR Description: hypothetical protein [Nostoc punctiforme]
  misc_feature (70)..(218): NCBI GI NO: 23041480 NR Description: hypothetical protein
  misc_feature (70)..(218): NCBI GI NO: 28850433 NR Description: similar to Anabaena sp
  misc_feature (71)..(218): NCBI GI NO: 15898858 NR Description: Peroxiredoxin
  misc_feature (74)..(216): NCBI GI NO: 21673494 NR Description: bacterioferritin comigratory protein
  misc_feature (74)..(218): NCBI GI NO: 22405087 NR Description: hypothetical protein [Ferroplasma acidarmanus]
MAFTPATACCKASLALAPRASPRGPAACAQAALLCTPSTSVFRGLRAPASAAPAPRRRRSAASTGIVCGKVAKGSVPPNFTLKDQNGKPVSLNKFKGKPVVVYFYPADETPGCTKQACAFRDSYEKFKKAGAEVIGISGDDAASHKAFAQKYRLPFTLLSDEGNRVRKEWGVPSDLFGTLPGRQTYVLDKQGVVQYVYNNQFQPEKHIGETLKILQTL

SEQ ID NO: 27641 - protein, 139 aa, Zea mays subsp. mays
  peptide (1)..(139): Ceres Seq. ID no. 12404447
  misc_feature (1)..(113): Pfam Name: DUF390 Pfam Description: Protein of unknown function
MHKAGVRVQGLVREVQEGRGGGDRHQRRRRGVAQGVRAEVPAAVHAAERRGEPRAQGVGRPLGPVRDAAGAPDVRAGQAGRRAVRLQQPVPAREAHRRDAQDPADPLIRSTSSLFWAMLCIRRCKSTGLCSSVVYVTKS

SEQ ID NO: 27642 - DNA, 1843 bp, Zea mays subsp. mays
  misc_feature (1)..(1843): Ceres Seq. ID no. 12406900
ggattcgggcgctcggcgtagccgcgcagtggtgtgtctgcctccctccttgtatcctcctcgaattcgagcggcggcgacggcgggaagggagatggaggcggttagaggcgatgggaggtggtgcgtggtgactggcggccgcgggttcgccgcgaggcatctggtgacgatgctgctccgctccggcgagtggcgggtgcgcgtggccgacctgggccctgccatcacgctcgaccgcgacgaagaagagggtttcctgggtgctgctctccgcgaaggccaggccgtctacgtgtccgccgacctccgtgacaaggcccaggtcgccagagcttttgaaggggcagaagtagttttccatatggctgctccagattcatccatcaacaacttccaccttcattatggagtcaatgtcgatggaacaaagaatgttattgacacttgtatccgttgcaaggtgaagagactcatctatactagttcacctagtgtcgtgtttgatggagttcatggaatttttaatgcagatgaatcaatgccttacccagataagtttaatgattcatattcagaaacgaaagcggatgcagaaaagcttgtgatgagagctaatggtagggaagggcttcttacatgctgtatacgcccaagtagcatttttggccctggtgataagctaatggttccatctttggttgctgctgcaagggcagggaagtccaaatacattattggtgatgggaacaactactatgatttcacctacgtggaaaatgtggcatatggccatgtttgtgcggagaaaactctatcatctgaagatggtgcaaagatagccgctggaaaaacctatttcataacaaatatggagcctataaaattctgggagttcatgtcattgattttagaaggtcttggatatgaaaggccttcagtaaaaataccagtctctgttatgatgccggtggctcatgttgtagaatggacttaccagaaatttgccaagtatggaatgaaagttcctcagctgaccccttcaaggatcaggctgctttcatgtaacaggacattcagttgctcaagagcaaaggagcagcttggttatgaacctctcgtgtcccttaaggatggagtgaagagaacagtagagtcgtactcccatctacaagctcagaatcataggagtatatcaaaggcttcaattttcctcgggaatggaaatcttgcaaaaacagtactttgggaagatgcgaagcaaactgtgacagtgcttctactgttggctgttatctactaccacttatttacatgtagttacaccttcatcacagcgatggcaaagcttttgtcactaactgctctgttcttattcattcatggcatgctgccatcaaatctgttcggtcacaaggttgagaaactcgaggcctctaattttcacatcacccaggcacaggctcatcatattgctaattccattagttcgaattggaactctttagtcagtgcgctaagatctctttgtagaggaaatgattggctattgtttctcaaggtttcactatctctgctggttgtcagcatccttagttccatgtcttctcaggctgcatttaaaataggtactgctctggttttcacaggcttcaaagcgtatgagaaatgggaggacagcattgatagtatggtgggcgacgcctgtaccattcttctgcactttggttctgccaaggaatcatctagctagaaacaaacgtaggtgtagcttgcagactgccagttactttgtttactgatattatcttcagctccagctgtttctgggtttcgttgacct

SEQ ID NO: 27643 - protein, 583 aa, Zea mays subsp. mays
  peptide (1)..(583): Ceres Seq. ID no. 12406901
  misc_feature (40)..(391): Pfam Name: Pfam Description:  3-beta hydroxysteroid dehydrogenase/ isomerase family
  misc_feature (32)..(472): NCBI GI NO: 30694041 NR Description: 3-beta hydroxysteroid dehydrogenase/ isomerasefamily
  misc_feature (32)..(404): NCBI GI NO: 18401656 NR Description: 3-beta-hydroxysteroid dehydrogenase, putative
  misc_feature (32)..(404): NCBI GI NO: 21553411 NR Description: 3-beta-hydroxysteroid dehydrogenase, putative
  misc_feature (40)..(408): NCBI GI NO: 15225272 NR Description: 3-beta-hydroxysteroid dehydrogenase
  misc_feature (33)..(558): NCBI GI NO: 18406234 NR Description: putative sterol dehydrogenase
  misc_feature (284)..(565): NCBI GI NO: 21539467 NR Description: 3-beta-hydroxysteroid dehydrogenase
  misc_feature (40)..(243): NCBI GI NO: 23198272 NR Description: 3-beta-hydroxysteroid dehydrogenase
  misc_feature (114)..(377): NCBI GI NO: 25408868 NR Description: probable sterol dehydrogenase
  misc_feature (33)..(113): NCBI GI NO: 25408868 NR Description: probable sterol dehydrogenase
  misc_feature (95)..(391): NCBI GI NO: 8393516 NR Description: NAD
DSGARRSRAVVCLPPSLYPPRIRAAATAGREMEAVRGDGRWCVVTGGRGFAARHLVTMLLRSGEWRVRVADLGPAITLDRDEEEGFLGAALREGQAVYVSADLRDKAQVARAFEGAEVVFHMAAPDSSINNFHLHYGVNVDGTKNVIDTCIRCKVKRLIYTSSPSVVFDGVHGIFNADESMPYPDKFNDSYSETKADAEKLVMRANGREGLLTCCIRPSSIFGPGDKLMVPSLVAAARAGKSKYIIGDGNNYYDFTYVENVAYGHVCAEKTLSSEDGAKIAAGKTYFITNMEPIKFWEFMSLILEGLGYERPSVKIPVSVMMPVAHVVEWTYQKFAKYGMKVPQLTPSRIRLLSCNRTFSCSRAKEQLGYEPLVSLKDGVKRTVESYSHLQAQNHRSISKASIFLGNGNLAKTVLWEDAKQTVTVLLLLAVIYYHLFTCSYTFITAMAKLLSLTALFLFIHGMLPSNLFGHKVEKLEASNFHITQAQAHHIANSISSNWNSLVSALRSLCRGNDWLLFLKVSLSLLVVSILSSMSSQAAFKIGTALVFTGFKAYEKWEDSIDSMVGDACTILLHFGSAKESSS

SEQ ID NO: 27644 - protein, 552 aa, Zea mays subsp. mays
  peptide (1)..(552): Ceres Seq. ID no. 12406902
  misc_feature (9)..(360): Pfam Name: Pfam Description:  3-beta hydroxysteroid dehydrogenase/ isomerase family
  misc_feature (1)..(441): NCBI GI NO: 30694041 NR Description: 3-beta hydroxysteroid dehydrogenase/ isomerasefamily
  misc_feature (1)..(373): NCBI GI NO: 18401656 NR Description: 3-beta-hydroxysteroid dehydrogenase, putative
  misc_feature (1)..(373): NCBI GI NO: 21553411 NR Description: 3-beta-hydroxysteroid dehydrogenase, putative
  misc_feature (9)..(377): NCBI GI NO: 15225272 NR Description: 3-beta-hydroxysteroid dehydrogenase
  misc_feature (2)..(527): NCBI GI NO: 18406234 NR Description: putative sterol dehydrogenase
  misc_feature (253)..(534): NCBI GI NO: 21539467 NR Description: 3-beta-hydroxysteroid dehydrogenase
  misc_feature (9)..(212): NCBI GI NO: 23198272 NR Description: 3-beta-hydroxysteroid dehydrogenase
  misc_feature (83)..(346): NCBI GI NO: 25408868 NR Description: probable sterol dehydrogenase
  misc_feature (2)..(82): NCBI GI NO: 25408868 NR Description: probable sterol dehydrogenase
  misc_feature (64)..(360): NCBI GI NO: 8393516 NR Description: NAD
MEAVRGDGRWCVVTGGRGFAARHLVTMLLRSGEWRVRVADLGPAITLDRDEEEGFLGAALREGQAVYVSADLRDKAQVARAFEGAEVVFHMAAPDSSINNFHLHYGVNVDGTKNVIDTCIRCKVKRLIYTSSPSVVFDGVHGIFNADESMPYPDKFNDSYSETKADAEKLVMRANGREGLLTCCIRPSSIFGPGDKLMVPSLVAAARAGKSKYIIGDGNNYYDFTYVENVAYGHVCAEKTLSSEDGAKIAAGKTYFITNMEPIKFWEFMSLILEGLGYERPSVKIPVSVMMPVAHVVEWTYQKFAKYGMKVPQLTPSRIRLLSCNRTFSCSRAKEQLGYEPLVSLKDGVKRTVESYSHLQAQNHRSISKASIFLGNGNLAKTVLWEDAKQTVTVLLLLAVIYYHLFTCSYTFITAMAKLLSLTALFLFIHGMLPSNLFGHKVEKLEASNFHITQAQAHHIANSISSNWNSLVSALRSLCRGNDWLLFLKVSLSLLVVSILSSMSSQAAFKIGTALVFTGFKAYEKWEDSIDSMVGDACTILLHFGSAKESSS

SEQ ID NO: 27645 - protein, 526 aa, Zea mays subsp. mays
  peptide (1)..(526): Ceres Seq. ID no. 12406903
  misc_feature (1)..(334): Pfam Name: Pfam Description:  3-beta hydroxysteroid dehydrogenase/ isomerase family
  misc_feature (1)..(415): NCBI GI NO: 30694041 NR Description: 3-beta hydroxysteroid dehydrogenase/ isomerasefamily
  misc_feature (1)..(347): NCBI GI NO: 18401656 NR Description: 3-beta-hydroxysteroid dehydrogenase, putative
  misc_feature (1)..(347): NCBI GI NO: 21553411 NR Description: 3-beta-hydroxysteroid dehydrogenase, putative
  misc_feature (1)..(351): NCBI GI NO: 15225272 NR Description: 3-beta-hydroxysteroid dehydrogenase
  misc_feature (1)..(501): NCBI GI NO: 18406234 NR Description: putative sterol dehydrogenase
  misc_feature (227)..(508): NCBI GI NO: 21539467 NR Description: 3-beta-hydroxysteroid dehydrogenase
  misc_feature (1)..(186): NCBI GI NO: 23198272 NR Description: 3-beta-hydroxysteroid dehydrogenase
  misc_feature (57)..(320): NCBI GI NO: 25408868 NR Description: probable sterol dehydrogenase
  misc_feature (1)..(56): NCBI GI NO: 25408868 NR Description: probable sterol dehydrogenase
  misc_feature (38)..(334): NCBI GI NO: 8393516 NR Description: NAD
MLLRSGEWRVRVADLGPAITLDRDEEEGFLGAALREGQAVYVSADLRDKAQVARAFEGAEVVFHMAAPDSSINNFHLHYGVNVDGTKNVIDTCIRCKVKRLIYTSSPSVVFDGVHGIFNADESMPYPDKFNDSYSETKADAEKLVMRANGREGLLTCCIRPSSIFGPGDKLMVPSLVAAARAGKSKYIIGDGNNYYDFTYVENVAYGHVCAEKTLSSEDGAKIAAGKTYFITNMEPIKFWEFMSLILEGLGYERPSVKIPVSVMMPVAHVVEWTYQKFAKYGMKVPQLTPSRIRLLSCNRTFSCSRAKEQLGYEPLVSLKDGVKRTVESYSHLQAQNHRSISKASIFLGNGNLAKTVLWEDAKQTVTVLLLLAVIYYHLFTCSYTFITAMAKLLSLTALFLFIHGMLPSNLFGHKVEKLEASNFHITQAQAHHIANSISSNWNSLVSALRSLCRGNDWLLFLKVSLSLLVVSILSSMSSQAAFKIGTALVFTGFKAYEKWEDSIDSMVGDACTILLHFGSAKESSS

SEQ ID NO: 27646 - DNA, 1490 bp, Zea mays subsp. mays
  misc_feature (1)..(1490): Ceres Seq. ID no. 12356378
  misc_feature (1069)..(1069): n is a, c, t, g, unknown, or other
atcacgaatcaccaacaccctctcctccaccttccatcccgatcaccgccgccaccgctttcgttccacgtcccgatggcaccggtagatctaacccccaggcagccccggaaggcgtatggcggcgacgccggcgcctactacgagtggagcccagccgacctgcccatgctcggcgtcgcctccatcggcgcaggccaagctctccctcgccgccggtgggctctcgctccccagctactccgactcttccaaggtcgcgtacgttcttgaaggcactggcacctgcggcatcgtcctgccggaggcgaccaaggagaaggtgctggccgtgaaggagggcgacgccctcgcgctccccttcggcgtggtcacgtggtggcacaacggccccgccgcgccgacccagctcacggtcctcttcctcggcgacacctccaagggccacaggccggggcagttcaccaacttccagctgacgggcgcgagcggcatcttcacgggcttctccaccgagttcgtgtcgcgcgcgtgggacctgccggaggcgaacgccgcggcgctggtgtcgagccagccggcgtcgggcatcgtcagggcctcgtccccgctgccggcgccctcggcgcaggaccgcgagggggtggcgctcaactgcctggaggcgccgctggacgtggacatcccgggcgggggccgcgtggtggtgctcaacacggcgaacctgcccctggtcagggaggtcgggctgggcgccgacctggtccgcatcgacgcgcactccatgtgctccccgggcttctcgtgcgactcggcgtaccaggtcacctacatcgtgcgcggcagcgggcgcgtgcaggtggtcgggcccgacggggtgcgcgtcctggagacgcgcgtcgagggcggcttcctcttcatcgtgccccgcttccacgtggtgtccaagatcgcggacgcgtcgggcatggaatggttctccatcatcaccacccccaacccgatcttcagccatctggccggaaagacgtcggtgtggaaagccatctcggcggaggtgctgcaggcntcgttcaacaccacgccggagatggagaagctgttccggtccaagaggcttgactcggagatcttcttcgcgcccccgtccaactgagcaaataggcggaagcccacggtggagtgctctcgtgaagtcgtcgtggttagattagcattagcttagctcgccttaataaagagagaatggtggtggtcctcggctcactgcttcttcagtagcttcagtcgttcagtggttcagtcgttgcgtcggtcggttgtcgtgtccgttcgtcgaactgccaagttttgttaattattattattgtcaccctctgttttgtctaggtctagggctggaaaaaaactttaagccgcggcttgttcaggctcgcgagctatattgttttaattaatctataaaataataataaatattataattctat

SEQ ID NO: 27647 - protein, 345 aa, Zea mays subsp. mays
  peptide (1)..(345): Ceres Seq. ID no. 12356379
  misc_feature (178)..(326): Pfam Name: Pfam Description:  Cupin
  misc_feature (27)..(345): NCBI GI NO: 28950668 NR Description: legumin-like protein [Zea mays]
  misc_feature (17)..(345): NCBI GI NO: 28950670 NR Description: legumin-like protein [Zea mays]
  misc_feature (1)..(345): NCBI GI NO: 37730876 NR Description: legumin-like protein [Zea mays]
  misc_feature (27)..(345): NCBI GI NO: 34906084 NR Description: putative legumin-like protein
  misc_feature (27)..(345): NCBI GI NO: 15226926 NR Description: legumin-like protein; protein id: At2g28680.1
  misc_feature (27)..(345): NCBI GI NO: 21593610 NR Description: globulin-like protein [Arabidopsis thaliana]
  misc_feature (27)..(345): NCBI GI NO: 15223000 NR Description: globulin-like protein; protein id: At1g07750
  misc_feature (28)..(168): NCBI GI NO: 7595348 NR Description: globulin-like protein [Cucumis melo]
  misc_feature (186)..(339): NCBI GI NO: 29839254 NR Description: 13S globulin seed storage protein 1 precursor
  misc_feature (67)..(124): NCBI GI NO: 29839254 NR Description: 13S globulin seed storage protein 1 precursor
  misc_feature (317)..(317): Xaa is any aa, unknown or other
MAATPAPTTSGAQPTCPCSASPPSAQAKLSLAAGGLSLPSYSDSSKVAYVLEGTGTCGIVLPEATKEKVLAVKEGDALALPFGVVTWWHNGPAAPTQLTVLFLGDTSKGHRPGQFTNFQLTGASGIFTGFSTEFVSRAWDLPEANAAALVSSQPASGIVRASSPLPAPSAQDREGVALNCLEAPLDVDIPGGGRVVVLNTANLPLVREVGLGADLVRIDAHSMCSPGFSCDSAYQVTYIVRGSGRVQVVGPDGVRVLETRVEGGFLFIVPRFHVVSKIADASGMEWFSIITTPNPIFSHLAGKTSVWKAISAEVLQXSFNTTPEMEKLFRSKRLDSEIFFAPPSN

SEQ ID NO: 27648 - DNA, 1071 bp, Zea mays subsp. mays
  misc_feature (1)..(1071): Ceres Seq. ID no. 12402571
aactgcccaacaaacgatggccggcgtgtcagcaagcatcccgtgcgtggtgctcaacacgggccacgcgatgcccgtgctgggcttcgggaccggctcctccagcacgccggaggatctgccggcgaccatcctccacgccgtccgccttggctaccgccacatcgacacggcctccatgtacggcacggagggggcggtcggagccgccgtctccgacgccgtcgctgcgggggccgtcacctcccgcgctgacctcttcatcacctccaagctcgtgatgaaggacgcgcatccggaccgcgtgctccccgcgatccgggagtcgctggcccgcctaggcctggactacctcgacctcttcctcgtccactggcccgtcgccgccgacgagaacaacaagcccgtgccgttcgacatggaaggcgtctggcacgccatggaggagtgccaccgcatcggccttgctaggtccgtcggcgtcagcaacttctctgcggccaagatgtcccggctgctcgccttcgccgccgtaccgccggctgtgaaccaggtggaggtgaacgtcggctggcgtcaagagaaggtcagggaggcctgcgccaagaacggcgtcgtcgtcaccgccttctcgccgctgggcgcgatcggcacggcgtggggatccaacgccgtcatggaaagcggcgcgctggaggacatcgccgccaggagaggcaagaccattgctcaggtagcgttgaggtggcttcacgagcaaggggtgtgctttgtggcgaggagctttaacaaggagaggttgaagcaaaacatggagcttttcgattgggagttgagcgtcgatgacaaggagaagatcatggggattccacagaggagagcatgccgtgcagagttctttttgtcaccagacgggccgtacaagaccttggaggagctatgggacggggagatatgagataccatgtagctgttgtatctattgtttgtcgacatcgttgttgcttgctgctgtggggaaatatcttcggaatactctctgaatgaatgtggactaacagttggtcctgg

SEQ ID NO: 27649 - protein, 318 aa, Zea mays subsp. mays
  peptide (1)..(318): Ceres Seq. ID no. 12402572
  misc_feature (5)..(318): NCBI GI NO: 21742554 NR Description: OSJNBb0089K06.1
  misc_feature (13)..(318): NCBI GI NO: 2792155 NR Description: chalcone reductase [Sesbania rostrata]
  misc_feature (21)..(318): NCBI GI NO: 27357979 NR Description: Putative NADPH-dependent oxidoreductase
  misc_feature (24)..(318): NCBI GI NO: 37530522 NR Description: putative NADPH-dependent oxidoreductase
  misc_feature (6)..(318): NCBI GI NO: 40781599 NR Description: reductase 1 [Hydrangea macrophylla]
  misc_feature (7)..(318): NCBI GI NO: 37530540 NR Description: putative NADPH-dependent oxidoreductase
  misc_feature (24)..(316): NCBI GI NO: 37530524 NR Description: putative NADPH-dependent oxidoreductase
  misc_feature (13)..(318): NCBI GI NO: 6478216 NR Description: putative NADPH-dependent oxidoreductase
  misc_feature (12)..(317): NCBI GI NO: 40781598 NR Description: reductase 2 [Hydrangea macrophylla]
  misc_feature (12)..(318): NCBI GI NO: 15218960 NR Description: aldo/keto reductase, putative
TAQQTMAGVSASIPCVVLNTGHAMPVLGFGTGSSSTPEDLPATILHAVRLGYRHIDTASMYGTEGAVGAAVSDAVAAGAVTSRADLFITSKLVMKDAHPDRVLPAIRESLARLGLDYLDLFLVHWPVAADENNKPVPFDMEGVWHAMEECHRIGLARSVGVSNFSAAKMSRLLAFAAVPPAVNQVEVNVGWRQEKVREACAKNGVVVTAFSPLGAIGTAWGSNAVMESGALEDIAARRGKTIAQVALRWLHEQGVCFVARSFNKERLKQNMELFDWELSVDDKEKIMGIPQRRACRAEFFLSPDGPYKTLEELWDGEI

SEQ ID NO: 27650 - protein, 313 aa, Zea mays subsp. mays
  peptide (1)..(313): Ceres Seq. ID no. 12402573
  misc_feature (1)..(313): NCBI GI NO: 21742554 NR Description: OSJNBb0089K06.1
  misc_feature (8)..(313): NCBI GI NO: 2792155 NR Description: chalcone reductase [Sesbania rostrata]
  misc_feature (16)..(313): NCBI GI NO: 27357979 NR Description: Putative NADPH-dependent oxidoreductase
  misc_feature (19)..(313): NCBI GI NO: 37530522 NR Description: putative NADPH-dependent oxidoreductase
  misc_feature (1)..(313): NCBI GI NO: 40781599 NR Description: reductase 1 [Hydrangea macrophylla]
  misc_feature (2)..(313): NCBI GI NO: 37530540 NR Description: putative NADPH-dependent oxidoreductase
  misc_feature (19)..(311): NCBI GI NO: 37530524 NR Description: putative NADPH-dependent oxidoreductase
  misc_feature (8)..(313): NCBI GI NO: 6478216 NR Description: putative NADPH-dependent oxidoreductase
  misc_feature (7)..(312): NCBI GI NO: 40781598 NR Description: reductase 2 [Hydrangea macrophylla]
  misc_feature (7)..(313): NCBI GI NO: 15218960 NR Description: aldo/keto reductase, putative
MAGVSASIPCVVLNTGHAMPVLGFGTGSSSTPEDLPATILHAVRLGYRHIDTASMYGTEGAVGAAVSDAVAAGAVTSRADLFITSKLVMKDAHPDRVLPAIRESLARLGLDYLDLFLVHWPVAADENNKPVPFDMEGVWHAMEECHRIGLARSVGVSNFSAAKMSRLLAFAAVPPAVNQVEVNVGWRQEKVREACAKNGVVVTAFSPLGAIGTAWGSNAVMESGALEDIAARRGKTIAQVALRWLHEQGVCFVARSFNKERLKQNMELFDWELSVDDKEKIMGIPQRRACRAEFFLSPDGPYKTLEELWDGEI

SEQ ID NO: 27651 - protein, 295 aa, Zea mays subsp. mays
  peptide (1)..(295): Ceres Seq. ID no. 12402574
  misc_feature (1)..(295): NCBI GI NO: 21742554 NR Description: OSJNBb0089K06.1
  misc_feature (1)..(295): NCBI GI NO: 2792155 NR Description: chalcone reductase [Sesbania rostrata]
  misc_feature (1)..(295): NCBI GI NO: 27357979 NR Description: Putative NADPH-dependent oxidoreductase
  misc_feature (1)..(295): NCBI GI NO: 37530522 NR Description: putative NADPH-dependent oxidoreductase
  misc_feature (1)..(295): NCBI GI NO: 40781599 NR Description: reductase 1 [Hydrangea macrophylla]
  misc_feature (1)..(295): NCBI GI NO: 37530540 NR Description: putative NADPH-dependent oxidoreductase
  misc_feature (1)..(293): NCBI GI NO: 37530524 NR Description: putative NADPH-dependent oxidoreductase
  misc_feature (1)..(295): NCBI GI NO: 6478216 NR Description: putative NADPH-dependent oxidoreductase
  misc_feature (1)..(294): NCBI GI NO: 40781598 NR Description: reductase 2 [Hydrangea macrophylla]
  misc_feature (1)..(295): NCBI GI NO: 15218960 NR Description: aldo/keto reductase, putative
MPVLGFGTGSSSTPEDLPATILHAVRLGYRHIDTASMYGTEGAVGAAVSDAVAAGAVTSRADLFITSKLVMKDAHPDRVLPAIRESLARLGLDYLDLFLVHWPVAADENNKPVPFDMEGVWHAMEECHRIGLARSVGVSNFSAAKMSRLLAFAAVPPAVNQVEVNVGWRQEKVREACAKNGVVVTAFSPLGAIGTAWGSNAVMESGALEDIAARRGKTIAQVALRWLHEQGVCFVARSFNKERLKQNMELFDWELSVDDKEKIMGIPQRRACRAEFFLSPDGPYKTLEELWDGEI

SEQ ID NO: 27652 - DNA, 481 bp, Zea mays subsp. mays
  misc_feature (1)..(481): Ceres Seq. ID no. 1404853
gccaattggacctttccaattacaagatgtgtctggatatggagtgggcttgacagtaaaggacatctacgcagctgcctttggagaacgaaatttcagctctgagttgatggatttgatggtacagaatgggcggcatggaaagagtaatggcaaaggctattacatttatatgaagggtgagaagccaaagcctgaccctagtgttcagcatgtgattgaggagtaccgaaaacgtgtgaagataatgcctggtggaaagcctgtgacattaacagatcaagacatattggagatgattttbttcccagttgtgaatgaggcatgtagggttatggatgaaaatgttgtgattcgggcttctgatcttgatattgcatctgtccttggaatgggttttcccaagtacaggggtggcctcgttttctgggctgacactgttggggcacttatatacattcaaagctaagcaagtgggctg

SEQ ID NO: 27653 - protein, 155 aa, Zea mays subsp. mays
  peptide (1)..(155): Ceres Seq. ID no. 1404854
  misc_feature (1)..(57): Pfam Name: Pfam Description:  3-hydroxyacyl-CoA dehydrogenase
  misc_feature (1)..(155): NCBI GI NO: 39931684 NR Description: Peroxisomal fatty acid beta-oxidationmultifunctional
  misc_feature (1)..(148): NCBI GI NO: 15235527 NR Description: AIM1 protein; protein id: At4g29010
  misc_feature (1)..(149): NCBI GI NO: 34895142 NR Description: putative tetrafunctional protein of glyoxysomalfatty acid beta-oxidation
  misc_feature (1)..(155): NCBI GI NO: 551444 NR Description: protein MFP-b [Cucumis sativus]
  misc_feature (1)..(155): NCBI GI NO: 34922495 NR Description: Glyoxysomal fatty acid beta-oxidationmultifunctional protein MFP-a
  misc_feature (1)..(155): NCBI GI NO: 15231317 NR Description: fatty acid multifunctional protein
  misc_feature (1)..(155): NCBI GI NO: 34922417 NR Description: Glyoxysomal fatty acid beta-oxidationmultifunctional protein MFP-a
  misc_feature (1)..(149): NCBI GI NO: 34897626 NR Description: putative tetrafunctional protein for glyoxysomalfatty acid beta-oxidation
  misc_feature (1)..(148): NCBI GI NO: 27382932 NR Description: bll7821 [Bradyrhizobium japonicum]
  misc_feature (1)..(148): NCBI GI NO: 22960932 NR Description: hypothetical protein [Rhodopseudomonas palustris]
  misc_feature (101)..(101): Xaa is any aa, unknown or other
PIGPFQLQDVSGYGVGLTVKDIYAAAFGERNFSSELMDLMVQNGRHGKSNGKGYYIYMKGEKPKPDPSVQHVIEEYRKRVKIMPGGKPVTLTDQDILEMIXFPVVNEACRVMDENVVIRASDLDIASVLGMGFPKYRGGLVFWADTVGALIYIQS

SEQ ID NO: 27654 - protein, 119 aa, Zea mays subsp. mays
  peptide (1)..(119): Ceres Seq. ID no. 1404855
  misc_feature (1)..(119): NCBI GI NO: 39931684 NR Description: Peroxisomal fatty acid beta-oxidationmultifunctional
  misc_feature (1)..(112): NCBI GI NO: 15235527 NR Description: AIM1 protein; protein id: At4g29010
  misc_feature (1)..(113): NCBI GI NO: 34895142 NR Description: putative tetrafunctional protein of glyoxysomalfatty acid beta-oxidation
  misc_feature (1)..(119): NCBI GI NO: 551444 NR Description: protein MFP-b [Cucumis sativus]
  misc_feature (1)..(119): NCBI GI NO: 34922495 NR Description: Glyoxysomal fatty acid beta-oxidationmultifunctional protein MFP-a
  misc_feature (1)..(119): NCBI GI NO: 15231317 NR Description: fatty acid multifunctional protein
  misc_feature (1)..(119): NCBI GI NO: 34922417 NR Description: Glyoxysomal fatty acid beta-oxidationmultifunctional protein MFP-a
  misc_feature (1)..(113): NCBI GI NO: 34897626 NR Description: putative tetrafunctional protein for glyoxysomalfatty acid beta-oxidation
  misc_feature (1)..(112): NCBI GI NO: 27382932 NR Description: bll7821 [Bradyrhizobium japonicum]
  misc_feature (1)..(112): NCBI GI NO: 22960932 NR Description: hypothetical protein [Rhodopseudomonas palustris]
  misc_feature (65)..(65): Xaa is any aa, unknown or other
MDLMVQNGRHGKSNGKGYYIYMKGEKPKPDPSVQHVIEEYRKRVKIMPGGKPVTLTDQDILEMIXFPVVNEACRVMDENVVIRASDLDIASVLGMGFPKYRGGLVFWADTVGALIYIQS

SEQ ID NO: 27655 - protein, 116 aa, Zea mays subsp. mays
  peptide (1)..(116): Ceres Seq. ID no. 1404856
  misc_feature (1)..(116): NCBI GI NO: 39931684 NR Description: Peroxisomal fatty acid beta-oxidationmultifunctional
  misc_feature (1)..(109): NCBI GI NO: 15235527 NR Description: AIM1 protein; protein id: At4g29010
  misc_feature (1)..(110): NCBI GI NO: 34895142 NR Description: putative tetrafunctional protein of glyoxysomalfatty acid beta-oxidation
  misc_feature (1)..(116): NCBI GI NO: 551444 NR Description: protein MFP-b [Cucumis sativus]
  misc_feature (1)..(116): NCBI GI NO: 34922495 NR Description: Glyoxysomal fatty acid beta-oxidationmultifunctional protein MFP-a
  misc_feature (1)..(116): NCBI GI NO: 15231317 NR Description: fatty acid multifunctional protein
  misc_feature (1)..(116): NCBI GI NO: 34922417 NR Description: Glyoxysomal fatty acid beta-oxidationmultifunctional protein MFP-a
  misc_feature (1)..(110): NCBI GI NO: 34897626 NR Description: putative tetrafunctional protein for glyoxysomalfatty acid beta-oxidation
  misc_feature (1)..(109): NCBI GI NO: 27382932 NR Description: bll7821 [Bradyrhizobium japonicum]
  misc_feature (1)..(109): NCBI GI NO: 22960932 NR Description: hypothetical protein [Rhodopseudomonas palustris]
  misc_feature (62)..(62): Xaa is any aa, unknown or other
MVQNGRHGKSNGKGYYIYMKGEKPKPDPSVQHVIEEYRKRVKIMPGGKPVTLTDQDILEMIXFPVVNEACRVMDENVVIRASDLDIASVLGMGFPKYRGGLVFWADTVGALIYIQS

SEQ ID NO: 27656 - DNA, 1198 bp, Zea mays subsp. mays
  misc_feature (1)..(1198): Ceres Seq. ID no. 12373616
gaagcagtcgtacttgtacactccttgtctccttcgctttggcacactggacacgtccaccacgtgaacacgtcaacagaagtgacccatcaaggggcccacaggtccacgagcccgagtgacgactgacgacagatcgcttgtgcgtcgctaacccgccgctagtcggctagtgggtgggaaatccgcagattcccgtcgctacttcggccacatggctgcagcggcggcgtggaccggcgccgcatcccccaactcgctgctgctctcgcgctcgcctccccacgccgccgcgctcgcgccttcgccgggaagctccatgcggaggcggctcctcctcggcgtcggcaccccggccgtggcggcgctggcggccgcggcgccgccagcggtgctgcaggacggagcggtcactgtgctcatcaccgccggcgcctactctcttgtgcgcgtcttcgacgagctcaccgagcggcggctcatcgaaaagagcttgagcaggaaggttgtgcacgtgctatccggcgtcctgttcatgtcatcttggcccctgttcagcaattcgacagaagcacggtatttcgccgcggttgtcccgttcctgaactccatgaggcttctgatatatggactccgtctctacactgatgaagctctggtaaaatcagtgacacgtgaaggaaaaccagaggaattgctgagaggtccactctattatgtcctggtgctgctgttcagcgttttagtcttctggcgtgagtcccccatcgggatcgtctccttgtcgatgatgagcggtggcgatggttttgctgacattgttgggaggaggtatggctcagcgaagctgccattcaatcggaagaagagctgggccgggagcatctcgatgttcatttctggtttcctgctgtccgcgatgatgatgctctacttctcaagcctgggttacattgatgttatctgggaagaggcacttggtaagctggcgcttgttgcactagcagcgacagtagtggagtgcgttcctgtgactgaagttgtagatgacaacatatctgttcctttggccaccatgctggtagcttttctcttgtttagctccaaccgcacaatagttaattaaaatactactagtgcattatttaagacatgtgatgagttcttcagtgatgagttgtgcttacttttgcttcct

SEQ ID NO: 27657 - protein, 303 aa, Zea mays subsp. mays
  peptide (1)..(303): Ceres Seq. ID no. 12373617
  misc_feature (53)..(295): NCBI GI NO: 21537252 NR Description: unknown [Arabidopsis thaliana]
  misc_feature (53)..(295): NCBI GI NO: 15238184 NR Description: putative protein; protein id: At5g04490
  misc_feature (53)..(295): NCBI GI NO: 28393229 NR Description: unknown protein [Arabidopsis thaliana]
  misc_feature (10)..(295): NCBI GI NO: 34907982 NR Description: P0446G04.23
  misc_feature (21)..(295): NCBI GI NO: 15237702 NR Description: putative protein; protein id: At5g58560
  misc_feature (21)..(295): NCBI GI NO: 21593148 NR Description: unknown [Arabidopsis thaliana]
  misc_feature (21)..(248): NCBI GI NO: 8843778 NR Description: emb|CAB85555
  misc_feature (58)..(294): NCBI GI NO: 21674801 NR Description: conserved hypothetical protein
  misc_feature (98)..(294): NCBI GI NO: 28850457 NR Description: similar to Oryza sativa (japonica cultivar-group)
  misc_feature (75)..(292): NCBI GI NO: 11498907 NR Description: conserved hypothetical protein
MAAAAAWTGAASPNSLLLSRSPPHAAALAPSPGSSMRRRLLLGVGTPAVAALAAAAPPAVLQDGAVTVLITAGAYSLVRVFDELTERRLIEKSLSRKVVHVLSGVLFMSSWPLFSNSTEARYFAAVVPFLNSMRLLIYGLRLYTDEALVKSVTREGKPEELLRGPLYYVLVLLFSVLVFWRESPIGIVSLSMMSGGDGFADIVGRRYGSAKLPFNRKKSWAGSISMFISGFLLSAMMMLYFSSLGYIDVIWEEALGKLALVALAATVVECVPVTEVVDDNISVPLATMLVAFLLFSSNRTIVN

SEQ ID NO: 27658 - protein, 268 aa, Zea mays subsp. mays
  peptide (1)..(268): Ceres Seq. ID no. 12373618
  misc_feature (18)..(260): NCBI GI NO: 21537252 NR Description: unknown [Arabidopsis thaliana]
  misc_feature (18)..(260): NCBI GI NO: 15238184 NR Description: putative protein; protein id: At5g04490
  misc_feature (18)..(260): NCBI GI NO: 28393229 NR Description: unknown protein [Arabidopsis thaliana]
  misc_feature (1)..(260): NCBI GI NO: 34907982 NR Description: P0446G04.23
  misc_feature (1)..(260): NCBI GI NO: 15237702 NR Description: putative protein; protein id: At5g58560
  misc_feature (1)..(260): NCBI GI NO: 21593148 NR Description: unknown [Arabidopsis thaliana]
  misc_feature (1)..(213): NCBI GI NO: 8843778 NR Description: emb|CAB85555
  misc_feature (23)..(259): NCBI GI NO: 21674801 NR Description: conserved hypothetical protein
  misc_feature (63)..(259): NCBI GI NO: 28850457 NR Description: similar to Oryza sativa (japonica cultivar-group)
  misc_feature (40)..(257): NCBI GI NO: 11498907 NR Description: conserved hypothetical protein
MRRRLLLGVGTPAVAALAAAAPPAVLQDGAVTVLITAGAYSLVRVFDELTERRLIEKSLSRKVVHVLSGVLFMSSWPLFSNSTEARYFAAVVPFLNSMRLLIYGLRLYTDEALVKSVTREGKPEELLRGPLYYVLVLLFSVLVFWRESPIGIVSLSMMSGGDGFADIVGRRYGSAKLPFNRKKSWAGSISMFISGFLLSAMMMLYFSSLGYIDVIWEEALGKLALVALAATVVECVPVTEVVDDNISVPLATMLVAFLLFSSNRTIVN

SEQ ID NO: 27659 - protein, 196 aa, Zea mays subsp. mays
  peptide (1)..(196): Ceres Seq. ID no. 12373619
  misc_feature (1)..(188): NCBI GI NO: 21537252 NR Description: unknown [Arabidopsis thaliana]
  misc_feature (1)..(188): NCBI GI NO: 15238184 NR Description: putative protein; protein id: At5g04490
  misc_feature (1)..(188): NCBI GI NO: 28393229 NR Description: unknown protein [Arabidopsis thaliana]
  misc_feature (1)..(188): NCBI GI NO: 34907982 NR Description: P0446G04.23
  misc_feature (1)..(188): NCBI GI NO: 15237702 NR Description: putative protein; protein id: At5g58560
  misc_feature (1)..(188): NCBI GI NO: 21593148 NR Description: unknown [Arabidopsis thaliana]
  misc_feature (1)..(141): NCBI GI NO: 8843778 NR Description: emb|CAB85555
  misc_feature (1)..(187): NCBI GI NO: 21674801 NR Description: conserved hypothetical protein
  misc_feature (1)..(187): NCBI GI NO: 28850457 NR Description: similar to Oryza sativa (japonica cultivar-group)
  misc_feature (1)..(185): NCBI GI NO: 11498907 NR Description: conserved hypothetical protein
MSSWPLFSNSTEARYFAAVVPFLNSMRLLIYGLRLYTDEALVKSVTREGKPEELLRGPLYYVLVLLFSVLVFWRESPIGIVSLSMMSGGDGFADIVGRRYGSAKLPFNRKKSWAGSISMFISGFLLSAMMMLYFSSLGYIDVIWEEALGKLALVALAATVVECVPVTEVVDDNISVPLATMLVAFLLFSSNRTIVN

SEQ ID NO: 27660 - DNA, 1315 bp, Zea mays subsp. mays
  misc_feature (1)..(1315): Ceres Seq. ID no. 12344153
accgaaaaaaaaattccccatgtgggaacgtggtggttgttcgcggggacggcgactggtacttttttgtcgctgcggagacggggagtcttccgactcttccccaacgggaattcctcactcacatccctacgcacgaacggaaacgccccgtgctgcgctcgcagtctcgcatggagtccaccactgctgctgctaccgcggcggcggcgccggcaccggtgctgctggtgacgaacgacgacggaatcgacgcgccggggctccgcttccttgtcgaccgtctcgtcgccgcagggcgataccgcgtactcgtctgcgcgcccgacacagacaaatcgggtgtgagccactgcatcacatggcgccctgcactccgctgtaaacgtgttgatataataggtgctacagcatttggagtttcaggaactcctgctgactgtgcttctttaggcatctctggaaaactatttgatggtttggttcctgatctggtacttagtggaatcaacattggaaataattgtgggtaccatgtcatttattctggaacagttgctggtgctagggaggcattcttatacgggattcctgcaatagctatgtcatatgattgggttgcgggtcggagcagtgttaatgacctcaaggtgtctgcagaggtctgcatgcctctgataaatgctatcgtgactgagatcaagaatgggacttaccctcaaggatcattcttgaatgtagatgtacctacagatgctgcgcaccacaagggctacaaaattacaaaacaaggaacatatatggcagaattagttgggagcagacggtttacaagaagcctgcagtagaaagttaccagacagcaaacatggatgttgatggtgaaaaggatagcgaactagttacttcagaaaatgacctactgtttaagagagtgattgtagggagaagttccaatggagtggaaggagaggaaacggaccataattccctagttgatggatatatcactgttactcctttgggtgctctttcccgcacagaaccagacgccataccctatttcaaagcttgtgtctcacgtctggttgataatttctcttctcctggctcttctttttctagaagcagaggatgagccatgaaatttctaaagctgtttatttatcgcaatgatcaagttccacactgctttttcctaccccataacattgttaccatacatgggcaatattgccattcttgctacctgaatgttattactgcaatcagcatgtgtattctgcttcatagcctatgtcagaattatgcattc

SEQ ID NO: 27661 - protein, 281 aa, Zea mays subsp. mays
  peptide (1)..(281): Ceres Seq. ID no. 12344154
  misc_feature (73)..(270): Pfam Name: Pfam Description:  Survival protein SurE
  misc_feature (58)..(270): NCBI GI NO: 33146601 NR Description: putative stationary phase survival protein SurE
  misc_feature (73)..(281): NCBI GI NO: 18414342 NR Description: expressed protein; protein id: At4g14930
  misc_feature (73)..(179): NCBI GI NO: 7485145 NR Description: hypothetical protein - Arabidopsis thaliana
  misc_feature (180)..(256): NCBI GI NO: 7485145 NR Description: hypothetical protein - Arabidopsis thaliana
  misc_feature (73)..(266): NCBI GI NO: 15218620 NR Description: unknown protein; protein id: At1g72880.1
  misc_feature (73)..(179): NCBI GI NO: 25406225 NR Description: hypothetical protein F3N23.8
  misc_feature (210)..(266): NCBI GI NO: 25406225 NR Description: hypothetical protein F3N23.8
  misc_feature (75)..(264): NCBI GI NO: 22996110 NR Description: hypothetical protein [Xylella fastidiosa Ann-1]
  misc_feature (75)..(264): NCBI GI NO: 22995265 NR Description: hypothetical protein [Xylella fastidiosa Dixon]
  misc_feature (73)..(264): NCBI GI NO: 15606188 NR Description: stationary phase survival protein SurE
RKKNSPCGNVVVVRGDGDWYFFVAAETGSLPTLPQREFLTHIPTHERKRPVLRSQSRMESTTAAATAAAAPAPVLLVTNDDGIDAPGLRFLVDRLVAAGRYRVLVCAPDTDKSGVSHCITWRPALRCKRVDIIGATAFGVSGTPADCASLGISGKLFDGLVPDLVLSGINIGNNCGYHVIYSGTVAGAREAFLYGIPAIAMSYDWVAGRSSVNDLKVSAEVCMPLINAIVTEIKNGTYPQGSFLNVDVPTDAAHHKGYKITKQGTYMAELVGSRRFTRSLQ

SEQ ID NO: 27662 - protein, 224 aa, Zea mays subsp. mays
  peptide (1)..(224): Ceres Seq. ID no. 12344155
  misc_feature (16)..(213): Pfam Name: Pfam Description:  Survival protein SurE
  misc_feature (1)..(213): NCBI GI NO: 33146601 NR Description: putative stationary phase survival protein SurE
  misc_feature (16)..(224): NCBI GI NO: 18414342 NR Description: expressed protein; protein id: At4g14930
  misc_feature (16)..(122): NCBI GI NO: 7485145 NR Description: hypothetical protein - Arabidopsis thaliana
  misc_feature (123)..(199): NCBI GI NO: 7485145 NR Description: hypothetical protein - Arabidopsis thaliana
  misc_feature (16)..(209): NCBI GI NO: 15218620 NR Description: unknown protein; protein id: At1g72880.1
  misc_feature (16)..(122): NCBI GI NO: 25406225 NR Description: hypothetical protein F3N23.8
  misc_feature (153)..(209): NCBI GI NO: 25406225 NR Description: hypothetical protein F3N23.8
  misc_feature (18)..(207): NCBI GI NO: 22996110 NR Description: hypothetical protein [Xylella fastidiosa Ann-1]
  misc_feature (18)..(207): NCBI GI NO: 22995265 NR Description: hypothetical protein [Xylella fastidiosa Dixon]
  misc_feature (16)..(207): NCBI GI NO: 15606188 NR Description: stationary phase survival protein SurE
MESTTAAATAAAAPAPVLLVTNDDGIDAPGLRFLVDRLVAAGRYRVLVCAPDTDKSGVSHCITWRPALRCKRVDIIGATAFGVSGTPADCASLGISGKLFDGLVPDLVLSGINIGNNCGYHVIYSGTVAGAREAFLYGIPAIAMSYDWVAGRSSVNDLKVSAEVCMPLINAIVTEIKNGTYPQGSFLNVDVPTDAAHHKGYKITKQGTYMAELVGSRRFTRSLQ

SEQ ID NO: 27663 - DNA, 1371 bp, Zea mays subsp. mays
  misc_feature (1)..(1371): Ceres Seq. ID no. 12373612
tccgccttctgctctctctcgcctctggtgcgcagagctagctctcttgaagcctcgagactcgtctcgccgctgctctgctctgctccccagctctgccgctgcgtgcctgcgtcagttgttgcattgcagccagcgagccttgagctgctagctctctcttcaccacagttcacaggcatggagttcgaggatcgctgccacaaggtccaggagcccaagttcgactgcctgctcttcgacctcgacgacaccctgtatccgctgagctccgggatcgcgggccatgtcaagaagaacattgaagattacatggtcgagaagctgggtattgacgagagcaagatcgagaacctgggaaatctgctgtacaagaactacggcaccacgatggctggcctcagggcgatcggctacagcttcgattacgatgagtaccacgccttcgtccatggaaggctgccgtacgacaacatcaagcccgaccctgttctcaagcacattctcaagaacctgcccatccgcaaactcatattcaccaacggcgacaaggtccacgccgtgagagccctggagaggctgggcctggaggactgcttcgaggggatcatctgcttcgagaccctgaacccgccgtgcccgcctcagggagaccgggaggccgagatcttcgacatcgccggccacttcgcccgctccggcgccgccgccgagctgcccaagacccccgtcctgtgcaagcccaacgtcgacgccatggaggaggcgctcaggatcgccaacgtcaacccgcacaaggcgattttcttcgacgacagcgtacgcaacatccaggccgggaagcagatcggccttcacacagtgctggtgggcaagtcgcagcgggtgaaaggcgcggaccacgcgctggagagcatccacaacgtcagggaggcgctgccggggctgtgggaggaggccgagaaggcggaggacgtgctctacgccgagcgcgtcgccatggagacctcggtcaccgcgtaaacccctctctcgaatcctccggtgcaccgtcagcccaaccttctcgacatccaggaccgggacgatcgcataccactctctccccgagccagggctggtggtttcacgctggaactgaatccagccatggccgggccgagaatttccgacagcaagaaggggtgcagcatgtaaaggggggagcagatgatatcatgtttgggatgctcccagatatgtatagttatgtatcagccagttgtttgtaaattaccaataaatattagaagtaataagaaaaaatggagtttacttgtacgtttcttgtgctctgtcatctgaagtaataaaagcggttagcaagaatgg

SEQ ID NO: 27664 - protein, 340 aa, Zea mays subsp. mays
  peptide (1)..(340): Ceres Seq. ID no. 12373613
  misc_feature (75)..(293): Pfam Name: Pfam Description:  haloacid dehalogenase-like hydrolase
  misc_feature (61)..(211): NCBI GI NO: 7406669 NR Description: putative ripening-related protein [Vitis vinifera]
  misc_feature (222)..(340): NCBI GI NO: 7406669 NR Description: putative ripening-related protein [Vitis vinifera]
  misc_feature (61)..(340): NCBI GI NO: 15241720 NR Description: putative protein; protein id: At5g02230
  misc_feature (61)..(340): NCBI GI NO: 21593165 NR Description: unknown [Arabidopsis thaliana]
  misc_feature (61)..(336): NCBI GI NO: 30697234 NR Description: haloacid dehalogenase-like hydrolase family
  misc_feature (61)..(336): NCBI GI NO: 30697236 NR Description: haloacid dehalogenase-like hydrolase family
  misc_feature (61)..(336): NCBI GI NO: 21618155 NR Description: putative ripening-related protein-like
  misc_feature (73)..(340): NCBI GI NO: 8885554 NR Description: ripening-related protein-like; hydrolase-like
  misc_feature (73)..(340): NCBI GI NO: 15238429 NR Description: putative ripening-related protein - like
  misc_feature (70)..(340): NCBI GI NO: 40714684 NR Description: expressed protein
SAFCSLSPLVRRASSLEASRLVSPLLCSAPQLCRCVPASVVALQPASLELLALSSPQFTGMEFEDRCHKVQEPKFDCLLFDLDDTLYPLSSGIAGHVKKNIEDYMVEKLGIDESKIENLGNLLYKNYGTTMAGLRAIGYSFDYDEYHAFVHGRLPYDNIKPDPVLKHILKNLPIRKLIFTNGDKVHAVRALERLGLEDCFEGIICFETLNPPCPPQGDREAEIFDIAGHFARSGAAAELPKTPVLCKPNVDAMEEALRIANVNPHKAIFFDDSVRNIQAGKQIGLHTVLVGKSQRVKGADHALESIHNVREALPGLWEEAEKAEDVLYAERVAMETSVTA

SEQ ID NO: 27665 - protein, 280 aa, Zea mays subsp. mays
  peptide (1)..(280): Ceres Seq. ID no. 12373614
  misc_feature (15)..(233): Pfam Name: Pfam Description:  haloacid dehalogenase-like hydrolase
  misc_feature (1)..(151): NCBI GI NO: 7406669 NR Description: putative ripening-related protein [Vitis vinifera]
  misc_feature (162)..(280): NCBI GI NO: 7406669 NR Description: putative ripening-related protein [Vitis vinifera]
  misc_feature (1)..(280): NCBI GI NO: 15241720 NR Description: putative protein; protein id: At5g02230
  misc_feature (1)..(280): NCBI GI NO: 21593165 NR Description: unknown [Arabidopsis thaliana]
  misc_feature (1)..(276): NCBI GI NO: 30697234 NR Description: haloacid dehalogenase-like hydrolase family
  misc_feature (1)..(276): NCBI GI NO: 30697236 NR Description: haloacid dehalogenase-like hydrolase family
  misc_feature (1)..(276): NCBI GI NO: 21618155 NR Description: putative ripening-related protein-like
  misc_feature (13)..(280): NCBI GI NO: 8885554 NR Description: ripening-related protein-like; hydrolase-like
  misc_feature (13)..(280): NCBI GI NO: 15238429 NR Description: putative ripening-related protein - like
  misc_feature (10)..(280): NCBI GI NO: 40714684 NR Description: expressed protein
MEFEDRCHKVQEPKFDCLLFDLDDTLYPLSSGIAGHVKKNIEDYMVEKLGIDESKIENLGNLLYKNYGTTMAGLRAIGYSFDYDEYHAFVHGRLPYDNIKPDPVLKHILKNLPIRKLIFTNGDKVHAVRALERLGLEDCFEGIICFETLNPPCPPQGDREAEIFDIAGHFARSGAAAELPKTPVLCKPNVDAMEEALRIANVNPHKAIFFDDSVRNIQAGKQIGLHTVLVGKSQRVKGADHALESIHNVREALPGLWEEAEKAEDVLYAERVAMETSVTA

SEQ ID NO: 27666 - protein, 236 aa, Zea mays subsp. mays
  peptide (1)..(236): Ceres Seq. ID no. 12373615
  misc_feature (1)..(189): Pfam Name: Pfam Description:  haloacid dehalogenase-like hydrolase
  misc_feature (1)..(107): NCBI GI NO: 7406669 NR Description: putative ripening-related protein [Vitis vinifera]
  misc_feature (118)..(236): NCBI GI NO: 7406669 NR Description: putative ripening-related protein [Vitis vinifera]
  misc_feature (1)..(236): NCBI GI NO: 15241720 NR Description: putative protein; protein id: At5g02230
  misc_feature (1)..(236): NCBI GI NO: 21593165 NR Description: unknown [Arabidopsis thaliana]
  misc_feature (1)..(232): NCBI GI NO: 30697234 NR Description: haloacid dehalogenase-like hydrolase family
  misc_feature (1)..(232): NCBI GI NO: 30697236 NR Description: haloacid dehalogenase-like hydrolase family
  misc_feature (1)..(232): NCBI GI NO: 21618155 NR Description: putative ripening-related protein-like
  misc_feature (1)..(236): NCBI GI NO: 8885554 NR Description: ripening-related protein-like; hydrolase-like
  misc_feature (1)..(236): NCBI GI NO: 15238429 NR Description: putative ripening-related protein - like
  misc_feature (1)..(236): NCBI GI NO: 40714684 NR Description: expressed protein
MVEKLGIDESKIENLGNLLYKNYGTTMAGLRAIGYSFDYDEYHAFVHGRLPYDNIKPDPVLKHILKNLPIRKLIFTNGDKVHAVRALERLGLEDCFEGIICFETLNPPCPPQGDREAEIFDIAGHFARSGAAAELPKTPVLCKPNVDAMEEALRIANVNPHKAIFFDDSVRNIQAGKQIGLHTVLVGKSQRVKGADHALESIHNVREALPGLWEEAEKAEDVLYAERVAMETSVTA

SEQ ID NO: 27667 - DNA, 1648 bp, Zea mays subsp. mays
  misc_feature (1)..(1648): Ceres Seq. ID no. 13496119
ccgacctcccccttcctctccccctgccgctccccgcgccgagaaggagaaccccagccgccgcgcagcgcgccgcccatggcctcctcgtcggagaacgcggctgtgccgccggaggaggagccccaggccccgccgccgccggacacagagcctaccgaggcggcgcccggcgaggcggaggatgagccgcaaaccctagagcgggcgcaggagctcttcgacaggggttccaaggccatcgaggatgaggacttcgtcgacgccgtagactgtctcagccgagcgctcgagatcagggcttcacattatggagagctcgcaccggagtgtgccagcacatacttcaaatatggatgtgccctgctatacaaagctcaggaggagagtgatgttttgggaaatgttcccaagagcttgccaaatgaagactcagtgaagagtacagctactaaagatgacagtggaacctcaaaggtctctggtaccgatgcggaggatgctgcgtcatcagaaaaagttgatgctgaagaaggtcacaactcaaatggcaaaaatcaggagaatgggaatggtgaagttgagaaagatgatgacgacgtcgacgatgatgagaagatgggagatgaagaggataatgatttggatctttcttggaaaatgttggacattgctagggcaatagttgagaagagccaagataacactatggagaaagtaaaaatatattctgctcttgctgaagtggcaacggaaagagaggacatggacaactcactcagtgactatatgaaagctttatccatgttggagcatttggttgagcctgaccatcgtcgagttgtggaattaaacttccgcatttgtttggtttatgaactagtttccaagatcggagaagcaatttcatactgtgcaaaagcaatttcgctatgcaagtcacgcatacagagcctgaaaagttccaaggatgctttgttggctggtatagatggtgatgcatctgctgctgaagctgaaggaggctcagaaaaatctgccattgaaaaagagctagagcagcttactagcatattgcctgatcttgagaagaagcttgaggacctgtctgaagcaaacccaagcgctgacatggatgagatggtgaaggcaatcgtgtccagggtaactgatgtgatgccaaaagctgcatcttttacttcttcccagatggcaacctcaagcaatggattcgactcctcggttatgtctacggcagcgacaaccggaagctctggaagcaccgtgactgaccttggggttgtaggcagaggcgtcaaacgagctagcatcaagccgatctctgctgaacctgctgctaagaaacctgcacttgattcaccatctcaacaaggtgacagcagcatcaactctgaggttgttcctgcaacgcagactggagacgagtcagtatctaagtaaattacaatttcattagccctactgtaatgttaacttgctggaacatattagctgctatgtaaacgcttaagaagggactgctggggccatagactcatcgtgagctgaccattgaaatgttaaattgctgagatcatcatggcggtaaatcatgtctgctatatcaaatatgcttggtgagatgtgc

SEQ ID NO: 27668 - protein, 486 aa, Zea mays subsp. mays
  peptide (1)..(486): Ceres Seq. ID no. 13496120
  misc_feature (70)..(103): Pfam Name: Pfam Description:  TPR Domain
  misc_feature (27)..(486): NCBI GI NO: 38175649 NR Description: tetratricopeptide repeat-containing protein-like
  misc_feature (49)..(427): NCBI GI NO: 18419996 NR Description: tetratricopeptide repeat (TPR)-containing protein
  misc_feature (49)..(370): NCBI GI NO: 25407799 NR Description: hypothetical protein AT4g37210
  misc_feature (56)..(325): NCBI GI NO: 4104353 NR Description: nuclear autoantigenic sperm protein autosomalvariant
  misc_feature (54)..(131): NCBI GI NO: 18129310 NR Description: hypothetical protein [Pinus pinaster]
  misc_feature (47)..(477): NCBI GI NO: 123127 NR Description: HISTONE-BINDING PROTEIN N1/N2
  misc_feature (27)..(325): NCBI GI NO: 13435642 NR Description: Nasp protein [Mus musculus]
  misc_feature (56)..(325): NCBI GI NO: 27262630 NR Description: nuclear autoantigenic sperm protein isoform 3
  misc_feature (56)..(325): NCBI GI NO: 30584691 NR Description: Homo sapiens nuclear autoantigenic sperm protein
  misc_feature (10)..(474): NCBI GI NO: 28277791 NR Description: Unknown (protein for MGC:56007) [Danio rerio]
PTSPFLSPCRSPRREGEPQPPRSAPPMASSSENAAVPPEEEPQAPPPPDTEPTEAAPGEAEDEPQTLERAQELFDRGSKAIEDEDFVDAVDCLSRALEIRASHYGELAPECASTYFKYGCALLYKAQEESDVLGNVPKSLPNEDSVKSTATKDDSGTSKVSGTDAEDAASSEKVDAEEGHNSNGKNQENGNGEVEKDDDDVDDDEKMGDEEDNDLDLSWKMLDIARAIVEKSQDNTMEKVKIYSALAEVATEREDMDNSLSDYMKALSMLEHLVEPDHRRVVELNFRICLVYELVSKIGEAISYCAKAISLCKSRIQSLKSSKDALLAGIDGDASAAEAEGGSEKSAIEKELEQLTSILPDLEKKLEDLSEANPSADMDEMVKAIVSRVTDVMPKAASFTSSQMATSSNGFDSSVMSTAATTGSSGSTVTDLGVVGRGVKRASIKPISAEPAAKKPALDSPSQQGDSSINSEVVPATQTGDESVSK

SEQ ID NO: 27669 - protein, 460 aa, Zea mays subsp. mays; identical to SEQ ID NO: 24739
  peptide (1)..(460): Ceres Seq. ID no. 13496121
  misc_feature (44)..(77): Pfam Name: Pfam Description:  TPR Domain
  misc_feature (1)..(460): NCBI GI NO: 38175649 NR Description: tetratricopeptide repeat-containing protein-like
  misc_feature (23)..(401): NCBI GI NO: 18419996 NR Description: tetratricopeptide repeat (TPR)-containing protein
  misc_feature (23)..(344): NCBI GI NO: 25407799 NR Description: hypothetical protein AT4g37210
  misc_feature (30)..(299): NCBI GI NO: 4104353 NR Description: nuclear autoantigenic sperm protein autosomalvariant
  misc_feature (28)..(105): NCBI GI NO: 18129310 NR Description: hypothetical protein [Pinus pinaster]
  misc_feature (21)..(451): NCBI GI NO: 123127 NR Description: HISTONE-BINDING PROTEIN N1/N2
  misc_feature (1)..(299): NCBI GI NO: 13435642 NR Description: Nasp protein [Mus musculus]
  misc_feature (30)..(299): NCBI GI NO: 27262630 NR Description: nuclear autoantigenic sperm protein isoform 3
  misc_feature (30)..(299): NCBI GI NO: 30584691 NR Description: Homo sapiens nuclear autoantigenic sperm protein
  misc_feature (1)..(448): NCBI GI NO: 28277791 NR Description: Unknown (protein for MGC:56007) [Danio rerio]

SEQ ID NO: 27670 - protein, 280 aa, Zea mays subsp. mays; identical to SEQ ID NO: 24336
  peptide (1)..(280): Ceres Seq. ID no. 13496122
  misc_feature (1)..(280): NCBI GI NO: 38175649 NR Description: tetratricopeptide repeat-containing protein-like
  misc_feature (1)..(221): NCBI GI NO: 18419996 NR Description: tetratricopeptide repeat (TPR)-containing protein
  misc_feature (1)..(164): NCBI GI NO: 25407799 NR Description: hypothetical protein AT4g37210
  misc_feature (1)..(119): NCBI GI NO: 4104353 NR Description: nuclear autoantigenic sperm protein autosomalvariant
  misc_feature (1)..(271): NCBI GI NO: 123127 NR Description: HISTONE-BINDING PROTEIN N1/N2
  misc_feature (1)..(119): NCBI GI NO: 13435642 NR Description: Nasp protein [Mus musculus]
  misc_feature (1)..(119): NCBI GI NO: 27262630 NR Description: nuclear autoantigenic sperm protein isoform 3
  misc_feature (1)..(119): NCBI GI NO: 30584691 NR Description: Homo sapiens nuclear autoantigenic sperm protein
  misc_feature (1)..(268): NCBI GI NO: 28277791 NR Description: Unknown (protein for MGC:56007) [Danio rerio]
  misc_feature (1)..(280): NCBI GI NO: 27262630 NR Description: nuclear autoantigenic sperm protein isoform 3

SEQ ID NO: 27671 - DNA, 851 bp, Zea mays subsp. mays
  misc_feature (1)..(851): Ceres Seq. ID no. 12412763
atcatccctgcagttgtggatcagttcgtcctccgtctctctccacaagtctcctctaggcgccaagcaatgacaaggtcagcaccgccggcctctcctccggcgccgaagcccgtgctgcgcgggagccagctggagcagctccgcgagatcttccggcgcttcgacatggacggcgacggcagcctgacgcagctggagctgggggcgctgctgcggtcgctgggcctgcgccccacgggggaggaggcccgcgcgctgctggcggccatggactccaacggcaacggcgcggtggagttcggcgagctggcggccgccatcgcgccgctgctcaccacgcagacgcacctcgtcgaccaggcccagctcctggaggtgttccgcgccttcgaccgcgacggcaacggctacatctccgccgccgagctggcgcgatccatggcgcgcatcggccagccgctcaccttcgaggagctcacgcgcatgatgcgcgacgccgacgccgacggcgacggcgtcatcagcttcaacgagttcgccgccgtcatggccaagtccgcgctcgacttcctcggcgtcgcctgatgccctctgatggaccgatcgatcgatcggtctcgctcaccgcccgccgccgtaaccccgtgtccctgtgaccctgtccctcgcccgccattgattacctgttctctctctctctctctctctcttttgttaggaagatgctcatccggttaatgtaggataactgacacaagataatgtaactcaaaaactcatcgctggtttgtaacatggatgaactcggaaaatgtgtacatattttggatggatttgttcaatcttcc

SEQ ID NO: 27672 - protein, 195 aa, Zea mays subsp. mays
  peptide (1)..(195): Ceres Seq. ID no. 12412764
  misc_feature (47)..(75): Pfam Name: Pfam Description:  EF hand
  misc_feature (40)..(195): NCBI GI NO: 34912426 NR Description: P0681B11.17
  misc_feature (44)..(194): NCBI GI NO: 15221797 NR Description: calmodulin, putative; protein id: At1g18530.1
  misc_feature (44)..(194): NCBI GI NO: 28393082 NR Description: putative calmodulin [Arabidopsis thaliana]
  misc_feature (44)..(194): NCBI GI NO: 15230858 NR Description: calmodulin, putative; protein id: At3g25600.1
  misc_feature (40)..(190): NCBI GI NO: 13359053 NR Description: P0436D06.14
  misc_feature (34)..(190): NCBI GI NO: 15228441 NR Description: putative calmodulin; protein id: At3g03000
  misc_feature (44)..(190): NCBI GI NO: 15222618 NR Description: calmodulin, putative; protein id: At1g32250.1
  misc_feature (40)..(190): NCBI GI NO: 115506 NR Description: Calmodulin
  misc_feature (40)..(190): NCBI GI NO: 225024 NR Description: calmodulin
  misc_feature (40)..(184): NCBI GI NO: 4959144 NR Description: calmodulin mutant SYNCAM6 [synthetic construct]
IIPAVVDQFVLRLSPQVSSRRQAMTRSAPPASPPAPKPVLRGSQLEQLREIFRRFDMDGDGSLTQLELGALLRSLGLRPTGEEARALLAAMDSNGNGAVEFGELAAAIAPLLTTQTHLVDQAQLLEVFRAFDRDGNGYISAAELARSMARIGQPLTFEELTRMMRDADADGDGVISFNEFAAVMAKSALDFLGVA

SEQ ID NO: 27673 - protein, 172 aa, Zea mays subsp. mays
  peptide (1)..(172): Ceres Seq. ID no. 12412765
  misc_feature (24)..(52): Pfam Name: Pfam Description:  EF hand
  misc_feature (17)..(172): NCBI GI NO: 34912426 NR Description: P0681B11.17
  misc_feature (21)..(171): NCBI GI NO: 15221797 NR Description: calmodulin, putative; protein id: At1g18530.1
  misc_feature (21)..(171): NCBI GI NO: 28393082 NR Description: putative calmodulin [Arabidopsis thaliana]
  misc_feature (21)..(171): NCBI GI NO: 15230858 NR Description: calmodulin, putative; protein id: At3g25600.1
  misc_feature (17)..(167): NCBI GI NO: 13359053 NR Description: P0436D06.14
  misc_feature (11)..(167): NCBI GI NO: 15228441 NR Description: putative calmodulin; protein id: At3g03000
  misc_feature (21)..(167): NCBI GI NO: 15222618 NR Description: calmodulin, putative; protein id: At1g32250.1
  misc_feature (17)..(167): NCBI GI NO: 115506 NR Description: Calmodulin
  misc_feature (17)..(167): NCBI GI NO: 225024 NR Description: calmodulin
  misc_feature (17)..(161): NCBI GI NO: 4959144 NR Description: calmodulin mutant SYNCAM6 [synthetic construct]
MTRSAPPASPPAPKPVLRGSQLEQLREIFRRFDMDGDGSLTQLELGALLRSLGLRPTGEEARALLAAMDSNGNGAVEFGELAAAIAPLLTTQTHLVDQAQLLEVFRAFDRDGNGYISAAELARSMARIGQPLTFEELTRMMRDADADGDGVISFNEFAAVMAKSALDFLGVA

SEQ ID NO: 27674 - protein, 139 aa, Zea mays subsp. mays
  peptide (1)..(139): Ceres Seq. ID no. 12412766
  misc_feature (1)..(139): NCBI GI NO: 34912426 NR Description: P0681B11.17
  misc_feature (1)..(138): NCBI GI NO: 15221797 NR Description: calmodulin, putative; protein id: At1g18530.1
  misc_feature (1)..(138): NCBI GI NO: 28393082 NR Description: putative calmodulin [Arabidopsis thaliana]
  misc_feature (1)..(138): NCBI GI NO: 15230858 NR Description: calmodulin, putative; protein id: At3g25600.1
  misc_feature (1)..(134): NCBI GI NO: 13359053 NR Description: P0436D06.14
  misc_feature (1)..(134): NCBI GI NO: 15228441 NR Description: putative calmodulin; protein id: At3g03000
  misc_feature (1)..(134): NCBI GI NO: 15222618 NR Description: calmodulin, putative; protein id: At1g32250.1
  misc_feature (1)..(134): NCBI GI NO: 115506 NR Description: Calmodulin
  misc_feature (1)..(134): NCBI GI NO: 225024 NR Description: calmodulin
  misc_feature (1)..(128): NCBI GI NO: 4959144 NR Description: calmodulin mutant SYNCAM6 [synthetic construct]
MDGDGSLTQLELGALLRSLGLRPTGEEARALLAAMDSNGNGAVEFGELAAAIAPLLTTQTHLVDQAQLLEVFRAFDRDGNGYISAAELARSMARIGQPLTFEELTRMMRDADADGDGVISFNEFAAVMAKSALDFLGVA

SEQ ID NO: 27675 - DNA, 1347 bp, Zea mays subsp. mays
  misc_feature (1)..(1347): Ceres Seq. ID no. 12401406
gggacacagcacaagaacactcctagctgaagatctcgagtgcaacgcaacgttggcgcttggcggccagtagtagcagctaatttagcgtcgctccttcctactagacgagagatcgagaaaccatggccaagctccaagtcactcctggcgccgcgttcaccgagtgcaatgaactcaacttccagggcctgtacatgtaccacacgcccctgggtcccaaggccaaccaagctgcgatcctagagagcaaggccaagatcggcatcggtgccaccgtggttaacaactgggcagtgtatgacgggccagggccaggcgctaagctggtcggccgtgcgcagggcttgcacatcctagccggaaactgggtcaactcattcaccctggtgttcgaggatgaaaggttcagtgggtccacgcttgaagtgaggggcataacggtcgaaactggcgagtgggctgttgttgggggcaccggccagtttgctatggcgaacggcatcatctccaagaagttccacgagcagagaagcgacgggaacgtcatagagcttagtgtccatgctttctgcccactgctcaaagggaaaaggggcggtgctgtgacaaaggttgggccatggggcggaagcggagggtctccaatggagctgacagagacggagacgcccatgcgtctggagagcatcaccgtccgcagcggcgtggccgtcaactccatctcattctcctacgtcgactctgccggccacaagcgctctgctggtccctggggtggttccggtggacagcctgatcaggtccagctcgccgagtctgaggtggtcacacaagtgtccggaacatacggcaccatcgacgacgacgaccgcaccgtgataacctccattaagttcgtcacgaaccttgacaagacctacgggcctttcggagcgtacggggacggcgacgacacctcctttaccgtccccgtgcagccggggagtggcgccatcgtgggcttcttcgcgcgcgttggcggggccggggactacctggacgccattggcgtctacgtgcgccccctctaaaaagctttgttttgtgatgtgaatgaagcagctgcatgcatgctgctctactccacacagagtcgagtccatcaccaccagctgcttgaatgcgtgcgtgcggccggcttccagttgctttatttcgtacctgagtgttgtgttgtggtgtgtttgctcatgtacttcggtacgttgcttggtaaactctggtcagtgttgtgtgtgtttgcctttgtcatgaatttcgacggaataataaagacctcgtgtagaagaggtcagggttttatcg

SEQ ID NO: 27676 - protein, 315 aa, Zea mays subsp. mays
  peptide (1)..(315): Ceres Seq. ID no. 12401407
  misc_feature (2)..(152): Pfam Name: Pfam Description:  Dirigent-like protein
  misc_feature (1)..(315): NCBI GI NO: 9313027 NR Description: beta-glucosidase aggregating factor precursor
  misc_feature (1)..(315): NCBI GI NO: 7489385 NR Description: jakalin homolog - barley
  misc_feature (1)..(315): NCBI GI NO: 7489383 NR Description: jacalin homolog - barley
  misc_feature (1)..(299): NCBI GI NO: 7489384 NR Description: jacalin homolog - barley
  misc_feature (1)..(311): NCBI GI NO: 16151819 NR Description: VER2 [Triticum aestivum]
  misc_feature (23)..(313): NCBI GI NO: 21311647 NR Description: hessian fly response gene 1 protein
  misc_feature (23)..(314): NCBI GI NO: 7489661 NR Description: benzothiadiazole-induced protein
  misc_feature (1)..(217): NCBI GI NO: 7489672 NR Description: jasmonate-induced protein homolog - wheat
  misc_feature (161)..(313): NCBI GI NO: 38344523 NR Description: OSJNBa0016N04.16
  misc_feature (161)..(314): NCBI GI NO: 4584685 NR Description: putative lectin [Hordeum vulgare subsp. vulgare]
MAKLQVTPGAAFTECNELNFQGLYMYHTPLGPKANQAAILESKAKIGIGATVVNNWAVYDGPGPGAKLVGRAQGLHILAGNWVNSFTLVFEDERFSGSTLEVRGITVETGEWAVVGGTGQFAMANGIISKKFHEQRSDGNVIELSVHAFCPLLKGKRGGAVTKVGPWGGSGGSPMELTETETPMRLESITVRSGVAVNSISFSYVDSAGHKRSAGPWGGSGGQPDQVQLAESEVVTQVSGTYGTIDDDDRTVITSIKFVTNLDKTYGPFGAYGDGDDTSFTVPVQPGSGAIVGFFARVGGAGDYLDAIGVYVRPL

SEQ ID NO: 27677 - protein, 291 aa, Zea mays subsp. mays
  peptide (1)..(291): Ceres Seq. ID no. 12401408
  misc_feature (1)..(128): Pfam Name: Pfam Description:  Dirigent-like protein
  misc_feature (1)..(291): NCBI GI NO: 9313027 NR Description: beta-glucosidase aggregating factor precursor
  misc_feature (1)..(291): NCBI GI NO: 7489385 NR Description: jakalin homolog - barley
  misc_feature (1)..(291): NCBI GI NO: 7489383 NR Description: jacalin homolog - barley
  misc_feature (1)..(275): NCBI GI NO: 7489384 NR Description: jacalin homolog - barley
  misc_feature (1)..(287): NCBI GI NO: 16151819 NR Description: VER2 [Triticum aestivum]
  misc_feature (1)..(289): NCBI GI NO: 21311647 NR Description: hessian fly response gene 1 protein
  misc_feature (1)..(290): NCBI GI NO: 7489661 NR Description: benzothiadiazole-induced protein
  misc_feature (1)..(193): NCBI GI NO: 7489672 NR Description: jasmonate-induced protein homolog - wheat
  misc_feature (137)..(289): NCBI GI NO: 38344523 NR Description: OSJNBa0016N04.16
  misc_feature (137)..(290): NCBI GI NO: 4584685 NR Description: putative lectin [Hordeum vulgare subsp. vulgare]
MYHTPLGPKANQAAILESKAKIGIGATVVNNWAVYDGPGPGAKLVGRAQGLHILAGNWVNSFTLVFEDERFSGSTLEVRGITVETGEWAVVGGTGQFAMANGIISKKFHEQRSDGNVIELSVHAFCPLLKGKRGGAVTKVGPWGGSGGSPMELTETETPMRLESITVRSGVAVNSISFSYVDSAGHKRSAGPWGGSGGQPDQVQLAESEVVTQVSGTYGTIDDDDRTVITSIKFVTNLDKTYGPFGAYGDGDDTSFTVPVQPGSGAIVGFFARVGGAGDYLDAIGVYVRPL

SEQ ID NO: 27678 - protein, 193 aa, Zea mays subsp. mays
  peptide (1)..(193): Ceres Seq. ID no. 12401409
  misc_feature (50)..(191): Pfam Name: Pfam Description:  Jacalin-like lectin domain
  misc_feature (1)..(193): NCBI GI NO: 9313027 NR Description: beta-glucosidase aggregating factor precursor
  misc_feature (1)..(193): NCBI GI NO: 7489385 NR Description: jakalin homolog - barley
  misc_feature (1)..(193): NCBI GI NO: 7489383 NR Description: jacalin homolog - barley
  misc_feature (1)..(177): NCBI GI NO: 7489384 NR Description: jacalin homolog - barley
  misc_feature (1)..(189): NCBI GI NO: 16151819 NR Description: VER2 [Triticum aestivum]
  misc_feature (1)..(191): NCBI GI NO: 21311647 NR Description: hessian fly response gene 1 protein
  misc_feature (1)..(192): NCBI GI NO: 7489661 NR Description: benzothiadiazole-induced protein
  misc_feature (1)..(95): NCBI GI NO: 7489672 NR Description: jasmonate-induced protein homolog - wheat
  misc_feature (39)..(191): NCBI GI NO: 38344523 NR Description: OSJNBa0016N04.16
  misc_feature (39)..(192): NCBI GI NO: 4584685 NR Description: putative lectin [Hordeum vulgare subsp. vulgare]
MANGIISKKFHEQRSDGNVIELSVHAFCPLLKGKRGGAVTKVGPWGGSGGSPMELTETETPMRLESITVRSGVAVNSISFSYVDSAGHKRSAGPWGGSGGQPDQVQLAESEVVTQVSGTYGTIDDDDRTVITSIKFVTNLDKTYGPFGAYGDGDDTSFTVPVQPGSGAIVGFFARVGGAGDYLDAIGVYVRPL

SEQ ID NO: 27679 - DNA, 1628 bp, Zea mays subsp. mays
  misc_feature (1)..(1628): Ceres Seq. ID no. 12409250
aaccccaccccaccgcccgcaaccgcaagctcagattccctccccaccccaccccaccccaccgtcccgctcactccagcccagcccgcgtccccacagcccagcgacagcgggcaccggcggcatccagccatgtgcggcggcgccatcctgtcggacatcatcccgccgccgccaccgcggcgggtcacggctggccacctctggcccgagagcaagaagccgaggagggctgcatccggcaggaggggagcccccgtggagcagcatgagcaggaggaggatttcgaggccgacttcgaggagttcgaggtggagtccggcgagtcggagctcgagtccgaggacgagcccaagcccttcgccgcccccaggagcgcgctcgccagaggtggactaaacactggtgcagctggtgtcgatggccctgctgcaaattcagttaaaaggaagaggaagaaccagttcaggggtatccgccggcgcccgtggggcaaatgggctgctgagatcagagatcctcgcaagggcgtgcgcgtctggctcggtactttcaactcccccgaagaagctgccagagcttacgacgccgaggcacgcaggatccgcggcaagaaggctaaagtcaacttcccggatgaggttcctacggcggtttctcagaagcgccgtgctgctgggcctgcctctctgaaagcgcctaagatggacgttgaggaggagaagccgatcatcaagctcgcagtgaacaatatgaccaactcaaacgcatatcactaccctgccgtcgtcggccacaacatcatacccgagccattcatgcagactcagaacatgccattcgctcctctggtgaattatgctgccctagtgaacctgtcttcagaccaaggcagcaactcgttcggttgctcggacttcagcctcgagaacgactccaggacccctgacataacttcggtgcctgcgcccgttgccaccttggccgccgttggcgagtctgtgttcgtccagaacaccgccggccatgctgtggcgtctcctgcgacggggaacactggtgttgatctcgccgagttggagccgtatatgaatttcctgatggacggtggttcagacgactcgatcagcactctcttgagctgtgatggatcccaggacgtggtcagcaacatggacctttggagcttcgaggacatgcccatgtctgctggtttctactgaggcctgaggcccagcgactggtgcttgtgtacatagggggggacaaagggtaagagcctgcagtaacagagattggctctttctggtacttgcaatttctatcccttcaactctttcttccgcccccgtgtttcaggaataatgttctggagatgaagaaacgcttgcgtgggcgtgcctgcaggcacgcgtgtagtagctgcggtattagtatatatgcttagatgttcagtcacttcctttaagtacaatttggcgctggacatgtaccttattttactatgtatccgtgacaacagctatgtgtctgctccttttattttcttgtctttgcttcaaaaaaatggctctgaacattgcgagtttgtactttgtagacaatatatatatatatatatgtgtgg

SEQ ID NO: 27680 - protein, 407 aa, Zea mays subsp. mays
  peptide (1)..(407): Ceres Seq. ID no. 12409251
  misc_feature (153)..(216): Pfam Name: Pfam Description:  AP2 domain
  misc_feature (45)..(407): NCBI GI NO: 6176534 NR Description: EREBP-like protein [Oryza sativa]
  misc_feature (45)..(407): NCBI GI NO: 6689918 NR Description: transcription factor EREBP1 [Oryza sativa]
  misc_feature (45)..(407): NCBI GI NO: 24940524 NR Description: ethylene response element binding protein
  misc_feature (45)..(407): NCBI GI NO: 30525872 NR Description: ethylene-responsive element binding protein
  misc_feature (79)..(407): NCBI GI NO: 30525870 NR Description: ethylene-responsive element binding protein
  misc_feature (45)..(405): NCBI GI NO: 38343926 NR Description: ethylene transcription factor [Fagus sylvatica]
  misc_feature (45)..(325): NCBI GI NO: 22074046 NR Description: transcription factor JERF1
  misc_feature (291)..(407): NCBI GI NO: 22074046 NR Description: transcription factor JERF1
  misc_feature (45)..(405): NCBI GI NO: 18496063 NR Description: ethylene responsive element binding protein
  misc_feature (45)..(407): NCBI GI NO: 33331083 NR Description: ethylene responsive protein [Glycine max]
NPTPPPATASSDSLPTPPHPTVPLTPAQPASPQPSDSGHRRHPAMCGGAILSDIIPPPPPRRVTAGHLWPESKKPRRAASGRRGAPVEQHEQEEDFEADFEEFEVESGESELESEDEPKPFAAPRSALARGGLNTGAAGVDGPAANSVKRKRKNQFRGIRRRPWGKWAAEIRDPRKGVRVWLGTFNSPEEAARAYDAEARRIRGKKAKVNFPDEVPTAVSQKRRAAGPASLKAPKMDVEEEKPIIKLAVNNMTNSNAYHYPAVVGHNIIPEPFMQTQNMPFAPLVNYAALVNLSSDQGSNSFGCSDFSLENDSRTPDITSVPAPVATLAAVGESVFVQNTAGHAVASPATGNTGVDLAELEPYMNFLMDGGSDDSISTLLSCDGSQDVVSNMDLWSFEDMPMSAGFY

SEQ ID NO: 27681 - protein, 363 aa, Zea mays subsp. mays
  peptide (1)..(363): Ceres Seq. ID no. 12409252
  misc_feature (109)..(172): Pfam Name: Pfam Description:  AP2 domain
  misc_feature (1)..(363): NCBI GI NO: 6176534 NR Description: EREBP-like protein [Oryza sativa]
  misc_feature (1)..(363): NCBI GI NO: 6689918 NR Description: transcription factor EREBP1 [Oryza sativa]
  misc_feature (1)..(363): NCBI GI NO: 24940524 NR Description: ethylene response element binding protein
  misc_feature (1)..(363): NCBI GI NO: 30525872 NR Description: ethylene-responsive element binding protein
  misc_feature (35)..(363): NCBI GI NO: 30525870 NR Description: ethylene-responsive element binding protein
  misc_feature (1)..(361): NCBI GI NO: 38343926 NR Description: ethylene transcription factor [Fagus sylvatica]
  misc_feature (1)..(281): NCBI GI NO: 22074046 NR Description: transcription factor JERF1
  misc_feature (247)..(363): NCBI GI NO: 22074046 NR Description: transcription factor JERF1
  misc_feature (1)..(361): NCBI GI NO: 18496063 NR Description: ethylene responsive element binding protein
  misc_feature (1)..(363): NCBI GI NO: 33331083 NR Description: ethylene responsive protein [Glycine max]
MCGGAILSDIIPPPPPRRVTAGHLWPESKKPRRAASGRRGAPVEQHEQEEDFEADFEEFEVESGESELESEDEPKPFAAPRSALARGGLNTGAAGVDGPAANSVKRKRKNQFRGIRRRPWGKWAAEIRDPRKGVRVWLGTFNSPEEAARAYDAEARRIRGKKAKVNFPDEVPTAVSQKRRAAGPASLKAPKMDVEEEKPIIKLAVNNMTNSNAYHYPAVVGHNIIPEPFMQTQNMPFAPLVNYAALVNLSSDQGSNSFGCSDFSLENDSRTPDITSVPAPVATLAAVGESVFVQNTAGHAVASPATGNTGVDLAELEPYMNFLMDGGSDDSISTLLSCDGSQDVVSNMDLWSFEDMPMSAGFY

SEQ ID NO: 27682 - DNA, 1324 bp, Zea mays subsp. mays
  misc_feature (1)..(1324): Ceres Seq. ID no. 12343225
atcctcagctcagtctcttccactctcccttgacctgtctcctctcacctgctgactgctgtgccgctccgctccggtggcatctgcatctgcatctccatccctcgatctgtcttctctcagggtggaagaagcgtgacaatggaggctccacccgtggcgctgttcgacaccctcaaggcagccaaaccgttcttcttgttggctggtcccaacgtgattgaatcggaggagcacgtcctgaagatggccaaacacatcaaagcaattacgaccaagcttggaattccactcgtgttcaagtccagctttgataaagcaaaccgtacatcatcaaaatcgttccgtggtcctggtcttgaagaaggtctaaagatccttcaaaaggtgaaagcaacatatgaccttccgatagtcactgatgtgcacgaaagccaccagtgtgaagctgttggaagagttgctgacatcatacagattccagccttcctctgtcgccagactgatcttctagtggctgctgctaagactggaaaaattatcaatatcaagaaaggacaattctgtgcgccttctgttatggtgaactctacagagaaagtaaggcttgctgggaatccaaatgtgatggtctgtgagcgtggtaccatgtttggctacaatgatctatttgttgacccaaggaaccttgagtggctgagggaaagcaactgcccagttgtagctgatgtaacacatgctctacagcaaccagctggaagaaagcttgatggtggaggtgttgcaagcggtgggctacgagaactaataccgtgcattgcaaggacttcggttgctgttggtgttgatggtattttcatggaggtacatgatgaccccttgaatgcaccatgcgatggcccaactcaatggccattgcgcaatctggaagagctgttggaggaattaattgcaattgctcgagttaccaagggaaagaagccattcaagatcgacctcactccgttccaggagtgatctgctttggttgatagaaagcacaatgccaccatccatggaattccacagggtggatttcaatatgaattgagtacttgctattgttgggagcatacctgcagtggatgacttaggctatctctagcagatttttttatctcattccgtattttatttcctttttcaaactccactctgcaaacagtgtcaaacagtgttgtcatctacagtttcgcattccctgttttaccctatctactcgagacagtcttatcaccgaacaaactattgtgttgaaacctgccggattggtttgtgttatttc

SEQ ID NO: 27683 - protein, 291 aa, Zea mays subsp. mays
  peptide (1)..(291): Ceres Seq. ID no. 12343226
  misc_feature (1)..(291): NCBI GI NO: 29367487 NR Description: putative 2-dehydro-3-deoxyphosphooctonate aldolase
  misc_feature (4)..(291): NCBI GI NO: 6647535 NR Description: 2-dehydro-3-deoxyphosphooctonate aldolase
  misc_feature (8)..(291): NCBI GI NO: 15219400 NR Description: 2-dehydro-3-deoxyphosphooctonate aldolase,putative
  misc_feature (8)..(291): NCBI GI NO: 21360537 NR Description: AT5g09730/F17I14_80 [Arabidopsis thaliana]
  misc_feature (8)..(291): NCBI GI NO: 13620976 NR Description: 2-dehydro-3-deoxyphosphooctonate aldolase
  misc_feature (8)..(291): NCBI GI NO: 15219214 NR Description: putative 3-deoxy-D-manno-2-octulosonate-8-phosphatesynthase
  misc_feature (1)..(289): NCBI GI NO: 13509333 NR Description: 3-desoxy-D-manno octulosonic acid-8-phosphatesynthase
  misc_feature (15)..(291): NCBI GI NO: 25291179 NR Description: hypothetical protein F3O9.14
  misc_feature (55)..(237): NCBI GI NO: 32169731 NR Description: 3-deoxy-D-manno-2-octulosonic acid-8-phosphate
  misc_feature (16)..(278): NCBI GI NO: 34762974 NR Description: 2-dehydro-3-deoxyphosphooctonate aldolase
MEAPPVALFDTLKAAKPFFLLAGPNVIESEEHVLKMAKHIKAITTKLGIPLVFKSSFDKANRTSSKSFRGPGLEEGLKILQKVKATYDLPIVTDVHESHQCEAVGRVADIIQIPAFLCRQTDLLVAAAKTGKIINIKKGQFCAPSVMVNSTEKVRLAGNPNVMVCERGTMFGYNDLFVDPRNLEWLRESNCPVVADVTHALQQPAGRKLDGGGVASGGLRELIPCIARTSVAVGVDGIFMEVHDDPLNAPCDGPTQWPLRNLEELLEELIAIARVTKGKKPFKIDLTPFQE

SEQ ID NO: 27684 - protein, 256 aa, Zea mays subsp. mays
  peptide (1)..(256): Ceres Seq. ID no. 12343227
  misc_feature (1)..(256): NCBI GI NO: 29367487 NR Description: putative 2-dehydro-3-deoxyphosphooctonate aldolase
  misc_feature (1)..(256): NCBI GI NO: 6647535 NR Description: 2-dehydro-3-deoxyphosphooctonate aldolase
  misc_feature (1)..(256): NCBI GI NO: 15219400 NR Description: 2-dehydro-3-deoxyphosphooctonate aldolase,putative
  misc_feature (1)..(256): NCBI GI NO: 21360537 NR Description: AT5g09730/F17I14_80 [Arabidopsis thaliana]
  misc_feature (1)..(256): NCBI GI NO: 13620976 NR Description: 2-dehydro-3-deoxyphosphooctonate aldolase
  misc_feature (1)..(256): NCBI GI NO: 15219214 NR Description: putative 3-deoxy-D-manno-2-octulosonate-8-phosphatesynthase
  misc_feature (1)..(254): NCBI GI NO: 13509333 NR Description: 3-desoxy-D-manno octulosonic acid-8-phosphatesynthase
  misc_feature (1)..(256): NCBI GI NO: 25291179 NR Description: hypothetical protein F3O9.14
  misc_feature (20)..(202): NCBI GI NO: 32169731 NR Description: 3-deoxy-D-manno-2-octulosonic acid-8-phosphate
  misc_feature (1)..(243): NCBI GI NO: 34762974 NR Description: 2-dehydro-3-deoxyphosphooctonate aldolase
MAKHIKAITTKLGIPLVFKSSFDKANRTSSKSFRGPGLEEGLKILQKVKATYDLPIVTDVHESHQCEAVGRVADIIQIPAFLCRQTDLLVAAAKTGKIINIKKGQFCAPSVMVNSTEKVRLAGNPNVMVCERGTMFGYNDLFVDPRNLEWLRESNCPVVADVTHALQQPAGRKLDGGGVASGGLRELIPCIARTSVAVGVDGIFMEVHDDPLNAPCDGPTQWPLRNLEELLEELIAIARVTKGKKPFKIDLTPFQE

SEQ ID NO: 27685 - protein, 145 aa, Zea mays subsp. mays
  peptide (1)..(145): Ceres Seq. ID no. 12343228
  misc_feature (1)..(145): NCBI GI NO: 29367487 NR Description: putative 2-dehydro-3-deoxyphosphooctonate aldolase
  misc_feature (1)..(145): NCBI GI NO: 6647535 NR Description: 2-dehydro-3-deoxyphosphooctonate aldolase
  misc_feature (1)..(145): NCBI GI NO: 15219400 NR Description: 2-dehydro-3-deoxyphosphooctonate aldolase,putative
  misc_feature (1)..(145): NCBI GI NO: 21360537 NR Description: AT5g09730/F17I14_80 [Arabidopsis thaliana]
  misc_feature (1)..(145): NCBI GI NO: 13620976 NR Description: 2-dehydro-3-deoxyphosphooctonate aldolase
  misc_feature (1)..(145): NCBI GI NO: 15219214 NR Description: putative 3-deoxy-D-manno-2-octulosonate-8-phosphatesynthase
  misc_feature (1)..(143): NCBI GI NO: 13509333 NR Description: 3-desoxy-D-manno octulosonic acid-8-phosphatesynthase
  misc_feature (1)..(145): NCBI GI NO: 25291179 NR Description: hypothetical protein F3O9.14
  misc_feature (1)..(91): NCBI GI NO: 32169731 NR Description: 3-deoxy-D-manno-2-octulosonic acid-8-phosphate
  misc_feature (1)..(132): NCBI GI NO: 34762974 NR Description: 2-dehydro-3-deoxyphosphooctonate aldolase
MVNSTEKVRLAGNPNVMVCERGTMFGYNDLFVDPRNLEWLRESNCPVVADVTHALQQPAGRKLDGGGVASGGLRELIPCIARTSVAVGVDGIFMEVHDDPLNAPCDGPTQWPLRNLEELLEELIAIARVTKGKKPFKIDLTPFQE

SEQ ID NO: 27686 - DNA, 1450 bp, Zea mays subsp. mays
  misc_feature (1)..(1450): Ceres Seq. ID no. 12409243
agggagacggacaaaaggagaggcgtggacacgggacgcgaggtagacagcgcccggcgtgacgtggcgcgagatggagagcggagaggggggctcaccaaactgcaagtctgtctcctgactcctcgccggcgtgccggatctcctgtctctctcgcggtcggcggccgcatagcctcgttcactcgcacgacacagggcaggggggcgatgggctgcgcgacgtccaagcagttcagcaggagcgcgccggcgcacgcggatccggccgtgctggcgacccagacctcattcacggtgaacgaggtggaggcgctgtacgagctgtacaagaagctgagctgctccatcgtcaaagacgggctcatccacaaggaggagttccagctcgccttgttcaggaacagcaggagagcgaacctctttgcagacagggtcttcgatctgttcgatctcaagcggaacggagtcatcgatttcgaggagttcgtgcggtcgctcagtgtgttccaccctaaagcagatacgtcggagaagacggcgttcgctttcaagctgtatgatctgaggggaacaggctacatcgagaaagaagagctcagagagatggtcttggcgctgcttgatgagtccgacctctgcctttcagacagcaccgtcgagacgatcgtcgataacacgttcagccaagcggactcgaacggagatggcaggatagatcctgaagaatgggaggagttcgtgaagaagaacccggcaacgttaaggaacatgactctcccctatctgcaggacatcaccatgtcatttccgagcttcataatgcgttcagaagccagtgactgaaatgtttgcgtacatctgcgtgtaaggaagcaccgttccatcagctctgctgtttgttggagcctacagcttagtccatggcacgaggcaccggagaaagttcagaatgtagcagcaacggccagcagagtgcatgagggttgctgccatagctgcaggctgcagccaaacaaaatgatgaccaaagattcatctagtgtcagcttcagggttcagatggtataccagccaacaattttctttctcggtatctaaacaccgtggatgttgcgtttaaaaaaattgttgcagaggatcaacaagtctgttcatcgaagcagtgcctgagtttagaatcagaagctaactgtctattgctgagatgctttcgtctaaatcttgcgtgtagttgtaactgcaaggaaagaataacttgtggagagttggatttgttgatgaaccttagtagttcttgacttggttagttgtttccacatttcttcgcagtgccagtgcgtgcacttgtaacttgcaaattcttctcaatccacccctaatcgaagggtggatccagttccgcatgtaatgaggcaatatcatcaatagtttatgcttcgtttatccc

SEQ ID NO: 27687 - protein, 281 aa, Zea mays subsp. mays
  peptide (1)..(281): Ceres Seq. ID no. 12409244
  misc_feature (142)..(170): Pfam Name: Pfam Description:  EF hand
  misc_feature (71)..(281): NCBI GI NO: 15237928 NR Description: calcium sensor homolog (gb|AAC26110
  misc_feature (73)..(281): NCBI GI NO: 15217657 NR Description: calcineurin B-like protein; protein id:At1g64480
  misc_feature (71)..(281): NCBI GI NO: 15238015 NR Description: calcineurin B 1; protein id: At5g47100
  misc_feature (71)..(281): NCBI GI NO: 18414931 NR Description: calcineurin B-like protein 1; protein id:At4g17615
  misc_feature (73)..(281): NCBI GI NO: 15234011 NR Description: putative protein (fragment); protein id:At4g33000
  misc_feature (73)..(281): NCBI GI NO: 30689575 NR Description: calcineurin B-like protein (fragment)
  misc_feature (73)..(281): NCBI GI NO: 25295757 NR Description: protein F1N19.5 [imported] - Arabidopsis thaliana
  misc_feature (88)..(281): NCBI GI NO: 16924116 NR Description: putative calcineurin B-like protein [Oryza sativa]
  misc_feature (88)..(281): NCBI GI NO: 15236778 NR Description: calcineurin B-like protein 3; protein id:At4g26570
  misc_feature (88)..(281): NCBI GI NO: 22137326 NR Description: calcineurin B [Pisum sativum]
RETDKRRGVDTGREVDSARRDVARDGERRGGLTKLQVCLLTPRRRAGSPVSLAVGGRIASFTRTTQGRGAMGCATSKQFSRSAPAHADPAVLATQTSFTVNEVEALYELYKKLSCSIVKDGLIHKEEFQLALFRNSRRANLFADRVFDLFDLKRNGVIDFEEFVRSLSVFHPKADTSEKTAFAFKLYDLRGTGYIEKEELREMVLALLDESDLCLSDSTVETIVDNTFSQADSNGDGRIDPEEWEEFVKKNPATLRNMTLPYLQDITMSFPSFIMRSEASD

SEQ ID NO: 27688 - protein, 211 aa, Zea mays subsp. mays
  peptide (1)..(211): Ceres Seq. ID no. 12409245
  misc_feature (72)..(100): Pfam Name: Pfam Description:  EF hand
  misc_feature (1)..(211): NCBI GI NO: 15237928 NR Description: calcium sensor homolog (gb|AAC26110
  misc_feature (3)..(211): NCBI GI NO: 15217657 NR Description: calcineurin B-like protein; protein id:At1g64480
  misc_feature (1)..(211): NCBI GI NO: 15238015 NR Description: calcineurin B 1; protein id: At5g47100
  misc_feature (1)..(211): NCBI GI NO: 18414931 NR Description: calcineurin B-like protein 1; protein id:At4g17615
  misc_feature (3)..(211): NCBI GI NO: 15234011 NR Description: putative protein (fragment); protein id:At4g33000
  misc_feature (3)..(211): NCBI GI NO: 30689575 NR Description: calcineurin B-like protein (fragment)
  misc_feature (3)..(211): NCBI GI NO: 25295757 NR Description: protein F1N19.5 [imported] - Arabidopsis thaliana
  misc_feature (18)..(211): NCBI GI NO: 16924116 NR Description: putative calcineurin B-like protein [Oryza sativa]
  misc_feature (18)..(211): NCBI GI NO: 15236778 NR Description: calcineurin B-like protein 3; protein id:At4g26570
  misc_feature (18)..(211): NCBI GI NO: 22137326 NR Description: calcineurin B [Pisum sativum]
MGCATSKQFSRSAPAHADPAVLATQTSFTVNEVEALYELYKKLSCSIVKDGLIHKEEFQLALFRNSRRANLFADRVFDLFDLKRNGVIDFEEFVRSLSVFHPKADTSEKTAFAFKLYDLRGTGYIEKEELREMVLALLDESDLCLSDSTVETIVDNTFSQADSNGDGRIDPEEWEEFVKKNPATLRNMTLPYLQDITMSFPSFIMRSEASD

SEQ ID NO: 27689 - DNA, 1764 bp, Zea mays subsp. mays; identical to SEQ ID NO: 23212
  misc_feature (1)..(1764): Ceres Seq. ID no. 13636367

SEQ ID NO: 27690 - protein, 456 aa, Zea mays subsp. mays; identical to SEQ ID NO: 23213
  peptide (1)..(456): Ceres Seq. ID no. 13636368
  misc_feature (162)..(414): Pfam Name: Pfam Description:  Fatty acid desaturase
  misc_feature (65)..(452): NCBI GI NO: 28371827 NR Description: delta-12 oleate desaturase [Punica granatum]
  misc_feature (65)..(452): NCBI GI NO: 28564441 NR Description: delta 12-acyl-lipid-desaturase [Punica granatum]
  misc_feature (65)..(456): NCBI GI NO: 27261181 NR Description: delta 12 oleic acid desaturase FAD2
  misc_feature (65)..(456): NCBI GI NO: 34903462 NR Description: putative omega-6 fatty acid desaturase
  misc_feature (65)..(456): NCBI GI NO: 8886726 NR Description: omega-6 fatty acid desaturase [Sesamum indicum]
  misc_feature (65)..(455): NCBI GI NO: 1345977 NR Description: Omega-6 fatty acid desaturase
  misc_feature (65)..(455): NCBI GI NO: 4378875 NR Description: delta-12 desaturase [Brassica carinata]
  misc_feature (65)..(455): NCBI GI NO: 7433295 NR Description: omega-6 desaturase, microsomal - upland cotton
  misc_feature (65)..(455): NCBI GI NO: 17225582 NR Description: delta-12 fatty acid desaturase
  misc_feature (248)..(455): NCBI GI NO: 32421083 NR Description: hypothetical protein [Neurospora crassa]

SEQ ID NO: 27691 - protein, 392 aa, Zea mays subsp. mays; identical to SEQ ID NO: 23214
  peptide (1)..(392): Ceres Seq. ID no. 13636369
  misc_feature (98)..(350): Pfam Name: Pfam Description:  Fatty acid desaturase
  misc_feature (1)..(388): NCBI GI NO: 28371827 NR Description: delta-12 oleate desaturase [Punica granatum]
  misc_feature (1)..(388): NCBI GI NO: 28564441 NR Description: delta 12-acyl-lipid-desaturase [Punica granatum]
  misc_feature (1)..(392): NCBI GI NO: 27261181 NR Description: delta 12 oleic acid desaturase FAD2
  misc_feature (1)..(392): NCBI GI NO: 34903462 NR Description: putative omega-6 fatty acid desaturase
  misc_feature (1)..(392): NCBI GI NO: 8886726 NR Description: omega-6 fatty acid desaturase [Sesamum indicum]
  misc_feature (1)..(391): NCBI GI NO: 1345977 NR Description: Omega-6 fatty acid desaturase
  misc_feature (1)..(391): NCBI GI NO: 4378875 NR Description: delta-12 desaturase [Brassica carinata]
  misc_feature (1)..(391): NCBI GI NO: 7433295 NR Description: omega-6 desaturase, microsomal - upland cotton
  misc_feature (1)..(391): NCBI GI NO: 17225582 NR Description: delta-12 fatty acid desaturase
  misc_feature (184)..(391): NCBI GI NO: 32421083 NR Description: hypothetical protein [Neurospora crassa]

SEQ ID NO: 27692 - protein, 386 aa, Zea mays subsp. mays; identical to SEQ ID NO: 23215
  peptide (1)..(386): Ceres Seq. ID no. 13636370
  misc_feature (92)..(344): Pfam Name: Pfam Description:  Fatty acid desaturase
  misc_feature (1)..(382): NCBI GI NO: 28371827 NR Description: delta-12 oleate desaturase [Punica granatum]
  misc_feature (1)..(382): NCBI GI NO: 28564441 NR Description: delta 12-acyl-lipid-desaturase [Punica granatum]
  misc_feature (1)..(386): NCBI GI NO: 27261181 NR Description: delta 12 oleic acid desaturase FAD2
  misc_feature (1)..(386): NCBI GI NO: 34903462 NR Description: putative omega-6 fatty acid desaturase
  misc_feature (1)..(386): NCBI GI NO: 8886726 NR Description: omega-6 fatty acid desaturase [Sesamum indicum]
  misc_feature (1)..(385): NCBI GI NO: 1345977 NR Description: Omega-6 fatty acid desaturase
  misc_feature (1)..(385): NCBI GI NO: 4378875 NR Description: delta-12 desaturase [Brassica carinata]
  misc_feature (1)..(385): NCBI GI NO: 7433295 NR Description: omega-6 desaturase, microsomal - upland cotton
  misc_feature (1)..(385): NCBI GI NO: 17225582 NR Description: delta-12 fatty acid desaturase
  misc_feature (178)..(385): NCBI GI NO: 32421083 NR Description: hypothetical protein [Neurospora crassa]

SEQ ID NO: 27693 - DNA, 1386 bp, Zea mays subsp. mays
  misc_feature (1)..(1386): Ceres Seq. ID no. 13493626
  misc_feature (559)..(559): n is a, c, t, g, unknown, or other
  misc_feature (554)..(554): n is a, c, t, g, unknown, or other
  misc_feature (546)..(546): n is a, c, t, g, unknown, or other
  misc_feature (548)..(548): n is a, c, t, g, unknown, or other
  misc_feature (575)..(575): n is a, c, t, g, unknown, or other
  misc_feature (551)..(551): n is a, c, t, g, unknown, or other
gaaggaaggaagccatgatgatgatgggcgaaggcgtgagcatgccgccgtggtcccaccacgtccctgtgagcggcgtcgacgaaggcgacgagatgacgccgtacctgctcgcggcgctgcgccagtacctgccgtgcaacgacgccggcgccgaggccgaggaggatgaggcggccgccgccatggcggcgggcgtggacggctacggctgcgacgagttccgcatgtacgagttcaaggtccggcggtgcgcgcgcgcgcgcagccacgactggaccgagtgccccttcgcgcacccgggggagaaggcgcggcgccgcgacccgcgcaagtaccactactccggcgccacctgcccggacttccgcaagggcgggtgcaagcgcggcgacggctgcgacatggcgcacggcgtcttcgagtgctggctccacccggcgcgctaccgcacccagccctgcaaggacggcacggcctgccgccgccgggtctgcttcttcgcgcacaccgcggaccagctgcgcgtgctcccgcccacgccgnancancantccanccccagggggcgccgnctgctcttcccccgctcgccgagtcctacgacggctccccgctccggcgccaggcgttcgagagctacctcaccaagagcatcatgtgctcgtcgccgaccagcaccctcctatcgccgcccaagtcgcccccgtcggagtccccgccattgtcgcccgacttccgccgtgggtgctggccgggcgccgggtcccccgtcaacgacgtgctcgcctcgctccgtcagctccgcctcagcagggccaactcgtccccgtcgggcggctggtgcagctaccctgcatccgcggtcgcgtacggatcgcctacggggggcgcgctctacggcctgtcctccaccccgagggccaccgccggctccggctacatggccaacctggaccctctcgacgtcaccttcggcggcgacgaggagcccgtggagagggtggagtccggccgcgcactccgcgcgaaggtgttcgagcggcttagcagggagggcgctgtttccggcgacgccggtggccccgacgtcgggtgggtctccgacctcatcaactgaggcggcggcgggtccctggcatggcaggtggcaatggcaatgggcatgggcatggagaaaggtgatggtgagccgtatcggagaaggatggcatccaaaaaaatatttccctgcatttgatttcgttcctcagttaattccgctaatccccgtgtacatatctatcaccctgtgaatattctcggttggtaagagggaggatgatgctaggcggtggatggatgggtggatttgttttggggttcttgaggtagcggaaaatatcc

SEQ ID NO: 27694 - protein, 430 aa, Zea mays subsp. mays
  peptide (1)..(430): Ceres Seq. ID no. 13493627
  misc_feature (201)..(376): Pfam Name: Pfam Description:  Equine herpesvirus glycoprotein gp2
  misc_feature (5)..(250): NCBI GI NO: 34906436 NR Description: putative zinc finger transcription factor
  misc_feature (33)..(178): NCBI GI NO: 15225213 NR Description: CCCH-type zinc finger protein -related
  misc_feature (33)..(178): NCBI GI NO: 21593538 NR Description: putative CCCH-type zinc finger protein
  misc_feature (6)..(211): NCBI GI NO: 15224852 NR Description: CCCH-type zinc finger protein -related
  misc_feature (37)..(276): NCBI GI NO: 15233491 NR Description: expressed protein [Arabidopsis thaliana]
  misc_feature (67)..(255): NCBI GI NO: 15219557 NR Description: expressed protein [Arabidopsis thaliana]
  misc_feature (67)..(255): NCBI GI NO: 26449538 NR Description: unknown protein [Arabidopsis thaliana]
  misc_feature (67)..(181): NCBI GI NO: 15241451 NR Description: expressed protein [Arabidopsis thaliana]
  misc_feature (69)..(240): NCBI GI NO: 18405834 NR Description: CCCH-type zinc finger protein -related
  misc_feature (69)..(233): NCBI GI NO: 28273376 NR Description: unknown protein
  misc_feature (182)..(182): Xaa is any aa, unknown or other
  misc_feature (183)..(183): Xaa is any aa, unknown or other
  misc_feature (184)..(184): Xaa is any aa, unknown or other
  misc_feature (186)..(186): Xaa is any aa, unknown or other
  misc_feature (191)..(191): Xaa is any aa, unknown or other
RKEAMMMMGEGVSMPPWSHHVPVSGVDEGDEMTPYLLAALRQYLPCNDAGAEAEEDEAAAAMAAGVDGYGCDEFRMYEFKVRRCARARSHDWTECPFAHPGEKARRRDPRKYHYSGATCPDFRKGGCKRGDGCDMAHGVFECWLHPARYRTQPCKDGTACRRRVCFFAHTADQLRVLPPTPXXXSXPRGRXLLFPRSPSPTTAPRSGARRSRATSPRASCARRRPAPSYRRPSRPRRSPRHCRPTSAVGAGRAPGPPSTTCSPRSVSSASAGPTRPRRAAGAATLHPRSRTDRLRGARSTACPPPRGPPPAPATWPTWTLSTSPSAATRSPWRGWSPAAHSARRCSSGLAGRALFPATPVAPTSGGSPTSSTEAAAGPWHGRWQWQWAWAWRKVMVSRIGEGWHPKKYFPAFDFVPQLIPLIPVYISITL

SEQ ID NO: 27695 - protein, 426 aa, Zea mays subsp. mays
  peptide (1)..(426): Ceres Seq. ID no. 13493628
  misc_feature (197)..(372): Pfam Name: Pfam Description:  Equine herpesvirus glycoprotein gp2
  misc_feature (1)..(246): NCBI GI NO: 34906436 NR Description: putative zinc finger transcription factor
  misc_feature (29)..(174): NCBI GI NO: 15225213 NR Description: CCCH-type zinc finger protein -related
  misc_feature (29)..(174): NCBI GI NO: 21593538 NR Description: putative CCCH-type zinc finger protein
  misc_feature (2)..(207): NCBI GI NO: 15224852 NR Description: CCCH-type zinc finger protein -related
  misc_feature (33)..(272): NCBI GI NO: 15233491 NR Description: expressed protein [Arabidopsis thaliana]
  misc_feature (63)..(251): NCBI GI NO: 15219557 NR Description: expressed protein [Arabidopsis thaliana]
  misc_feature (63)..(251): NCBI GI NO: 26449538 NR Description: unknown protein [Arabidopsis thaliana]
  misc_feature (63)..(177): NCBI GI NO: 15241451 NR Description: expressed protein [Arabidopsis thaliana]
  misc_feature (65)..(236): NCBI GI NO: 18405834 NR Description: CCCH-type zinc finger protein -related
  misc_feature (65)..(229): NCBI GI NO: 28273376 NR Description: unknown protein
  misc_feature (178)..(178): Xaa is any aa, unknown or other
  misc_feature (179)..(179): Xaa is any aa, unknown or other
  misc_feature (180)..(180): Xaa is any aa, unknown or other
  misc_feature (182)..(182): Xaa is any aa, unknown or other
  misc_feature (187)..(187): Xaa is any aa, unknown or other
MMMMGEGVSMPPWSHHVPVSGVDEGDEMTPYLLAALRQYLPCNDAGAEAEEDEAAAAMAAGVDGYGCDEFRMYEFKVRRCARARSHDWTECPFAHPGEKARRRDPRKYHYSGATCPDFRKGGCKRGDGCDMAHGVFECWLHPARYRTQPCKDGTACRRRVCFFAHTADQLRVLPPTPXXXSXPRGRXLLFPRSPSPTTAPRSGARRSRATSPRASCARRRPAPSYRRPSRPRRSPRHCRPTSAVGAGRAPGPPSTTCSPRSVSSASAGPTRPRRAAGAATLHPRSRTDRLRGARSTACPPPRGPPPAPATWPTWTLSTSPSAATRSPWRGWSPAAHSARRCSSGLAGRALFPATPVAPTSGGSPTSSTEAAAGPWHGRWQWQWAWAWRKVMVSRIGEGWHPKKYFPAFDFVPQLIPLIPVYISITL

SEQ ID NO: 27696 - protein, 425 aa, Zea mays subsp. mays
  peptide (1)..(425): Ceres Seq. ID no. 13493629
  misc_feature (196)..(371): Pfam Name: Pfam Description:  Equine herpesvirus glycoprotein gp2
  misc_feature (1)..(245): NCBI GI NO: 34906436 NR Description: putative zinc finger transcription factor
  misc_feature (28)..(173): NCBI GI NO: 15225213 NR Description: CCCH-type zinc finger protein -related
  misc_feature (28)..(173): NCBI GI NO: 21593538 NR Description: putative CCCH-type zinc finger protein
  misc_feature (1)..(206): NCBI GI NO: 15224852 NR Description: CCCH-type zinc finger protein -related
  misc_feature (32)..(271): NCBI GI NO: 15233491 NR Description: expressed protein [Arabidopsis thaliana]
  misc_feature (62)..(250): NCBI GI NO: 15219557 NR Description: expressed protein [Arabidopsis thaliana]
  misc_feature (62)..(250): NCBI GI NO: 26449538 NR Description: unknown protein [Arabidopsis thaliana]
  misc_feature (62)..(176): NCBI GI NO: 15241451 NR Description: expressed protein [Arabidopsis thaliana]
  misc_feature (64)..(235): NCBI GI NO: 18405834 NR Description: CCCH-type zinc finger protein -related
  misc_feature (64)..(228): NCBI GI NO: 28273376 NR Description: unknown protein
  misc_feature (177)..(177): Xaa is any aa, unknown or other
  misc_feature (178)..(178): Xaa is any aa, unknown or other
  misc_feature (179)..(179): Xaa is any aa, unknown or other
  misc_feature (181)..(181): Xaa is any aa, unknown or other
  misc_feature (186)..(186): Xaa is any aa, unknown or other
MMMGEGVSMPPWSHHVPVSGVDEGDEMTPYLLAALRQYLPCNDAGAEAEEDEAAAAMAAGVDGYGCDEFRMYEFKVRRCARARSHDWTECPFAHPGEKARRRDPRKYHYSGATCPDFRKGGCKRGDGCDMAHGVFECWLHPARYRTQPCKDGTACRRRVCFFAHTADQLRVLPPTPXXXSXPRGRXLLFPRSPSPTTAPRSGARRSRATSPRASCARRRPAPSYRRPSRPRRSPRHCRPTSAVGAGRAPGPPSTTCSPRSVSSASAGPTRPRRAAGAATLHPRSRTDRLRGARSTACPPPRGPPPAPATWPTWTLSTSPSAATRSPWRGWSPAAHSARRCSSGLAGRALFPATPVAPTSGGSPTSSTEAAAGPWHGRWQWQWAWAWRKVMVSRIGEGWHPKKYFPAFDFVPQLIPLIPVYISITL

SEQ ID NO: 27697 - DNA, 1653 bp, Zea mays subsp. mays
  misc_feature (1)..(1653): Ceres Seq. ID no. 12347991
aaaaactcctcaagcaatttccatttccaccacgaccactctcttcctcgcagcgcgtaccaacccgccgccgtctactgccactccgcctgctcatggcctcccctacgcaaggtgatgcccccctcgcggctccggctccggcggctgacgctacggacgcggccttcgccgccgcggccgcggtgccggatccaggcgcagagttcgggttccagcgtccggagctcgggaaggagaagctggtcgggacgggtggggttccacgagcgccatgtgttcctctgttacaagggcccggatttgtggccgtcccacctcgaggcctctgagtctgaccgcctcccccgcctcctcgccgccgccatcaaggcccgaaagcccaatctgaagaagaccatcaaattgaccatctgtgaaggagaagatggcactgaatcatcaaatggagatgtgttgatctttccagatatgatcagatataaagggctgacccattttgatgtggacaactttgttgaagaagtgcttgtgaaggatattgactggcttcctagatctcctgagcctatgagtggttcctatatttttgtttgctcccatggaagcagggacaaaaggtgtggtgtttgtggacctgctttgattaaaaggttcaaggaagagataaatgaactgggacttgatgatcaggtggctgtcagtgcatgctcacacgtgggaggtcataagtatgcaggaaatgtcatcattttcagttctgatgccaagggagaagtgactggtcattggtatggttatgttgttcctgatgatgtgcctgttttgctgcataaacatattggacaaggagaagttgtggaccatctatggaggggacagatgggtttatctgtggagcagcagaagcgagctctcgagcttcggaacatggtaaatggtggcgaagaatcccttgaagaaaccagaacagatggtgcttctttcaaccctgcagcagctggtggatgctgccaaggcaatggtggcttcacctgctgccaaactgacctgccaaaggaaaaacaagacaagagcatcatagctgagcagaaccccaagagctctgacaaggagggtggtgctggcagcaagaagggggatacaaagacttgcccagtgcccatctggtttgagacctgggagagagctgacacatatgccgctcttgctgttgttgcagctgccacagcggtgcttgtctccttcagaatctacaagaacctcaactgaagaacatgggagatcctggaagaggtgcccgaaacaagtatatgtgaaacagcttactgtgataagtctgggatgagaataaatttacctgtgcataatgctaggcttaggctatgggctatggctagcaaatcgttgtgcaaaatactgttgtatattgtttacaaagtgatgtttgaaatagaagataacggtgatgaacaagccgttggagatagccttagaacctcaaagtagcttatctggagatggagacggcgatgaaaagatgttgctgccagtgttctcgtatgtgaactccttgtgaacctccactgcaattgaagtttcgatgccttagctgctgtttatcataagcaaggcgatgggatcggcatcacc

SEQ ID NO: 27698 - protein, 423 aa, Zea mays subsp. mays
  peptide (1)..(423): Ceres Seq. ID no. 12347992
  misc_feature (83)..(350): NCBI GI NO: 16604384 NR Description: AT4g26620/T15N24_70 [Arabidopsis thaliana]
  misc_feature (83)..(350): NCBI GI NO: 18416788 NR Description: sucrase-like protein; protein id: At4g26620
  misc_feature (316)..(422): NCBI GI NO: 16604384 NR Description: AT4g26620/T15N24_70 [Arabidopsis thaliana]
  misc_feature (316)..(422): NCBI GI NO: 18416788 NR Description: sucrase-like protein; protein id: At4g26620
  misc_feature (83)..(422): NCBI GI NO: 15241075 NR Description: sucrose cleavage protein-like
  misc_feature (292)..(422): NCBI GI NO: 7488353 NR Description: sucrose cleavage protein homolog T15N24
  misc_feature (83)..(228): NCBI GI NO: 7488353 NR Description: sucrose cleavage protein homolog T15N24
  misc_feature (83)..(358): NCBI GI NO: 1086252 NR Description: sucrose cleavage protein - potato
  misc_feature (89)..(358): NCBI GI NO: 21553503 NR Description: sucrose cleavage protein-like
  misc_feature (89)..(358): NCBI GI NO: 9758077 NR Description: sucrose cleavage protein-like
KNSSSNFHFHHDHSLPRSAYQPAAVYCHSACSWPPLRKVMPPSRLRLRRLTLRTRPSPPRPRCRIQAQSSGSSVRSSGRRSWSGRVGFHERHVFLCYKGPDLWPSHLEASESDRLPRLLAAAIKARKPNLKKTIKLTICEGEDGTESSNGDVLIFPDMIRYKGLTHFDVDNFVEEVLVKDIDWLPRSPEPMSGSYIFVCSHGSRDKRCGVCGPALIKRFKEEINELGLDDQVAVSACSHVGGHKYAGNVIIFSSDAKGEVTGHWYGYVVPDDVPVLLHKHIGQGEVVDHLWRGQMGLSVEQQKRALELRNMVNGGEESLEETRTDGASFNPAAAGGCCQGNGGFTCCQTDLPKEKQDKSIIAEQNPKSSDKEGGAGSKKGDTKTCPVPIWFETWERADTYAALAVVAAATAVLVSFRIYKNLN

SEQ ID NO: 27699 - protein, 384 aa, Zea mays subsp. mays
  peptide (1)..(384): Ceres Seq. ID no. 12347993
  misc_feature (44)..(311): NCBI GI NO: 16604384 NR Description: AT4g26620/T15N24_70 [Arabidopsis thaliana]
  misc_feature (44)..(311): NCBI GI NO: 18416788 NR Description: sucrase-like protein; protein id: At4g26620
  misc_feature (277)..(383): NCBI GI NO: 16604384 NR Description: AT4g26620/T15N24_70 [Arabidopsis thaliana]
  misc_feature (277)..(383): NCBI GI NO: 18416788 NR Description: sucrase-like protein; protein id: At4g26620
  misc_feature (44)..(383): NCBI GI NO: 15241075 NR Description: sucrose cleavage protein-like
  misc_feature (253)..(383): NCBI GI NO: 7488353 NR Description: sucrose cleavage protein homolog T15N24
  misc_feature (44)..(189): NCBI GI NO: 7488353 NR Description: sucrose cleavage protein homolog T15N24
  misc_feature (44)..(319): NCBI GI NO: 1086252 NR Description: sucrose cleavage protein - potato
  misc_feature (50)..(319): NCBI GI NO: 21553503 NR Description: sucrose cleavage protein-like
  misc_feature (50)..(319): NCBI GI NO: 9758077 NR Description: sucrose cleavage protein-like
MPPSRLRLRRLTLRTRPSPPRPRCRIQAQSSGSSVRSSGRRSWSGRVGFHERHVFLCYKGPDLWPSHLEASESDRLPRLLAAAIKARKPNLKKTIKLTICEGEDGTESSNGDVLIFPDMIRYKGLTHFDVDNFVEEVLVKDIDWLPRSPEPMSGSYIFVCSHGSRDKRCGVCGPALIKRFKEEINELGLDDQVAVSACSHVGGHKYAGNVIIFSSDAKGEVTGHWYGYVVPDDVPVLLHKHIGQGEVVDHLWRGQMGLSVEQQKRALELRNMVNGGEESLEETRTDGASFNPAAAGGCCQGNGGFTCCQTDLPKEKQDKSIIAEQNPKSSDKEGGAGSKKGDTKTCPVPIWFETWERADTYAALAVVAAATAVLVSFRIYKNLN

SEQ ID NO: 27700 - protein, 266 aa, Zea mays subsp. mays
  peptide (1)..(266): Ceres Seq. ID no. 12347994
  misc_feature (1)..(193): NCBI GI NO: 16604384 NR Description: AT4g26620/T15N24_70 [Arabidopsis thaliana]
  misc_feature (1)..(193): NCBI GI NO: 18416788 NR Description: sucrase-like protein; protein id: At4g26620
  misc_feature (159)..(265): NCBI GI NO: 16604384 NR Description: AT4g26620/T15N24_70 [Arabidopsis thaliana]
  misc_feature (159)..(265): NCBI GI NO: 18416788 NR Description: sucrase-like protein; protein id: At4g26620
  misc_feature (1)..(265): NCBI GI NO: 15241075 NR Description: sucrose cleavage protein-like
  misc_feature (135)..(265): NCBI GI NO: 7488353 NR Description: sucrose cleavage protein homolog T15N24
  misc_feature (1)..(71): NCBI GI NO: 7488353 NR Description: sucrose cleavage protein homolog T15N24
  misc_feature (1)..(201): NCBI GI NO: 1086252 NR Description: sucrose cleavage protein - potato
  misc_feature (1)..(201): NCBI GI NO: 21553503 NR Description: sucrose cleavage protein-like
  misc_feature (1)..(201): NCBI GI NO: 9758077 NR Description: sucrose cleavage protein-like
MIRYKGLTHFDVDNFVEEVLVKDIDWLPRSPEPMSGSYIFVCSHGSRDKRCGVCGPALIKRFKEEINELGLDDQVAVSACSHVGGHKYAGNVIIFSSDAKGEVTGHWYGYVVPDDVPVLLHKHIGQGEVVDHLWRGQMGLSVEQQKRALELRNMVNGGEESLEETRTDGASFNPAAAGGCCQGNGGFTCCQTDLPKEKQDKSIIAEQNPKSSDKEGGAGSKKGDTKTCPVPIWFETWERADTYAALAVVAAATAVLVSFRIYKNLN

SEQ ID NO: 27701 - DNA, 1517 bp, Zea mays subsp. mays
  misc_feature (1)..(1517): Ceres Seq. ID no. 13570867
agccacacaagcaaagaacttggccccgcctcccgtctcttaccgcacatgcgcgtcgggccgcgtcgacatagctgcttgccgccgacacccgcagccgcaatggccgtcgcccacgcgccgccgcgccggggcgtgctccccctcctgctcgtcgccgcgctcgtggcggcgttgccggccacctgcgccgcggccaggagcaagaagtcgtacacggccatcttcagcttcggggactcgctctccgacgccggcaacctcatcgtcaacggcacgcccaaggcgctcaccaccgcgcgccctccctacgggatgaccttcttccgcaagcccaccggccgctgctccaacggccgcctcgtcgtcgacttcctggccgagcatttcgggctgccactgccgccaccgtcgcaggccaagggcaaggacttcaagaagggcgccaacttcgccatcaccggcgcgacggccctggagtactccttcttcaaggcgcacggcatcgaccagcgcatctggaacaccggctccatcaacacccagatcggctggctccaggacatgaagccgtccctctgtaaatcggagcaagactgcaaggattacttcagcaaatccctgttcgtcgtcggggagttcgggggcaacgactacaacgcgccgctcttctccggcgtcccattttctgatgtcaagacttacgtgccccttgttgcaaaggctatcgccaatggcgttgagaaactgatcgagcttggggcaacagacctcctggtgcctggcgttctcccaattggctgcttcccgttgtacctgacgctgtacaacaccagcagcaaagcagattacaacgcccggaccgggtgccttcggaggtacaaccgcctggccttccaccacaacagggagctgaagcagcagcttgacgagcttcagaagaagtaccccaagacgaagatcatgtatggagattacttcaaggctgcactgcagtttgtcgtcaaccctgggaaatttggtttcagcacggctttgcaagcgtgctgcggcgccggagggcagggcaactacaacttcaacctgaagaagaagtgtggcgagcagggcgcgagcgtgtgctccaacccgtcgtcgtacgtgagctgggatggcatccacatgaccgaagctgcgtacagaaaggtcgccgatggctggttgaatggcccgtatgctcagcccccaattctcaagtcatgatcgagattactaggctgtgcgtaacaccgccgcagctgcatgctgcggctagagatatatatgaggagtgtttcaggcaatagatatgctaagttatggtaaagctatttggtctgttcattggaagatctgtataaactgcgccggtatagatatgttcccagctgaaatggctctagcacagatgtgcatggcatgttctctgattcttttcatttgttctaaaaaaatattgcggcagtaatatgagttgataaaagtaactaaatttctgc

SEQ ID NO: 27702 - protein, 413 aa, Zea mays subsp. mays
  peptide (1)..(413): Ceres Seq. ID no. 13570868
  misc_feature (75)..(400): Pfam Name: Pfam Description:  GDSL-like Lipase/Acylhydrolase
  misc_feature (50)..(411): NCBI GI NO: 34903956 NR Description: OSJNBa0038J17.23
  misc_feature (52)..(413): NCBI GI NO: 34903958 NR Description: OSJNBa0038J17.24
  misc_feature (70)..(411): NCBI GI NO: 34903978 NR Description: unnamed protein product
  misc_feature (39)..(411): NCBI GI NO: 34903996 NR Description: unnamed protein product
  misc_feature (39)..(411): NCBI GI NO: 34903994 NR Description: unnamed protein product
  misc_feature (39)..(413): NCBI GI NO: 34903986 NR Description: unnamed protein product
  misc_feature (49)..(408): NCBI GI NO: 15242538 NR Description: GDSL-motif lipase/hydrolase protein
  misc_feature (51)..(413): NCBI GI NO: 21593234 NR Description: lipase, putative [Arabidopsis thaliana]
  misc_feature (49)..(408): NCBI GI NO: 21553708 NR Description: GDSL-motif lipase/hydrolase-like protein
  misc_feature (51)..(413): NCBI GI NO: 10764858 NR Description: F1K23.17 [Arabidopsis thaliana]
SHTSKELGPASRLLPHMRVGPRRHSCLPPTPAAAMAVAHAPPRRGVLPLLLVAALVAALPATCAAARSKKSYTAIFSFGDSLSDAGNLIVNGTPKALTTARPPYGMTFFRKPTGRCSNGRLVVDFLAEHFGLPLPPPSQAKGKDFKKGANFAITGATALEYSFFKAHGIDQRIWNTGSINTQIGWLQDMKPSLCKSEQDCKDYFSKSLFVVGEFGGNDYNAPLFSGVPFSDVKTYVPLVAKAIANGVEKLIELGATDLLVPGVLPIGCFPLYLTLYNTSSKADYNARTGCLRRYNRLAFHHNRELKQQLDELQKKYPKTKIMYGDYFKAALQFVVNPGKFGFSTALQACCGAGGQGNYNFNLKKKCGEQGASVCSNPSSYVSWDGIHMTEAAYRKVADGWLNGPYAQPPILKS

SEQ ID NO: 27703 - protein, 397 aa, Zea mays subsp. mays
  peptide (1)..(397): Ceres Seq. ID no. 13570869
  misc_feature (59)..(384): Pfam Name: Pfam Description:  GDSL-like Lipase/Acylhydrolase
  misc_feature (34)..(395): NCBI GI NO: 34903956 NR Description: OSJNBa0038J17.23
  misc_feature (36)..(397): NCBI GI NO: 34903958 NR Description: OSJNBa0038J17.24
  misc_feature (54)..(395): NCBI GI NO: 34903978 NR Description: unnamed protein product
  misc_feature (23)..(395): NCBI GI NO: 34903996 NR Description: unnamed protein product
  misc_feature (23)..(395): NCBI GI NO: 34903994 NR Description: unnamed protein product
  misc_feature (23)..(397): NCBI GI NO: 34903986 NR Description: unnamed protein product
  misc_feature (33)..(392): NCBI GI NO: 15242538 NR Description: GDSL-motif lipase/hydrolase protein
  misc_feature (35)..(397): NCBI GI NO: 21593234 NR Description: lipase, putative [Arabidopsis thaliana]
  misc_feature (33)..(392): NCBI GI NO: 21553708 NR Description: GDSL-motif lipase/hydrolase-like protein
  misc_feature (35)..(397): NCBI GI NO: 10764858 NR Description: F1K23.17 [Arabidopsis thaliana]
MRVGPRRHSCLPPTPAAAMAVAHAPPRRGVLPLLLVAALVAALPATCAAARSKKSYTAIFSFGDSLSDAGNLIVNGTPKALTTARPPYGMTFFRKPTGRCSNGRLVVDFLAEHFGLPLPPPSQAKGKDFKKGANFAITGATALEYSFFKAHGIDQRIWNTGSINTQIGWLQDMKPSLCKSEQDCKDYFSKSLFVVGEFGGNDYNAPLFSGVPFSDVKTYVPLVAKAIANGVEKLIELGATDLLVPGVLPIGCFPLYLTLYNTSSKADYNARTGCLRRYNRLAFHHNRELKQQLDELQKKYPKTKIMYGDYFKAALQFVVNPGKFGFSTALQACCGAGGQGNYNFNLKKKCGEQGASVCSNPSSYVSWDGIHMTEAAYRKVADGWLNGPYAQPPILKS

SEQ ID NO: 27704 - protein, 379 aa, Zea mays subsp. mays
  peptide (1)..(379): Ceres Seq. ID no. 13570870
  misc_feature (41)..(366): Pfam Name: Pfam Description:  GDSL-like Lipase/Acylhydrolase
  misc_feature (16)..(377): NCBI GI NO: 34903956 NR Description: OSJNBa0038J17.23
  misc_feature (18)..(379): NCBI GI NO: 34903958 NR Description: OSJNBa0038J17.24
  misc_feature (36)..(377): NCBI GI NO: 34903978 NR Description: unnamed protein product
  misc_feature (5)..(377): NCBI GI NO: 34903996 NR Description: unnamed protein product
  misc_feature (5)..(377): NCBI GI NO: 34903994 NR Description: unnamed protein product
  misc_feature (5)..(379): NCBI GI NO: 34903986 NR Description: unnamed protein product
  misc_feature (15)..(374): NCBI GI NO: 15242538 NR Description: GDSL-motif lipase/hydrolase protein
  misc_feature (17)..(379): NCBI GI NO: 21593234 NR Description: lipase, putative [Arabidopsis thaliana]
  misc_feature (15)..(374): NCBI GI NO: 21553708 NR Description: GDSL-motif lipase/hydrolase-like protein
  misc_feature (17)..(379): NCBI GI NO: 10764858 NR Description: F1K23.17 [Arabidopsis thaliana]
MAVAHAPPRRGVLPLLLVAALVAALPATCAAARSKKSYTAIFSFGDSLSDAGNLIVNGTPKALTTARPPYGMTFFRKPTGRCSNGRLVVDFLAEHFGLPLPPPSQAKGKDFKKGANFAITGATALEYSFFKAHGIDQRIWNTGSINTQIGWLQDMKPSLCKSEQDCKDYFSKSLFVVGEFGGNDYNAPLFSGVPFSDVKTYVPLVAKAIANGVEKLIELGATDLLVPGVLPIGCFPLYLTLYNTSSKADYNARTGCLRRYNRLAFHHNRELKQQLDELQKKYPKTKIMYGDYFKAALQFVVNPGKFGFSTALQACCGAGGQGNYNFNLKKKCGEQGASVCSNPSSYVSWDGIHMTEAAYRKVADGWLNGPYAQPPILKS

SEQ ID NO: 27705 - DNA, 983 bp, Zea mays subsp. mays
  misc_feature (1)..(983): Ceres Seq. ID no. 12340823
aaccttatttggcccggcgcgggagcccgtcctataactgaataaccgatcgaggcgcgcaacgcacacctccgattcaggacgagcagccggccagccagcgcgcgagaggacgtacggacgcacagctaggcggaggcgatggacggccgacgacgacggcaatggccgcggtcgcgctcgggggctgccgccgcgcctctcctcctcctgctgctcctggcggtgtccttgggtgggcatggtgatcacggcgcggcggctgcgggcgtcgccccggcaggcggcaacggcatgacggagctgcagaagcacgtggcgttcttcgaccgcaaccacgacggcatcatcaccttcgacgagacctaccaaggtctgcgggacgtcggagtcggcgatgtcacggccaaagccagcgccgcgttcataaacggcgccctcgggcccaagaccagacctgacaattccaactcctcaagcatggatatctacgtagagaacattcagaagggcaaacatggaagcgacacaggcgcctacgacgctcaaggaaggttcgttcccgcgaagctggacgagatgttcaccaagcacgccaagaccgtaccgaacgctctgacgaaagacgagctcgacgagatgctcaaggataaccgggagaagatggacgtcgcaggatggctgggagccaagtcggagtgggagatgctgtacaagctggccaaggacaaggacgggcgcctgcccaaggacaccgtcaggaccgtgtacgacggatccctcttttaccagctggcggcgcaggggaagaagggctgattcggttacgttaatttcagtaatcaataacaagcaacgtttttttttttttgtcgtttctgaatgcttgcctgtgtggctgtgtaagaaagcgagtgggtcggactcaatggcaggcaacggttttgttttttttattattattttaacggatcggttctact

SEQ ID NO: 27706 - protein, 225 aa, Zea mays subsp. mays
  peptide (1)..(225): Ceres Seq. ID no. 12340824
  misc_feature (51)..(218): Pfam Name: Pfam Description:  Caleosin related protein
  misc_feature (1)..(218): NCBI GI NO: 34902470 NR Description: Putative abscisic acid-induced protein - rice
  misc_feature (55)..(221): NCBI GI NO: 18409649 NR Description: Ca2+-binding EF-hand common family protein
  misc_feature (55)..(221): NCBI GI NO: 18409651 NR Description: Ca2+-binding EF-hand common family protein
  misc_feature (55)..(221): NCBI GI NO: 21593851 NR Description: unknown [Arabidopsis thaliana]
  misc_feature (55)..(221): NCBI GI NO: 21617961 NR Description: unknown [Arabidopsis thaliana]
  misc_feature (52)..(218): NCBI GI NO: 15220687 NR Description: pollen coat EF-hand protein; protein id:At1g23240
  misc_feature (10)..(218): NCBI GI NO: 6900308 NR Description: putative calcium binding EF-hand protein
  misc_feature (55)..(197): NCBI GI NO: 37652831 NR Description: calcium binding protein [Fagus sylvatica]
  misc_feature (50)..(225): NCBI GI NO: 6478218 NR Description: caleosin [Sesamum indicum]
  misc_feature (43)..(215): NCBI GI NO: 7459611 NR Description: Ca+2-binding EF hand protein homolog PM13
MDGRRRRQWPRSRSGAAAAPLLLLLLLAVSLGGHGDHGAAAAGVAPAGGNGMTELQKHVAFFDRNHDGIITFDETYQGLRDVGVGDVTAKASAAFINGALGPKTRPDNSNSSSMDIYVENIQKGKHGSDTGAYDAQGRFVPAKLDEMFTKHAKTVPNALTKDELDEMLKDNREKMDVAGWLGAKSEWEMLYKLAKDKDGRLPKDTVRTVYDGSLFYQLAAQGKKG

SEQ ID NO: 27707 - protein, 174 aa, Zea mays subsp. mays
  peptide (1)..(174): Ceres Seq. ID no. 12340825
  misc_feature (1)..(167): Pfam Name: Pfam Description:  Caleosin related protein
  misc_feature (1)..(167): NCBI GI NO: 34902470 NR Description: Putative abscisic acid-induced protein - rice
  misc_feature (4)..(170): NCBI GI NO: 18409649 NR Description: Ca2+-binding EF-hand common family protein
  misc_feature (4)..(170): NCBI GI NO: 18409651 NR Description: Ca2+-binding EF-hand common family protein
  misc_feature (4)..(170): NCBI GI NO: 21593851 NR Description: unknown [Arabidopsis thaliana]
  misc_feature (4)..(170): NCBI GI NO: 21617961 NR Description: unknown [Arabidopsis thaliana]
  misc_feature (1)..(167): NCBI GI NO: 15220687 NR Description: pollen coat EF-hand protein; protein id:At1g23240
  misc_feature (1)..(167): NCBI GI NO: 6900308 NR Description: putative calcium binding EF-hand protein
  misc_feature (4)..(146): NCBI GI NO: 37652831 NR Description: calcium binding protein [Fagus sylvatica]
  misc_feature (1)..(174): NCBI GI NO: 6478218 NR Description: caleosin [Sesamum indicum]
  misc_feature (1)..(164): NCBI GI NO: 7459611 NR Description: Ca+2-binding EF hand protein homolog PM13
MTELQKHVAFFDRNHDGIITFDETYQGLRDVGVGDVTAKASAAFINGALGPKTRPDNSNSSSMDIYVENIQKGKHGSDTGAYDAQGRFVPAKLDEMFTKHAKTVPNALTKDELDEMLKDNREKMDVAGWLGAKSEWEMLYKLAKDKDGRLPKDTVRTVYDGSLFYQLAAQGKKG

SEQ ID NO: 27708 - protein, 112 aa, Zea mays subsp. mays
  peptide (1)..(112): Ceres Seq. ID no. 12340826
  misc_feature (1)..(105): Pfam Name: Pfam Description:  Caleosin related protein
  misc_feature (1)..(105): NCBI GI NO: 34902470 NR Description: Putative abscisic acid-induced protein - rice
  misc_feature (1)..(108): NCBI GI NO: 18409649 NR Description: Ca2+-binding EF-hand common family protein
  misc_feature (1)..(108): NCBI GI NO: 18409651 NR Description: Ca2+-binding EF-hand common family protein
  misc_feature (1)..(108): NCBI GI NO: 21593851 NR Description: unknown [Arabidopsis thaliana]
  misc_feature (1)..(108): NCBI GI NO: 21617961 NR Description: unknown [Arabidopsis thaliana]
  misc_feature (1)..(105): NCBI GI NO: 15220687 NR Description: pollen coat EF-hand protein; protein id:At1g23240
  misc_feature (1)..(105): NCBI GI NO: 6900308 NR Description: putative calcium binding EF-hand protein
  misc_feature (1)..(84): NCBI GI NO: 37652831 NR Description: calcium binding protein [Fagus sylvatica]
  misc_feature (1)..(112): NCBI GI NO: 6478218 NR Description: caleosin [Sesamum indicum]
  misc_feature (1)..(102): NCBI GI NO: 7459611 NR Description: Ca+2-binding EF hand protein homolog PM13
MDIYVENIQKGKHGSDTGAYDAQGRFVPAKLDEMFTKHAKTVPNALTKDELDEMLKDNREKMDVAGWLGAKSEWEMLYKLAKDKDGRLPKDTVRTVYDGSLFYQLAAQGKKG

SEQ ID NO: 27709 - DNA, 1514 bp, Zea mays subsp. mays; identical to SEQ ID NO: 23751
  misc_feature (1)..(1514): Ceres Seq. ID no. 12340715
  misc_feature (245)..(245): n is a, c, t, g, unknown, or other
  misc_feature (48)..(48): n is a, c, t, g, unknown, or other
  misc_feature (200)..(200): n is a, c, t, g, unknown, or other
  misc_feature (149)..(149): n is a, c, t, g, unknown, or other
  misc_feature (203)..(203): n is a, c, t, g, unknown, or other
  misc_feature (261)..(261): n is a, c, t, g, unknown, or other
  misc_feature (248)..(248): n is a, c, t, g, unknown, or other

SEQ ID NO: 27710 - protein, 309 aa, Zea mays subsp. mays; identical to SEQ ID NO: 23752
  peptide (1)..(309): Ceres Seq. ID no. 12340716
  misc_feature (1)..(309): NCBI GI NO: 34914658 NR Description: P0504D03.20
  misc_feature (5)..(309): NCBI GI NO: 18403828 NR Description: expressed protein; protein id: At3g23620
  misc_feature (5)..(309): NCBI GI NO: 21554561 NR Description: unknown [Arabidopsis thaliana]
  misc_feature (5)..(305): NCBI GI NO: 7670547 NR Description: unnamed protein product [Mus musculus]
  misc_feature (8)..(305): NCBI GI NO: 27705690 NR Description: similar to RIKEN cDNA 2810470K21 gene
  misc_feature (8)..(305): NCBI GI NO: 18203123 NR Description: Brix domain containing protein 1
  misc_feature (8)..(305): NCBI GI NO: 39930469 NR Description: brix domain containing 1 [Homo sapiens]
  misc_feature (8)..(305): NCBI GI NO: 31982662 NR Description: RIKEN cDNA 2810470K21 [Mus musculus]
  misc_feature (8)..(305): NCBI GI NO: 12850727 NR Description: unnamed protein product [Mus musculus]
  misc_feature (8)..(307): NCBI GI NO: 28461332 NR Description: Similar to RIKEN cDNA 2810470K21 gene

SEQ ID NO: 27711 - protein, 182 aa, Zea mays subsp. mays; identical to SEQ ID NO: 23753
  peptide (1)..(182): Ceres Seq. ID no. 12340717
  misc_feature (1)..(182): NCBI GI NO: 34914658 NR Description: P0504D03.20
  misc_feature (1)..(182): NCBI GI NO: 18403828 NR Description: expressed protein; protein id: At3g23620
  misc_feature (1)..(182): NCBI GI NO: 21554561 NR Description: unknown [Arabidopsis thaliana]
  misc_feature (1)..(178): NCBI GI NO: 7670547 NR Description: unnamed protein product [Mus musculus]
  misc_feature (1)..(178): NCBI GI NO: 27705690 NR Description: similar to RIKEN cDNA 2810470K21 gene
  misc_feature (1)..(178): NCBI GI NO: 18203123 NR Description: Brix domain containing protein 1
  misc_feature (1)..(178): NCBI GI NO: 39930469 NR Description: brix domain containing 1 [Homo sapiens]
  misc_feature (1)..(178): NCBI GI NO: 31982662 NR Description: RIKEN cDNA 2810470K21 [Mus musculus]
  misc_feature (1)..(178): NCBI GI NO: 12850727 NR Description: unnamed protein product [Mus musculus]
  misc_feature (1)..(180): NCBI GI NO: 28461332 NR Description: Similar to RIKEN cDNA 2810470K21 gene

SEQ ID NO: 27712 - DNA, 1070 bp, Zea mays subsp. mays
  misc_feature (1)..(1070): Ceres Seq. ID no. 12356321
agattttgacaacgccttcccaacttgctcgctcccgcaacgacagcgcgcacttggattcggcgaccaccggagcgcggaggaggcacaggcgccgatctagagacgatggccgccgcgggctcctcgccgtccttctcctcctcgagtaagcggctggaagggaaggtggccctcgtcaccggtggcgccaccggcatcggcgaggccatcgttcgcctcttcatggagcacggcgccaaggtctgcatcgcggacatccaggatgaggccgggcagcagctgcgcgacgccctgggaggtgacgcgcagggcgccatgttcgtccactgcgacgtgacgtcggaggaggacgtgagccgcgccgtggacgctgcggcggagcggttcggcgcgctggacgtgatggtgaataacgccggcgtgacgggcaccaaggtgacggacatccgcaccgtggacttcgcggaggcgcgcagggtgctcgacgtcaacgtgcacggcgtgttcctggtgatgaagcacgcggcgcgcgctatgatcccgcggaagcggggctccatcgtgtcgctggccagcgtggccagcgccatcggcgggacgggcccgcacgtctacacggcgtccaagcacgccgtggtcgggctcaccaagagcgtcgccgcggagctcggccgtcatggggtgcgcgtcaactgcgtgtccccctatgccgtgcccacggcgctgtcgatgccgcacctgccccagggcgcgcgcgcagatgacgcgctcaaggacttcctggcctttgtcggcggcgaggccaacctcaagggcgtcgacgccatgcccgaggacgtcgcccaggcggtgctctacctggccagcgacgaggcgaggtacgtcagcgcggtcaacctcatggtggacggaggcttcacagccgtaaacaataacctcagggcgtttgaggattagttgaggcatttatgccagctctgggattgggagggagtattaccactatttcttctgctgttgtgacaagtgagtgcaagactaataaactgcagcatgttcatgtagcc

SEQ ID NO: 27713 - protein, 283 aa, Zea mays subsp. mays
  peptide (1)..(283): Ceres Seq. ID no. 12356322
  misc_feature (1)..(283): NCBI GI NO: 32129315 NR Description: putative short chain alcohol dehydrogenase
  misc_feature (1)..(281): NCBI GI NO: 15218213 NR Description: short chain alcohol dehydrogenase, putative
  misc_feature (15)..(224): NCBI GI NO: 1717794 NR Description: SEX DETERMINATION PROTEIN TASSELSEED 2
  misc_feature (218)..(276): NCBI GI NO: 1717794 NR Description: SEX DETERMINATION PROTEIN TASSELSEED 2
  misc_feature (15)..(276): NCBI GI NO: 1877480 NR Description: short-chain alcohol dehydrogenase
  misc_feature (4)..(282): NCBI GI NO: 13752458 NR Description: stem secoisolariciresinol dehydrogenase
  misc_feature (4)..(283): NCBI GI NO: 38346185 NR Description: OSJNBa0096F01.12
  misc_feature (3)..(283): NCBI GI NO: 38346186 NR Description: OSJNBa0096F01.13
  misc_feature (11)..(276): NCBI GI NO: 34898190 NR Description: putative short-chain alcohol dehydrogenase
  misc_feature (4)..(276): NCBI GI NO: 33146885 NR Description: putative short-chain alcohol dehydrogenase
MAAAGSSPSFSSSSKRLEGKVALVTGGATGIGEAIVRLFMEHGAKVCIADIQDEAGQQLRDALGGDAQGAMFVHCDVTSEEDVSRAVDAAAERFGALDVMVNNAGVTGTKVTDIRTVDFAEARRVLDVNVHGVFLVMKHAARAMIPRKRGSIVSLASVASAIGGTGPHVYTASKHAVVGLTKSVAAELGRHGVRVNCVSPYAVPTALSMPHLPQGARADDALKDFLAFVGGEANLKGVDAMPEDVAQAVLYLASDEARYVSAVNLMVDGGFTAVNNNLRAFED

SEQ ID NO: 27714 - protein, 244 aa, Zea mays subsp. mays
  peptide (1)..(244): Ceres Seq. ID no. 12356323
  misc_feature (1)..(244): NCBI GI NO: 32129315 NR Description: putative short chain alcohol dehydrogenase
  misc_feature (1)..(242): NCBI GI NO: 15218213 NR Description: short chain alcohol dehydrogenase, putative
  misc_feature (1)..(185): NCBI GI NO: 1717794 NR Description: SEX DETERMINATION PROTEIN TASSELSEED 2
  misc_feature (179)..(237): NCBI GI NO: 1717794 NR Description: SEX DETERMINATION PROTEIN TASSELSEED 2
  misc_feature (1)..(237): NCBI GI NO: 1877480 NR Description: short-chain alcohol dehydrogenase
  misc_feature (1)..(243): NCBI GI NO: 13752458 NR Description: stem secoisolariciresinol dehydrogenase
  misc_feature (1)..(244): NCBI GI NO: 38346185 NR Description: OSJNBa0096F01.12
  misc_feature (1)..(244): NCBI GI NO: 38346186 NR Description: OSJNBa0096F01.13
  misc_feature (1)..(237): NCBI GI NO: 34898190 NR Description: putative short-chain alcohol dehydrogenase
  misc_feature (1)..(237): NCBI GI NO: 33146885 NR Description: putative short-chain alcohol dehydrogenase
MEHGAKVCIADIQDEAGQQLRDALGGDAQGAMFVHCDVTSEEDVSRAVDAAAERFGALDVMVNNAGVTGTKVTDIRTVDFAEARRVLDVNVHGVFLVMKHAARAMIPRKRGSIVSLASVASAIGGTGPHVYTASKHAVVGLTKSVAAELGRHGVRVNCVSPYAVPTALSMPHLPQGARADDALKDFLAFVGGEANLKGVDAMPEDVAQAVLYLASDEARYVSAVNLMVDGGFTAVNNNLRAFED

SEQ ID NO: 27715 - protein, 213 aa, Zea mays subsp. mays
  peptide (1)..(213): Ceres Seq. ID no. 12356324
  misc_feature (1)..(213): NCBI GI NO: 32129315 NR Description: putative short chain alcohol dehydrogenase
  misc_feature (1)..(211): NCBI GI NO: 15218213 NR Description: short chain alcohol dehydrogenase, putative
  misc_feature (1)..(154): NCBI GI NO: 1717794 NR Description: SEX DETERMINATION PROTEIN TASSELSEED 2
  misc_feature (148)..(206): NCBI GI NO: 1717794 NR Description: SEX DETERMINATION PROTEIN TASSELSEED 2
  misc_feature (1)..(206): NCBI GI NO: 1877480 NR Description: short-chain alcohol dehydrogenase
  misc_feature (1)..(212): NCBI GI NO: 13752458 NR Description: stem secoisolariciresinol dehydrogenase
  misc_feature (1)..(213): NCBI GI NO: 38346185 NR Description: OSJNBa0096F01.12
  misc_feature (1)..(213): NCBI GI NO: 38346186 NR Description: OSJNBa0096F01.13
  misc_feature (1)..(206): NCBI GI NO: 34898190 NR Description: putative short-chain alcohol dehydrogenase
  misc_feature (1)..(206): NCBI GI NO: 33146885 NR Description: putative short-chain alcohol dehydrogenase
MFVHCDVTSEEDVSRAVDAAAERFGALDVMVNNAGVTGTKVTDIRTVDFAEARRVLDVNVHGVFLVMKHAARAMIPRKRGSIVSLASVASAIGGTGPHVYTASKHAVVGLTKSVAAELGRHGVRVNCVSPYAVPTALSMPHLPQGARADDALKDFLAFVGGEANLKGVDAMPEDVAQAVLYLASDEARYVSAVNLMVDGGFTAVNNNLRAFED

SEQ ID NO: 27716 - DNA, 791 bp, Zea mays subsp. mays
  misc_feature (1)..(791): Ceres Seq. ID no. 12386614
  misc_feature (615)..(615): n is a, c, t, g, unknown, or other
cttctcacgccgcctgcccagagcctctgcatcatccaacaacagcgacaccacgggactcgcgccatcttcagccagcgcaaacacatggcgaggatactcgtcgaagcgcccgcaggctcgggctcgccggaggactccatcaactcggacatgatcctcatcctcgccggcctgctctgcgcgctggtctgcgtcctcggcctgggcctcgtcgcccggtgcgcgtgctcgtggcgctgggccaccgagtccggccgggcgcagccggacgccgccaaagccgcgaacaggggcgtcaagaaggaggttctgcgctcgctcccgaccgtcacgtacgtctccgacagcggcaaggcggcggcggccgcggagggaggggccgacgagtgcgccatctgcctcgccgagttcgagggaggccaggccgtgcgcgtgctgccgcagtgcggccacgcgttccacgccgcctgcgtcgacacgtggctgcgcgcgcactcctcctgcccgtcctgccgccgggtgctggccgtcgacctgccccccgccgagcggtgccgccgctgtggcgcgcgccccggtgccggcatcagcgcgctctggaaggcgcccacncgctgcagcgccgaggggccgacgttcttggcgtagtgccgtgcgcactcgatatacaggaattgaaccgacgcgcagtctcagtgatgaacttgtttttttttttagcctggtaggtttcaccttttttaggtgtgtgtagtgattagctcaacggtggagtgttctggacaagc

SEQ ID NO: 27717 - protein, 242 aa, Zea mays subsp. mays
  peptide (1)..(242): Ceres Seq. ID no. 12386615
  misc_feature (205)..(205): Xaa is any aa, unknown or other
SHAACPEPLHHPTTATPRDSRHLQPAQTHGEDTRRSARRLGLAGGLHQLGHDPHPRRPALRAGLRPRPGPRRPVRVLVALGHRVRPGAAGRRQSREQGRQEGGSALAPDRHVRLRQRQGGGGRGGRGRRVRHLPRRVRGRPGRARAAAVRPRVPRRLRRHVAARALLLPVLPPGAGRRPAPRRAVPPLWRAPRCRHQRALEGAHXLQRRGADVLGVVPCALDIQELNRRAVSVMNLFFFLAW

SEQ ID NO: 27718 - protein, 216 aa, Zea mays subsp. mays
  peptide (1)..(216): Ceres Seq. ID no. 12386616
  misc_feature (131)..(172): Pfam Name: RING finger Pfam Description: Zinc finger, C3HC4 type
  misc_feature (30)..(198): NCBI GI NO: 15223041 NR Description: putative RING zinc finger protein
  misc_feature (30)..(198): NCBI GI NO: 21555237 NR Description: putative RING zinc finger protein
  misc_feature (32)..(204): NCBI GI NO: 15218042 NR Description: similar to putative RING zinc finger protein
  misc_feature (92)..(191): NCBI GI NO: 37536508 NR Description: putative ring finger protein
  misc_feature (44)..(96): NCBI GI NO: 37536508 NR Description: putative ring finger protein
  misc_feature (31)..(199): NCBI GI NO: 7489432 NR Description: probable ring finger protein - barley
  misc_feature (34)..(190): NCBI GI NO: 15227839 NR Description: putative RING zinc finger protein
  misc_feature (44)..(190): NCBI GI NO: 15237013 NR Description: RING-H2 finger protein RHA3b; protein id:At4g35480
  misc_feature (40)..(199): NCBI GI NO: 34907826 NR Description: P0485B12.26
  misc_feature (47)..(176): NCBI GI NO: 17016985 NR Description: RING-H2 zinc finger protein [Cucumis melo]
  misc_feature (205)..(205): Xaa is any aa, unknown or other
LLTPPAQSLCIIQQQRHHGTRAIFSQRKHMARILVEAPAGSGSPEDSINSDMILILAGLLCALVCVLGLGLVARCACSWRWATESGRAQPDAAKAANRGVKKEVLRSLPTVTYVSDSGKAAAAAEGGADECAICLAEFEGGQAVRVLPQCGHAFHAACVDTWLRAHSSCPSCRRVLAVDLPPAERCRRCGARPGAGISALWKAPXRCSAEGPTFLA

SEQ ID NO: 27719 - protein, 187 aa, Zea mays subsp. mays
  peptide (1)..(187): Ceres Seq. ID no. 12386617
  misc_feature (102)..(143): Pfam Name: RING finger Pfam Description: Zinc finger, C3HC4 type
  misc_feature (1)..(169): NCBI GI NO: 15223041 NR Description: putative RING zinc finger protein
  misc_feature (1)..(169): NCBI GI NO: 21555237 NR Description: putative RING zinc finger protein
  misc_feature (3)..(175): NCBI GI NO: 15218042 NR Description: similar to putative RING zinc finger protein
  misc_feature (63)..(162): NCBI GI NO: 37536508 NR Description: putative ring finger protein
  misc_feature (15)..(67): NCBI GI NO: 37536508 NR Description: putative ring finger protein
  misc_feature (2)..(170): NCBI GI NO: 7489432 NR Description: probable ring finger protein - barley
  misc_feature (5)..(161): NCBI GI NO: 15227839 NR Description: putative RING zinc finger protein
  misc_feature (15)..(161): NCBI GI NO: 15237013 NR Description: RING-H2 finger protein RHA3b; protein id:At4g35480
  misc_feature (11)..(170): NCBI GI NO: 34907826 NR Description: P0485B12.26
  misc_feature (18)..(147): NCBI GI NO: 17016985 NR Description: RING-H2 zinc finger protein [Cucumis melo]
  misc_feature (176)..(176): Xaa is any aa, unknown or other
MARILVEAPAGSGSPEDSINSDMILILAGLLCALVCVLGLGLVARCACSWRWATESGRAQPDAAKAANRGVKKEVLRSLPTVTYVSDSGKAAAAAEGGADECAICLAEFEGGQAVRVLPQCGHAFHAACVDTWLRAHSSCPSCRRVLAVDLPPAERCRRCGARPGAGISALWKAPXRCSAEGPTFLA

SEQ ID NO: 27720 - DNA, 1042 bp, Zea mays subsp. mays
  misc_feature (1)..(1042): Ceres Seq. ID no. 13598836
agcatcaccattcttcatccctcgttgtcatctcacagcttgggctagagaccaaacaaaccaaagggaagcatggcagcaggcctgcaagtgtttggccagccggcgtctactgatgttgccagggttctgacgtgcctgtttgagaagaaattggagtttgagcttgtccgcattgatacatttaagacacatcacaggcttcctgagttcatcaggctgcgggatccgaatgggcaagtgaccttcaagcatggcgacaaaacccttgttgattcaagggacatatgccggtacgtttgcaaccagtttccaaattacggaaacaagagcctctatggatctggtgctctagaacgggcatcgatagaacagtggctccaggcagaagcccagaactttggccctcccagctctgcgcttgtgtttcagctggcgttcgttccgcacctcagtcacctgggcgttcgtcaggaccctgctgttattgctgaaaacgaggacaaactgaagcaggttcttgatgtttacgacgaaatactctccaagaacgagtacctggctggtgatgagttcaccctggccgacctgtctcaccttccgaactcgcactacatcgtaaacaccgagagaggaaggaagctcttcaccaacaagaagaatgtggcgaaatggtatgacaggctctcgaagcgcgagacatgggtgcaggtcgtcaagatgcagaaggaacatcctggtgcgttcaagtaatggcttgtcttggggagttgtgagtatggcttcatcgtccgtgttggtctggctcatcagtgttaaaagcccatcagtgtcgtcaaccagaataatgtgaagcccaactgtgatgtatggtcttttttttttttaaaagcgcatttgtaaactattggctatttcttgcacgtgccaattcatcgtcacatataaaataaactgtatctttggaccttgaaaaaaaaaaaaaaaaaaaaaaaaagaaaaaaaaaaaaaaaaaacggcacgagaagccggcacgagaagc

SEQ ID NO: 27721 - protein, 226 aa, Zea mays subsp. mays
  peptide (1)..(226): Ceres Seq. ID no. 15222432
  misc_feature (1)..(226): NCBI GI NO: 11385469 NR Description: glutathione S-transferase GST 9 [Zea mays]
  misc_feature (1)..(226): NCBI GI NO: 11385475 NR Description: glutathione S-transferase GST 12 [Zea mays]
  misc_feature (1)..(226): NCBI GI NO: 11385477 NR Description: glutathione S-transferase GST 13 [Zea mays]
  misc_feature (1)..(226): NCBI GI NO: 22758269 NR Description: Putative glutathione S-transferase
  misc_feature (131)..(226): NCBI GI NO: 22758268 NR Description: Putative glutathione S-transferase
  misc_feature (1)..(83): NCBI GI NO: 22758268 NR Description: Putative glutathione S-transferase
  misc_feature (5)..(155): NCBI GI NO: 11385479 NR Description: glutathione S-transferase GST 14 [Zea mays]
  misc_feature (145)..(224): NCBI GI NO: 11385479 NR Description: glutathione S-transferase GST 14 [Zea mays]
  misc_feature (1)..(218): NCBI GI NO: 11177845 NR Description: putative glutathione S-transferase OsGSTF3
  misc_feature (1)..(218): NCBI GI NO: 22758267 NR Description: Putative glutathione S-transferase
MAAGLQVFGQPASTDVARVLTCLFEKKLEFELVRIDTFKTHHRLPEFIRLRDPNGQVTFKHGDKTLVDSRDICRYVCNQFPNYGNKSLYGSGALERASIEQWLQAEAQNFGPPSSALVFQLAFVPHLSHLGVRQDPAVIAENEDKLKQVLDVYDEILSKNEYLAGDEFTLADLSHLPNSHYIVNTERGRKLFTNKKNVAKWYDRLSKRETWVQVVKMQKEHPGAFK

SEQ ID NO: 27722 - DNA, 929 bp, Zea mays subsp. mays
  misc_feature (1)..(929): Ceres Seq. ID no. 12342915
ctgttcttcttcgatttattagcccagcgttctccctctctcgtgggcgtggcgacgacttggaggccatcgctgccgccctacgccaggtgcccagatcatctgcggccccttcgccggcgacgatcaccatccatcagaaataggatcaagcgcttgaacttacagcgagatggaaaatgatagaaggcaacttggtcagatcgatccaagaagagcccgctttccttgctgcatagtatggactccaataccattcatcacttggttggtgccctttatcggtcacattggcatctgcagagaagacggtgtaattctggacttctctggtccacattttgtatcagttgacaattttgcattcggagctgttgcgcgctacattcaagtaaactgcgatgagtgctataagcttattgaacctgaaggagatgccacgtgggacggcgcgctgaagaaaggcacgcaggagttccaaaacagggaactacaacctgttcacctgcaactgccactcctttgtcgcaaacaatctgaacaggctgttttattccggccacgacgaatggaatgtggtcagcttggctgctgtgatgttcttacgaggccgctgggtgagcacggcatcggtggtgaagaccttattgccatttgcagttgtgctttccatcggtaccttccttggcggcacgaccttcctgaccggccttcttgctttcgccgctgcgatgactgtctggttccttgtgggcacctactgcatcaaaggtctcatagagttgtgattagagtatgttagactcgttgtagggggttcaagggtggcatatttttaagagttcaagcgtggcacatttttatttgtattgcattcctgtataatggattcttgatgttattcatgcacctatatgttccaaattccg

SEQ ID NO: 27723 - protein, 209 aa, Zea mays subsp. mays
  peptide (1)..(209): Ceres Seq. ID no. 12342916
  misc_feature (10)..(75): Pfam Name: DUF778 Pfam Description: Protein of unknown function
  misc_feature (1)..(105): NCBI GI NO: 34897172 NR Description: hypothetical protein
  misc_feature (10)..(75): NCBI GI NO: 21592754 NR Description: unknown [Arabidopsis thaliana]
  misc_feature (10)..(75): NCBI GI NO: 15230386 NR Description: putative protein; protein id: At3g51040
  misc_feature (2)..(105): NCBI GI NO: 7452462 NR Description: hypothetical protein At2g26070
  misc_feature (2)..(105): NCBI GI NO: 30682996 NR Description: expressed protein [Arabidopsis thaliana]
  misc_feature (8)..(105): NCBI GI NO: 34910502 NR Description: P0456F08.26
  misc_feature (27)..(105): NCBI GI NO: 26449550 NR Description: unknown protein [Arabidopsis thaliana]
  misc_feature (7)..(105): NCBI GI NO: 19920918 NR Description: CG8372-PA [Drosophila melanogaster]
  misc_feature (7)..(105): NCBI GI NO: 24582738 NR Description: CG8372-PB [Drosophila melanogaster]
  misc_feature (11)..(105): NCBI GI NO: 14149779 NR Description: hypothetical protein DKFZp564D0478 [Homo sapiens]
MENDRRQLGQIDPRRARFPCCIVWTPIPFITWLVPFIGHIGICREDGVILDFSGPHFVSVDNFAFGAVARYIQVNCDECYKLIEPEGDATWDGALKKGTQEFQNRELQPVHLQLPLLCRKQSEQAVLFRPRRMECGQLGCCDVLTRPLGEHGIGGEDLIAICSCAFHRYLPWRHDLPDRPSCFRRCDDCLVPCGHLLHQRSHRVVIRVC

SEQ ID NO: 27724 - DNA, 876 bp, Zea mays subsp. mays
  misc_feature (1)..(876): Ceres Seq. ID no. 12390099
gcacgagaccattacctagaacatcctaatcgaaaaccactcgcgcgtccgttccgcctccactgaacatctccttttaacacccggctccggcgactcgccccttcctccactggtgcatccaccattccacctaccccacccccacaacccgctcgcgcggctgtccaatggcgggaggcggggcgccgtcagcgtggggcccgagcccggcgctggtgaccgcactggtggcgctgcttgggctcggcctcgccgcctacatcgtcggcccgcagctctactggcacgccgcggaggtgctcacggcggcggccgcgtgccccgcctgcgactgcaactgcgacgcgcgcccgctcctcgaccttccggaagattgtgctaaacacttcaaaggggtcaagagtcgcgcatctggtgaagagacagaaaagagtttcacagagctgcttgtagaagaactaaaacagagagaagaggaggcaacacaagctcagcaagaggccgatgttaagttgctcgaggccaaaaagttagcttcacagtatcagaaggaagctgacaaatgcagctcaggcatggatacctgtgaagaaactagggagaactcagcggaagcattggtccaacaaaagaaactgacttctttgtgggagcgaagggctcgggaactaggatggagacccgagaatgccaaggcacgtctaaagtagtaaaaccagtggatggtgttggatactatgtgtagcaatagatctcattgtaaaaccagtggatggtgttggatactacgagctcgagatgatgaggaaacaaatgagttcctggttggactcgactctctttacacgccatggggccttattgttcatagtt

SEQ ID NO: 27725 - protein, 180 aa, Zea mays subsp. mays
  peptide (1)..(180): Ceres Seq. ID no. 12390100
  misc_feature (10)..(176): Pfam Name: DUF1068 Pfam Description: Protein of unknown function
  misc_feature (1)..(176): NCBI GI NO: 34897026 NR Description: unknown protein
  misc_feature (21)..(180): NCBI GI NO: 25364108 NR Description: hypothetical protein
  misc_feature (21)..(180): NCBI GI NO: 7487433 NR Description: hypothetical protein At2g32580
  misc_feature (21)..(180): NCBI GI NO: 18390477 NR Description: expressed protein; protein id: At1g05070
  misc_feature (21)..(180): NCBI GI NO: 18403016 NR Description: expressed protein; protein id: At2g32580
  misc_feature (21)..(180): NCBI GI NO: 21553781 NR Description: unknown [Arabidopsis thaliana]
  misc_feature (16)..(171): NCBI GI NO: 27922919 NR Description: unknown protein [Phytophthora sojae]
  misc_feature (68)..(171): NCBI GI NO: 15233480 NR Description: hypothetical protein; protein id: At4g04360.1
  misc_feature (29)..(173): NCBI GI NO: 18417716 NR Description: Expressed protein; protein id: At4g30996
  misc_feature (29)..(173): NCBI GI NO: 18400504 NR Description: expressed protein; protein id: At2g24290
MAGGGAPSAWGPSPALVTALVALLGLGLAAYIVGPQLYWHAAEVLTAAAACPACDCNCDARPLLDLPEDCAKHFKGVKSRASGEETEKSFTELLVEELKQREEEATQAQQEADVKLLEAKKLASQYQKEADKCSSGMDTCEETRENSAEALVQQKKLTSLWERRARELGWRPENAKARLK

SEQ ID NO: 27726 - DNA, 1183 bp, Zea mays subsp. mays
  misc_feature (1)..(1183): Ceres Seq. ID no. 12341715
aataatttggctaaggcttgtgctgcctatcgtgactttgtatcacaaaatgctataagagttaaaacttcttgttttttcttaaaaagttttggactagggtagtggggttttaaattttgctgagatacttctacctgcctgtaaggactagggtagtggggttttaaattttgcccacaaatgtaaacttttggcctaatccacctgaatagacaggatttaacactattatttgcagcactgataaccttattttgcagtgtttacttgcacaatgtgcgcttttttcctccttgcccatgttatcctaaaaattgaggaagttcttacatttgtcgacggacagagtactagatcttatattatcaacatccactaccttaacgagctggcatctgctggttacattctgctcccttcatgtagcattatggatgaagttctttgagcataagccttttgattcaagaactgtcatgggatttggagtacttaacggaatctccattgggctcctcaacttgagtcttggcttcaactctgttgggttttaccagatgactaagctggcaatcatcccgtgcactgtcattttagagacacttttcttcaggaagaagttcagtcggagtatccagatgtccctttctgtgcttcttcttggtgttggtgttgcaactgtcactgatctgcaactcaatgctgtgggatccatactgtccttgctggcaattatcacgacttgcattgctcaaattatgacaaacactatccagaagaagttcaaggtctcatcaacccaactgctttaccagtcttgcccttaccaatcactgaccctgtttctcattggccccttccttgatggctttttgactaaccaaaatgtctttgcttttaattatacatctcaagttgtgtttttcatcgtcctgtcatgcttgatatctgtttcagtgaacttcagcactttccttgtgatcggaaagacatctcctgttacttaccaagtcctgggccatcttaaaacatgccttgttcttgcttttggttatgttttgcttcacgatccgtttagctggagaaacatacttggaatcctaattgctgtagttggaatggtcttgtattcatacttctgcacagtggagacccagcaaaaaaatgttgaagtctcccc

SEQ ID NO: 27727 - protein, 248 aa, Zea mays subsp. mays
  peptide (1)..(248): Ceres Seq. ID no. 12341716
  misc_feature (1)..(247): NCBI GI NO: 13699188 NR Description: putative glucose-6-phosphate/phosphate-tranlocat or
  misc_feature (1)..(247): NCBI GI NO: 34896140 NR Description: P0701D05.25
  misc_feature (1)..(247): NCBI GI NO: 22329373 NR Description: unknown protein; protein id: At1g06890
  misc_feature (1)..(247): NCBI GI NO: 27311731 NR Description: putative integral membrane protein
  misc_feature (1)..(243): NCBI GI NO: 30683853 NR Description: transporter-related [Arabidopsis thaliana]
  misc_feature (1)..(245): NCBI GI NO: 13384378 NR Description: putative phosphate translocator
  misc_feature (42)..(247): NCBI GI NO: 25406945 NR Description: hypothetical protein
  misc_feature (42)..(245): NCBI GI NO: 37535412 NR Description: putative glucose-6-phosphate/phosphate-translocator
  misc_feature (1)..(20): NCBI GI NO: 37535412 NR Description: putative glucose-6-phosphate/phosphate-translocator
  misc_feature (1)..(241): NCBI GI NO: 15238957 NR Description: putative protein; protein id: At5g42420.1
MKFFEHKPFDSRTVMGFGVLNGISIGLLNLSLGFNSVGFYQMTKLAIIPCTVILETLFFRKKFSRSIQMSLSVLLLGVGVATVTDLQLNAVGSILSLLAIITTCIAQIMTNTIQKKFKVSSTQLLYQSCPYQSLTLFLIGPFLDGFLTNQNVFAFNYTSQVVFFIVLSCLISVSVNFSTFLVIGKTSPVTYQVLGHLKTCLVLAFGYVLLHDPFSWRNILGILIAVVGMVLYSYFCTVETQQKNVEVS

SEQ ID NO: 27728 - protein, 234 aa, Zea mays subsp. mays
  peptide (1)..(234): Ceres Seq. ID no. 12341717
  misc_feature (1)..(233): NCBI GI NO: 13699188 NR Description: putative glucose-6-phosphate/phosphate-tranlocat or
  misc_feature (1)..(233): NCBI GI NO: 34896140 NR Description: P0701D05.25
  misc_feature (1)..(233): NCBI GI NO: 22329373 NR Description: unknown protein; protein id: At1g06890
  misc_feature (1)..(233): NCBI GI NO: 27311731 NR Description: putative integral membrane protein
  misc_feature (1)..(229): NCBI GI NO: 30683853 NR Description: transporter-related [Arabidopsis thaliana]
  misc_feature (1)..(231): NCBI GI NO: 13384378 NR Description: putative phosphate translocator
  misc_feature (28)..(233): NCBI GI NO: 25406945 NR Description: hypothetical protein
  misc_feature (28)..(231): NCBI GI NO: 37535412 NR Description: putative glucose-6-phosphate/phosphate-translocator
  misc_feature (1)..(227): NCBI GI NO: 15238957 NR Description: putative protein; protein id: At5g42420.1
  misc_feature (1)..(230): NCBI GI NO: 18394949 NR Description: expressed protein; protein id: At1g21070
MGFGVLNGISIGLLNLSLGFNSVGFYQMTKLAIIPCTVILETLFFRKKFSRSIQMSLSVLLLGVGVATVTDLQLNAVGSILSLLAIITTCIAQIMTNTIQKKFKVSSTQLLYQSCPYQSLTLFLIGPFLDGFLTNQNVFAFNYTSQVVFFIVLSCLISVSVNFSTFLVIGKTSPVTYQVLGHLKTCLVLAFGYVLLHDPFSWRNILGILIAVVGMVLYSYFCTVETQQKNVEVS

SEQ ID NO: 27729 - protein, 207 aa, Zea mays subsp. mays
  peptide (1)..(207): Ceres Seq. ID no. 12341718
  misc_feature (1)..(206): NCBI GI NO: 13699188 NR Description: putative glucose-6-phosphate/phosphate-tranlocat or
  misc_feature (1)..(206): NCBI GI NO: 34896140 NR Description: P0701D05.25
  misc_feature (1)..(206): NCBI GI NO: 22329373 NR Description: unknown protein; protein id: At1g06890
  misc_feature (1)..(206): NCBI GI NO: 27311731 NR Description: putative integral membrane protein
  misc_feature (1)..(202): NCBI GI NO: 30683853 NR Description: transporter-related [Arabidopsis thaliana]
  misc_feature (1)..(204): NCBI GI NO: 13384378 NR Description: putative phosphate translocator
  misc_feature (1)..(206): NCBI GI NO: 25406945 NR Description: hypothetical protein
  misc_feature (1)..(204): NCBI GI NO: 37535412 NR Description: putative glucose-6-phosphate/phosphate-translocator
  misc_feature (1)..(200): NCBI GI NO: 15238957 NR Description: putative protein; protein id: At5g42420.1
  misc_feature (1)..(203): NCBI GI NO: 18394949 NR Description: expressed protein; protein id: At1g21070
MTKLAIIPCTVILETLFFRKKFSRSIQMSLSVLLLGVGVATVTDLQLNAVGSILSLLAIITTCIAQIMTNTIQKKFKVSSTQLLYQSCPYQSLTLFLIGPFLDGFLTNQNVFAFNYTSQVVFFIVLSCLISVSVNFSTFLVIGKTSPVTYQVLGHLKTCLVLAFGYVLLHDPFSWRNILGILIAVVGMVLYSYFCTVETQQKNVEVS

SEQ ID NO: 27730 - DNA, 791 bp, Zea mays subsp. mays
  misc_feature (1)..(791): Ceres Seq. ID no. 12401397
ccaataggtggtcactctactacccgaagccgcgggctcaaccctaactgacccagagcgatcggagctgacgacgatggccgggaaggcggcggccgcgacggcggcgaggtgggcggaggggtacccgtggaaggagaagctggcaaagtacaagggtgagctcgggaagggggtgtggggatactgggagctcggcgcgtggaagccgctcggcatcagcgctcgcaagcgcgcccgcctccgcaaggaggtgctcctcgccggcgaggactggagctacgatcctccccgcggggagatgcgtaccaagcgcaagggccacaagtgcgaccgcatctccgccgagaagcgagcaaatactgttgagctgatgaagaagatgccccagatgctgctcgactacaagaaacgtaggtgggagaagaagatgaaagtggaggagagcggcaagaattgataccacgcggctcgtccagggtgcttctcttcctaaataaggtccaaactttatccaggaggtttgcaggacggctagattctgacgcatcatttccttggtggattccgtctctcctgtgatgcgactttggacgcactatcctgattgtgatgctttccaacactttgccactggatcgtgatttcagtgagccccaacttctgcagcactagtattttgttgagacaaatcagctataagcatgccatctgcccaataaacttgttcatcatgtaagatcaatgctgttagtttttgtccgagtttgtgcttgcgtttgcttatactc

SEQ ID NO: 27731 - protein, 127 aa, Zea mays subsp. mays
  peptide (1)..(127): Ceres Seq. ID no. 12401398
  misc_feature (1)..(126): NCBI GI NO: 18415817 NR Description: expressed protein; protein id: At4g22000
MAGKAAAATAARWAEGYPWKEKLAKYKGELGKGVWGYWELGAWKPLGISARKRARLRKEVLLAGEDWSYDPPRGEMRTKRKGHKCDRISAEKRANTVELMKKMPQMLLDYKKRRWEKKMKVEESGKN

SEQ ID NO: 27732 - DNA, 751 bp, Zea mays subsp. mays
  misc_feature (1)..(751): Ceres Seq. ID no. 12356325
ggcttcatctcctcctttcctccccaaaagacacaagagggggaagagagagagaggagaggcagagagaagagggggaggcagtccagtgtccacgtaggtacgctccacagaagagagatggcgatgcggatggcggcggcggcagtggcgctggtggcggtgatgggcgtgctggcgccccgagcggcggcgcagacgccgaactgcgcggagaagctgatcccgtgctcgccgtacatgaacacgacggggacgccgccggatacctgctgcggcccgctcaaggacgccgtccagaacgacctcaagtgcctctgcgacctctacgcctcgccggagatcttcaaggccttcaacatcagcctcgaccaggccctcggcctctccaagcgttgcggcctcagcgacaccaccgccgcctgcaagggcctttctcctacgcagtctcctccaggttcgccgccatcaggcggcagcagcaacgccgcccatcgcgctctgccggccagtttcgcgggactggtgacgagcttgttcctagctctgtggtctgtaatggcgtaaataaaagttccgcaatgcttgtcttaccccacagtagatggtttgcacatacgatacgatacaattcgacatttgttttgctgtgtattggtagagtgcggtgtgtctgagatcagaatttctcattggtttcttcgcggtgttcgtgttagactctgcacaattaaatggaaggtttctggcg

SEQ ID NO: 27733 - protein, 224 aa, Zea mays subsp. mays
  peptide (1)..(224): Ceres Seq. ID no. 12356326
LHLLLSSPKDTRGGREREERQREEGEAVQCPRRYAPQKRDGDADGGGGSGAGGGDGRAGAPSGGADAELRGEADPVLAVHEHDGDAAGYLLRPAQGRRPERPQVPLRPLRLAGDLQGLQHQPRPGPRPLQALRPQRHHRRLQGPFSYAVSSRFAAIRRQQQRRPSRSAGQFRGTGDELVPSSVVCNGVNKSSAMLVLPHSRWFAHTIRYNSTFVLLCIGRVRCV

SEQ ID NO: 27734 - protein, 188 aa, Zea mays subsp. mays
  peptide (1)..(188): Ceres Seq. ID no. 12356327
  misc_feature (70)..(142): Pfam Name: Pfam Description:  Protease inhibitor/seed storage/LTP family
  misc_feature (43)..(185): NCBI GI NO: 15221585 NR Description: unknown protein; protein id: At1g62790.1
  misc_feature (43)..(185): NCBI GI NO: 30696757 NR Description: protease inhibitor/seed storage/lipid transfer
  misc_feature (43)..(144): NCBI GI NO: 6630451 NR Description: F23N19.16 [Arabidopsis thaliana]
  misc_feature (44)..(183): NCBI GI NO: 18410388 NR Description: lipid transfer protein, putative
  misc_feature (41)..(183): NCBI GI NO: 21593596 NR Description: lipid transfer protein, putative
  misc_feature (52)..(144): NCBI GI NO: 15223104 NR Description: lipid transfer protein, putative
  misc_feature (44)..(146): NCBI GI NO: 25406276 NR Description: probable lipid transfer protein F6D5.5
  misc_feature (70)..(164): NCBI GI NO: 15221052 NR Description: lipid transfer protein, putative
  misc_feature (66)..(169): NCBI GI NO: 15219496 NR Description: hypothetical protein; protein id: At1g73550.1
  misc_feature (66)..(160): NCBI GI NO: 25406275 NR Description: hypothetical protein F6D5.6
GFISSFPPQKTQEGEERERRGREKRGRQSSVHVGTLHRREMAMRMAAAAVALVAVMGVLAPRAAAQTPNCAEKLIPCSPYMNTTGTPPDTCCGPLKDAVQNDLKCLCDLYASPEIFKAFNISLDQALGLSKRCGLSDTTAACKGLSPTQSPPGSPPSGGSSNAAHRALPASFAGLVTSLFLALWSVMA

SEQ ID NO: 27735 - protein, 148 aa, Zea mays subsp. mays
  peptide (1)..(148): Ceres Seq. ID no. 12356328
  misc_feature (30)..(102): Pfam Name: Pfam Description:  Protease inhibitor/seed storage/LTP family
  misc_feature (3)..(145): NCBI GI NO: 15221585 NR Description: unknown protein; protein id: At1g62790.1
  misc_feature (3)..(145): NCBI GI NO: 30696757 NR Description: protease inhibitor/seed storage/lipid transfer
  misc_feature (3)..(104): NCBI GI NO: 6630451 NR Description: F23N19.16 [Arabidopsis thaliana]
  misc_feature (4)..(143): NCBI GI NO: 18410388 NR Description: lipid transfer protein, putative
  misc_feature (1)..(143): NCBI GI NO: 21593596 NR Description: lipid transfer protein, putative
  misc_feature (12)..(104): NCBI GI NO: 15223104 NR Description: lipid transfer protein, putative
  misc_feature (4)..(106): NCBI GI NO: 25406276 NR Description: probable lipid transfer protein F6D5.5
  misc_feature (30)..(124): NCBI GI NO: 15221052 NR Description: lipid transfer protein, putative
  misc_feature (26)..(129): NCBI GI NO: 15219496 NR Description: hypothetical protein; protein id: At1g73550.1
  misc_feature (26)..(120): NCBI GI NO: 25406275 NR Description: hypothetical protein F6D5.6
MAMRMAAAAVALVAVMGVLAPRAAAQTPNCAEKLIPCSPYMNTTGTPPDTCCGPLKDAVQNDLKCLCDLYASPEIFKAFNISLDQALGLSKRCGLSDTTAACKGLSPTQSPPGSPPSGGSSNAAHRALPASFAGLVTSLFLALWSVMA

SEQ ID NO: 27736 - DNA, 924 bp, Zea mays subsp. mays
  misc_feature (1)..(924): Ceres Seq. ID no. 12342917
aaggacgacccaagcaagctagctcgatctactactactactatctggtacacatactagccatcctgccagccagccagcttgccatggcgcccaccgtgatgatggcctcgtcggcaaccgccgtcgccccgttccagggtctcaagtccgccgccagcctccccgtcgcccgccgcagcaccaggagcctcggcaacgtcagcaacggcggaaggatccggtgcatgcaggtgtggccggcctacggcaacaagaagttcgagacgctgtcgtacctgccgccgctgtcgacggacgacctgctgaagcaggtggactacctgctgcgcaacggctggataccctgcctcgagttcagcaagctcgggttcgtgtaccgcgagaactccacctccccgtgctactacgatggccgctactggaccatgtggaagctgcccatgttcggctgcaccgacgccacgcaggtgtacaaggagctgcaggaggccatcgccgcgtacccggacgccttccaccgcgtcatcggcttcgacaacgtcaggcagacgcagtgcgtcagcttcatcgcctacaagccccccggcagcgagtagagaccgtggctagatcgaccaatggccatgtctctgcctgttgatcggatcaccttcttgcattggttcctctctctctccctccttttttttccctttatctcatcatttcttttctcctgcatgcaatggttccttttgcttccaacaattctcctgctgatgtatccagcatggcatcatccatctacaattacgtacgtagtgcaacgactgtcgattcgttgggtgaggaacatatatgtgaatgcaagctccggctaccatacatgtgtaatgtgtaatagatatatatacaaaactgccgaggcgccgacaatacttt

SEQ ID NO: 27737 - protein, 198 aa, Zea mays subsp. mays
  peptide (1)..(198): Ceres Seq. ID no. 12342918
  misc_feature (76)..(194): Pfam Name: Pfam Description:  Ribulose bisphosphate carboxylase, small chain
  misc_feature (29)..(198): NCBI GI NO: 1673456 NR Description: rubisco small subunit [Zea mays]
  misc_feature (29)..(198): NCBI GI NO: 132147 NR Description: Ribulose bisphosphate carboxylase small chain
  misc_feature (29)..(198): NCBI GI NO: 22465 NR Description: ribulose 1,5-bisphosphate carboxylase/oxygenase
  misc_feature (29)..(198): NCBI GI NO: 3914607 NR Description: Ribulose bisphosphate carboxylase small chain
  misc_feature (29)..(198): NCBI GI NO: 38374128 NR Description: ribulose-1
  misc_feature (29)..(198): NCBI GI NO: 132105 NR Description: Ribulose bisphosphate carboxylase small chain C
  misc_feature (35)..(198): NCBI GI NO: 347451 NR Description: ribulose 1,5-bisphosphate carboxylase
  misc_feature (29)..(198): NCBI GI NO: 132096 NR Description: Ribulose bisphosphate carboxylase small chain A
  misc_feature (29)..(198): NCBI GI NO: 3063524 NR Description: ribulose 1
  misc_feature (34)..(198): NCBI GI NO: 4038689 NR Description: ribulose-1
GRPKQASSIYYYYYLVHILAILPASQLAMAPTVMMASSATAVAPFQGLKSAASLPVARRSTRSLGNVSNGGRIRCMQVWPAYGNKKFETLSYLPPLSTDDLLKQVDYLLRNGWIPCLEFSKLGFVYRENSTSPCYYDGRYWTMWKLPMFGCTDATQVYKELQEAIAAYPDAFHRVIGFDNVRQTQCVSFIAYKPPGSE

SEQ ID NO: 27738 - protein, 170 aa, Zea mays subsp. mays
  peptide (1)..(170): Ceres Seq. ID no. 12342919
  misc_feature (48)..(166): Pfam Name: Pfam Description:  Ribulose bisphosphate carboxylase, small chain
  misc_feature (1)..(170): NCBI GI NO: 1673456 NR Description: rubisco small subunit [Zea mays]
  misc_feature (1)..(170): NCBI GI NO: 132147 NR Description: Ribulose bisphosphate carboxylase small chain
  misc_feature (1)..(170): NCBI GI NO: 22465 NR Description: ribulose 1,5-bisphosphate carboxylase/oxygenase
  misc_feature (1)..(170): NCBI GI NO: 3914607 NR Description: Ribulose bisphosphate carboxylase small chain
  misc_feature (1)..(170): NCBI GI NO: 38374128 NR Description: ribulose-1
  misc_feature (1)..(170): NCBI GI NO: 132105 NR Description: Ribulose bisphosphate carboxylase small chain C
  misc_feature (7)..(170): NCBI GI NO: 347451 NR Description: ribulose 1,5-bisphosphate carboxylase
  misc_feature (1)..(170): NCBI GI NO: 132096 NR Description: Ribulose bisphosphate carboxylase small chain A
  misc_feature (1)..(170): NCBI GI NO: 3063524 NR Description: ribulose 1
  misc_feature (6)..(170): NCBI GI NO: 4038689 NR Description: ribulose-1
MAPTVMMASSATAVAPFQGLKSAASLPVARRSTRSLGNVSNGGRIRCMQVWPAYGNKKFETLSYLPPLSTDDLLKQVDYLLRNGWIPCLEFSKLGFVYRENSTSPCYYDGRYWTMWKLPMFGCTDATQVYKELQEAIAAYPDAFHRVIGFDNVRQTQCVSFIAYKPPGSE

SEQ ID NO: 27739 - protein, 165 aa, Zea mays subsp. mays
  peptide (1)..(165): Ceres Seq. ID no. 12342920
  misc_feature (43)..(161): Pfam Name: Pfam Description:  Ribulose bisphosphate carboxylase, small chain
  misc_feature (1)..(165): NCBI GI NO: 1673456 NR Description: rubisco small subunit [Zea mays]
  misc_feature (1)..(165): NCBI GI NO: 132147 NR Description: Ribulose bisphosphate carboxylase small chain
  misc_feature (1)..(165): NCBI GI NO: 22465 NR Description: ribulose 1,5-bisphosphate carboxylase/oxygenase
  misc_feature (1)..(165): NCBI GI NO: 3914607 NR Description: Ribulose bisphosphate carboxylase small chain
  misc_feature (1)..(165): NCBI GI NO: 38374128 NR Description: ribulose-1
  misc_feature (1)..(165): NCBI GI NO: 132105 NR Description: Ribulose bisphosphate carboxylase small chain C
  misc_feature (2)..(165): NCBI GI NO: 347451 NR Description: ribulose 1,5-bisphosphate carboxylase
  misc_feature (1)..(165): NCBI GI NO: 132096 NR Description: Ribulose bisphosphate carboxylase small chain A
  misc_feature (1)..(165): NCBI GI NO: 3063524 NR Description: ribulose 1
  misc_feature (1)..(165): NCBI GI NO: 4038689 NR Description: ribulose-1
MMASSATAVAPFQGLKSAASLPVARRSTRSLGNVSNGGRIRCMQVWPAYGNKKFETLSYLPPLSTDDLLKQVDYLLRNGWIPCLEFSKLGFVYRENSTSPCYYDGRYWTMWKLPMFGCTDATQVYKELQEAIAAYPDAFHRVIGFDNVRQTQCVSFIAYKPPGSE

SEQ ID NO: 27740 - DNA, 1042 bp, Zea mays subsp. mays
  misc_feature (1)..(1042): Ceres Seq. ID no. 12372360
gggaaggctttgctggtagttgtagcacacacggcacaccacacggtttcgtcctcgtccaccatgctatcgtcctcgcacctcgttaagctgcccctcctgccgcgcggcctcctctcgcacctccccgcatccatcctcccgagcgggcgcgagagcaccgcggacgcagcaccctccacgccgccttcttccaagaagatgtcgtcgtccgcgcagcagcagcagcagcagcaagcgggcagcagcaaggcggagtcggcggagctggcgcgcgtgttcgagctgttcgacaaggacggcgacgggcgcatcacgcgggaggagctggcggagtcgctgcgcaagctggggcatgggcgtgccgggcgacgacgagctggcgtccatgatggcgcgcgtggacgccaacggcgacgggtgcgtggacgcggaggagttcggggagctctaccgcggcatcatggacggcgccgcggaggaggaggaggaggaggaggacgacgacgacgacatgcgggaggcgttccgcgtgttcgacgccaacggcgacgggtacatcaccgcggacgagctgggcgcggtgctgtcgtcgctggggctgcggcagggccgcaccgcggaggagtgccggcgcatgatcggccgcgtggaccgcgacggcgacggcagggtcgacttccgcgagttccgccagatgatgcgcgccggcgggctcgccacgctcgggtgatgggtgaccgtcgccggccggtgctgcctgcctcctgctcctgcacctgggcctggccatggagcgccgggcacctttttttctgcatctgcgtgcttgatttcgtgtgctagaaagaacctgtagatagatattgcttgcttggagcgaggggggagctcacgtcacgtaaccgcgttgttccgtcttcgttctgttgatttggttctttagaattgatgggcttgctaattaactgttgtatacttgtatgtactggttgttgccctgcccttaaggattgttcggggacaaggtttcccctgtttt

SEQ ID NO: 27741 - protein, 281 aa, Zea mays subsp. mays
  peptide (1)..(281): Ceres Seq. ID no. 12372361
  misc_feature (31)..(118): NCBI GI NO: 28301674 NR Description: calcium-binding protein [Lotus japonicus]
  misc_feature (86)..(118): NCBI GI NO: 15236276 NR Description: putative calmodulin; protein id: At4g03290.1
  misc_feature (86)..(118): NCBI GI NO: 15231470 NR Description: putative calmodulin; protein id: At3g07490.1
  misc_feature (86)..(118): NCBI GI NO: 15235516 NR Description: putative calmodulin; protein id: At4g12860.1
  misc_feature (83)..(118): NCBI GI NO: 15231685 NR Description: calmodulin-like protein; protein id: At3g59440.1
  misc_feature (65)..(119): NCBI GI NO: 19386815 NR Description: B1147A04.10
  misc_feature (83)..(118): NCBI GI NO: 38048675 NR Description: similar to Drosophila melanogaster Cam
  misc_feature (88)..(118): NCBI GI NO: 34903134 NR Description: unnamed protein product
  misc_feature (88)..(118): NCBI GI NO: 34903330 NR Description: unnamed protein product
  misc_feature (83)..(118): NCBI GI NO: 34909152 NR Description: putative calmodulin
GKALLVVVAHTAHHTVSSSSTMLSSSHLVKLPLLPRGLLSHLPASILPSGRESTADAAPSTPPSSKKMSSSAQQQQQQQAGSSKAESAELARVFELFDKDGDGRITREELAESLRKLGHGRAGRRRAGVHDGARGRQRRRVRGRGGVRGALPRHHGRRRGGGGGGGGRRRRHAGGVPRVRRQRRRVHHRGRAGRGAVVAGAAAGPHRGGVPAHDRPRGPRRRRQGRLPRVPPDDARRRARHARVMGDRRRPVLPASCSCTWAWPWSAGHLFFCICVLDFVC

SEQ ID NO: 27742 - protein, 260 aa, Zea mays subsp. mays
  peptide (1)..(260): Ceres Seq. ID no. 12372362
  misc_feature (10)..(97): NCBI GI NO: 28301674 NR Description: calcium-binding protein [Lotus japonicus]
  misc_feature (65)..(97): NCBI GI NO: 15236276 NR Description: putative calmodulin; protein id: At4g03290.1
  misc_feature (65)..(97): NCBI GI NO: 15231470 NR Description: putative calmodulin; protein id: At3g07490.1
  misc_feature (65)..(97): NCBI GI NO: 15235516 NR Description: putative calmodulin; protein id: At4g12860.1
  misc_feature (62)..(97): NCBI GI NO: 15231685 NR Description: calmodulin-like protein; protein id: At3g59440.1
  misc_feature (44)..(98): NCBI GI NO: 19386815 NR Description: B1147A04.10
  misc_feature (62)..(97): NCBI GI NO: 38048675 NR Description: similar to Drosophila melanogaster Cam
  misc_feature (67)..(97): NCBI GI NO: 34903134 NR Description: unnamed protein product
  misc_feature (67)..(97): NCBI GI NO: 34903330 NR Description: unnamed protein product
  misc_feature (62)..(97): NCBI GI NO: 34909152 NR Description: putative calmodulin
MLSSSHLVKLPLLPRGLLSHLPASILPSGRESTADAAPSTPPSSKKMSSSAQQQQQQQAGSSKAESAELARVFELFDKDGDGRITREELAESLRKLGHGRAGRRRAGVHDGARGRQRRRVRGRGGVRGALPRHHGRRRGGGGGGGGRRRRHAGGVPRVRRQRRRVHHRGRAGRGAVVAGAAAGPHRGGVPAHDRPRGPRRRRQGRLPRVPPDDARRRARHARVMGDRRRPVLPASCSCTWAWPWSAGHLFFCICVLDFVC

SEQ ID NO: 27743 - protein, 214 aa, Zea mays subsp. mays
  peptide (1)..(214): Ceres Seq. ID no. 12372363
  misc_feature (1)..(51): NCBI GI NO: 28301674 NR Description: calcium-binding protein [Lotus japonicus]
  misc_feature (19)..(51): NCBI GI NO: 15236276 NR Description: putative calmodulin; protein id: At4g03290.1
  misc_feature (19)..(51): NCBI GI NO: 15231470 NR Description: putative calmodulin; protein id: At3g07490.1
  misc_feature (19)..(51): NCBI GI NO: 15235516 NR Description: putative calmodulin; protein id: At4g12860.1
  misc_feature (16)..(51): NCBI GI NO: 15231685 NR Description: calmodulin-like protein; protein id: At3g59440.1
  misc_feature (1)..(52): NCBI GI NO: 19386815 NR Description: B1147A04.10
  misc_feature (16)..(51): NCBI GI NO: 38048675 NR Description: similar to Drosophila melanogaster Cam
  misc_feature (21)..(51): NCBI GI NO: 34903134 NR Description: unnamed protein product
  misc_feature (21)..(51): NCBI GI NO: 34903330 NR Description: unnamed protein product
  misc_feature (16)..(51): NCBI GI NO: 34909152 NR Description: putative calmodulin
MSSSAQQQQQQQAGSSKAESAELARVFELFDKDGDGRITREELAESLRKLGHGRAGRRRAGVHDGARGRQRRRVRGRGGVRGALPRHHGRRRGGGGGGGGRRRRHAGGVPRVRRQRRRVHHRGRAGRGAVVAGAAAGPHRGGVPAHDRPRGPRRRRQGRLPRVPPDDARRRARHARVMGDRRRPVLPASCSCTWAWPWSAGHLFFCICVLDFVC

SEQ ID NO: 27744 - DNA, 923 bp, Zea mays subsp. mays
  misc_feature (1)..(923): Ceres Seq. ID no. 12403512
ctttccctccccatcccgtgaggcgtgagcgccacacccacacgaaggatcccgaagccgaagagaaccctaccgaggaggcagaaaatccgtaggcgcgcctcatacgattccgagatccgtgcctcttatcggcagccatgatgctgcgcgcggcgggcaggcgactcctcggcgtaggaggcggcgatccagcgcccgcggtcgctgctgctgtggcggcgagcaggagcagaggataccacgagcgggtggtggaccactacaacaacccgcgcaacgtggggtccttggacaaggacgacacggacgtcggaacggggatcgtcggcgcgccggcgtgcggggacgtcatgaagctgcagatccgcgtcgacgaggggtccggcaggatcgtcgacgcgcgcttcaagaccttcggctgcggctccgccatcgcgtcctcctccgtcgcttccgaatgggtcaagggcaagcaagtggaggaagtggtggccatcaagaacaccgagattgcgaagcacctgtctcttccaccagtgaagctccactgcagcatgctcgctgaggacgcaatcaaggccgccgtgaaggattacgaggcaaagaaagggaagaagatggccaaggcagaggagcaggacaccccatgcccgtaagagcgacagctagtaaactgaagcgagcagagagtactgtatgtagtatgtaacggctaacgagcgaggtactcgtgtcgtgtgtgccaaaagaagcatgtatgtaatgtaaagctaggtaacaacgatgtttgggtttcatagaataagcgaacttgccgcagtgttttttttatctgctctgcacatgaataaggtctgcccattgctctttatctgtttagtcggagcatgtatgcttagtttgatcaagcaatgctgttg

SEQ ID NO: 27745 - protein, 172 aa, Zea mays subsp. mays
  peptide (1)..(172): Ceres Seq. ID no. 12403513
  misc_feature (34)..(159): Pfam Name: Pfam Description:  NifU-like N terminal domain
  misc_feature (2)..(167): NCBI GI NO: 34912076 NR Description: putative nifU-like protein
  misc_feature (1)..(169): NCBI GI NO: 15235569 NR Description: nifU-like protein; protein id: At4g22220
  misc_feature (2)..(169): NCBI GI NO: 21595581 NR Description: nifU-like protein [Arabidopsis thaliana]
  misc_feature (2)..(169): NCBI GI NO: 15233385 NR Description: putative NifU-like metallocluster assembly factor
  misc_feature (19)..(164): NCBI GI NO: 16798388 NR Description: iron-sulfur cluster assembly protein IscU
  misc_feature (19)..(167): NCBI GI NO: 11545707 NR Description: ISCU2 [Homo sapiens]
  misc_feature (19)..(167): NCBI GI NO: 20381021 NR Description: RIKEN cDNA 2310020H20 gene [Mus musculus]
  misc_feature (19)..(167): NCBI GI NO: 21313484 NR Description: RIKEN cDNA 2310020H20 [Mus musculus]
  misc_feature (19)..(167): NCBI GI NO: 27666566 NR Description: similar to RIKEN cDNA 2310020H20 gene
  misc_feature (1)..(157): NCBI GI NO: 19113879 NR Description: similarity to iron-sulpher cluster proteins
MMLRAAGRRLLGVGGGDPAPAVAAAVAASRSRGYHERVVDHYNNPRNVGSLDKDDTDVGTGIVGAPACGDVMKLQIRVDEGSGRIVDARFKTFGCGSAIASSSVASEWVKGKQVEEVVAIKNTEIAKHLSLPPVKLHCSMLAEDAIKAAVKDYEAKKGKKMAKAEEQDTPCP

SEQ ID NO: 27746 - protein, 171 aa, Zea mays subsp. mays
  peptide (1)..(171): Ceres Seq. ID no. 12403514
  misc_feature (33)..(158): Pfam Name: Pfam Description:  NifU-like N terminal domain
  misc_feature (1)..(166): NCBI GI NO: 34912076 NR Description: putative nifU-like protein
  misc_feature (1)..(168): NCBI GI NO: 15235569 NR Description: nifU-like protein; protein id: At4g22220
  misc_feature (1)..(168): NCBI GI NO: 21595581 NR Description: nifU-like protein [Arabidopsis thaliana]
  misc_feature (1)..(168): NCBI GI NO: 15233385 NR Description: putative NifU-like metallocluster assembly factor
  misc_feature (18)..(163): NCBI GI NO: 16798388 NR Description: iron-sulfur cluster assembly protein IscU
  misc_feature (18)..(166): NCBI GI NO: 11545707 NR Description: ISCU2 [Homo sapiens]
  misc_feature (18)..(166): NCBI GI NO: 20381021 NR Description: RIKEN cDNA 2310020H20 gene [Mus musculus]
  misc_feature (18)..(166): NCBI GI NO: 21313484 NR Description: RIKEN cDNA 2310020H20 [Mus musculus]
  misc_feature (18)..(166): NCBI GI NO: 27666566 NR Description: similar to RIKEN cDNA 2310020H20 gene
  misc_feature (1)..(156): NCBI GI NO: 19113879 NR Description: similarity to iron-sulpher cluster proteins
MLRAAGRRLLGVGGGDPAPAVAAAVAASRSRGYHERVVDHYNNPRNVGSLDKDDTDVGTGIVGAPACGDVMKLQIRVDEGSGRIVDARFKTFGCGSAIASSSVASEWVKGKQVEEVVAIKNTEIAKHLSLPPVKLHCSMLAEDAIKAAVKDYEAKKGKKMAKAEEQDTPCP

SEQ ID NO: 27747 - protein, 101 aa, Zea mays subsp. mays
  peptide (1)..(101): Ceres Seq. ID no. 12403515
  misc_feature (1)..(88): Pfam Name: Pfam Description:  NifU-like N terminal domain
  misc_feature (1)..(96): NCBI GI NO: 34912076 NR Description: putative nifU-like protein
  misc_feature (1)..(98): NCBI GI NO: 15235569 NR Description: nifU-like protein; protein id: At4g22220
  misc_feature (1)..(98): NCBI GI NO: 21595581 NR Description: nifU-like protein [Arabidopsis thaliana]
  misc_feature (1)..(98): NCBI GI NO: 15233385 NR Description: putative NifU-like metallocluster assembly factor
  misc_feature (1)..(93): NCBI GI NO: 16798388 NR Description: iron-sulfur cluster assembly protein IscU
  misc_feature (1)..(96): NCBI GI NO: 11545707 NR Description: ISCU2 [Homo sapiens]
  misc_feature (1)..(96): NCBI GI NO: 20381021 NR Description: RIKEN cDNA 2310020H20 gene [Mus musculus]
  misc_feature (1)..(96): NCBI GI NO: 21313484 NR Description: RIKEN cDNA 2310020H20 [Mus musculus]
  misc_feature (1)..(96): NCBI GI NO: 27666566 NR Description: similar to RIKEN cDNA 2310020H20 gene
  misc_feature (1)..(86): NCBI GI NO: 19113879 NR Description: similarity to iron-sulpher cluster proteins
MKLQIRVDEGSGRIVDARFKTFGCGSAIASSSVASEWVKGKQVEEVVAIKNTEIAKHLSLPPVKLHCSMLAEDAIKAAVKDYEAKKGKKMAKAEEQDTPCP

SEQ ID NO: 27748 - DNA, 1254 bp, Zea mays subsp. mays
  misc_feature (1)..(1254): Ceres Seq. ID no. 12356329
aatttacgacaccagctagttgttgttttcttcgaagcttcttacaggtggcgactggcgagtgccgacctcgaccgattcttcttcgaaatcctccactagaggatcgcagcttctcttttgagcgaacaataaagcaccagctgctctcacgcttccgcgtttagccaggccggccccggccacgagcccacgacaatgaagccgcccgcgtcgtccaccgccacctcctacctcctcctggccccgctcgcgatcctcctgctcgtcttcgtgctaccgtcgctccgcccttggtcccgcgtaggctccgactccgacggcctcggcatcctctgcgcccgccgcaccggcggcttcgtcgacgtcgccgctcgacgcgccggcgccgccaccgggccagacgacacgggcggcggagttcagcctactggtgggcgtgctgaccgtgccgggccggcgggagcggcgcgacatcgtgcgcacggcgtacgcgctgcagccggccgcggagggcgcgcgcgtggacgtgcgcttcgtgttctgccgcgtgacggaccccgtggacgcggcgctgctggcggtggaggcgaggcggcacggggacgtcctggtgctggacggctgcgccgagaacatgaacgacggcaagacgtacgcgtacctgtcgtcggtgccgcgcctcttcgcggcggagccgtacgactacgtgatgaaggccgacgacgacacgtacctgcgcgtggcggcgctggcgggcgagctgcggggcaagccccgccacgacgtgtacctgggctacggctacgccatgggcgggcagccgatgccgttcatgcacggcatggggtacgtggtgtcgtgggacgtggcggcctgggtggccggcgcgcgggagatcctggagcgcaacgacaccctgggccccgaggacctcatggtcggcaagtggctcaacctcgccggcaggggcaggaaccgctacgacctcaagccccggatgtacgacctcagctgggacatggacaacttcaggcccgacaccgtcgccgtgcacacgctcaagacgaaccgccggtgggcggcggcgttcaggtacttcaacgtcgtcactgcggggatcacgccgtcgtccgaactgtaccacctgccgtgatcgtctcatcgatcgaccaacactttttttttttgtaattgtctgcgacccttgccaattgtataacaattatctggcaatacatgaatggatcgtgg

SEQ ID NO: 27749 - protein, 331 aa, Zea mays subsp. mays
  peptide (1)..(331): Ceres Seq. ID no. 12356330
  misc_feature (38)..(168): Pfam Name: DUF390 Pfam Description: Protein of unknown function
  misc_feature (46)..(255): NCBI GI NO: 29830954 NR Description: putative GntR-family transcriptional regulator
  misc_feature (26)..(254): NCBI GI NO: 25989121 NR Description: putative PHA synthase [Streptomyces aureofaciens]
  misc_feature (52)..(267): NCBI GI NO: 9625624 NR Description: nuclear antigen EBNA1 [Human herpesvirus 4]
  misc_feature (49)..(290): NCBI GI NO: 34900164 NR Description: hypothetical protein~predicted by GENSCAN etc.
  misc_feature (60)..(258): NCBI GI NO: 22960558 NR Description: hypothetical protein [Rhodobacter sphaeroides]
  misc_feature (52)..(264): NCBI GI NO: 7106228 NR Description: flagelliform silk protein
  misc_feature (37)..(245): NCBI GI NO: 9625624 NR Description: nuclear antigen EBNA1 [Human herpesvirus 4]
  misc_feature (61)..(207): NCBI GI NO: 32141270 NR Description: probable translational initiation factor
  misc_feature (74)..(304): NCBI GI NO: 22959992 NR Description: hypothetical protein [Rhodobacter sphaeroides]
MKPPASSTATSYLLLAPLAILLLVFVLPSLRPWSRVGSDSDGLGILCARRTGGFVDVAARRAGAATGPDDTGGGVQPTGGRADRAGPAGAARHRAHGVRAAAGRGGRARGRALRVLPRDGPRGRGAAGGGGEAARGRPGAGRLRREHERRQDVRVPVVGAAPLRGGAVRLRDEGRRRHVPARGGAGGRAAGQAPPRRVPGLRLRHGRAADAVHARHGVRGVVGRGGLGGRRAGDPGAQRHPGPRGPHGRQVAQPRRQGQEPLRPQAPDVRPQLGHGQLQARHRRRAHAQDEPPVGGGVQVLQRRHCGDHAVVRTVPPAVIVSSIDQHFFFL

SEQ ID NO: 27750 - protein, 172 aa, Zea mays subsp. mays
  peptide (1)..(172): Ceres Seq. ID no. 12356331
  misc_feature (1)..(115): Pfam Name: Pfam Description:  Galactosyltransferase
  misc_feature (1)..(170): NCBI GI NO: 18092341 NR Description: hypothetical protein [Zea mays]
  misc_feature (1)..(172): NCBI GI NO: 15242148 NR Description: putative protein; protein id: At5g57500
  misc_feature (1)..(172): NCBI GI NO: 21537037 NR Description: unknown [Arabidopsis thaliana]
  misc_feature (1)..(170): NCBI GI NO: 14719291 NR Description: unknown [Zea mays]
MNDGKTYAYLSSVPRLFAAEPYDYVMKADDDTYLRVAALAGELRGKPRHDVYLGYGYAMGGQPMPFMHGMGYVVSWDVAAWVAGAREILERNDTLGPEDLMVGKWLNLAGRGRNRYDLKPRMYDLSWDMDNFRPDTVAVHTLKTNRRWAAAFRYFNVVTAGITPSSELYHLP

SEQ ID NO: 27751 - DNA, 754 bp, Zea mays subsp. mays
  misc_feature (1)..(754): Ceres Seq. ID no. 12405554
aaatgacgccatgccggcgccaccgagggcgaaagctgtccagatcgtgtgattttgcatcccatccgcgagcgcgacacgcgctgacctactcgacggcctccacctccgtcttgaggcgaagcgtagtgcgaaggaccaactctttcgaagggaaattatatctcaggtgcttaggagtctgccatggccagcgagaataaggtatttaggttcgaggaagtcgccaagcacaacgtcaccaaggactgctggatcatcatcgccggcaaggtgtatgatgtcactccttttatggatgagcatcctggtggagatgaggttttgctagctgtaactgggaaagatgctacagctgattttgaagatattggccacagtgattccgcaagggacatgatggagaagtaccacatcgggcagatagatgcttcaacaatcccagcaaagcgaacttatgtgcacccccagcaagcgcccagccactcagacaagaataatgatctcctcatcaagatcctgcagttccttgtgcccattatgatcctgggccttgcatttggtatacgtcagtacagcaaatcagagtagtactgttcttgaagacttgcctttggagtctgttttatggtaatggtttggatgagaacagttcagtaattgcttagtgtatttgtcaggtggatgttatctcattggtcatatactatgtattatggacatccatgtgttgccgaaatgtgctcttttcccc

SEQ ID NO: 27752 - protein, 134 aa, Zea mays subsp. mays
  peptide (1)..(134): Ceres Seq. ID no. 12405555
  misc_feature (7)..(81): Pfam Name: Pfam Description:  Cytochrome b5-like Heme/Steroid binding domain
  misc_feature (1)..(134): NCBI GI NO: 37536104 NR Description: putative cytochrome
  misc_feature (1)..(132): NCBI GI NO: 25044825 NR Description: cytochrome b5 [Ananas comosus]
  misc_feature (1)..(134): NCBI GI NO: 729252 NR Description: Cytochrome B5
  misc_feature (1)..(134): NCBI GI NO: 2695711 NR Description: cytochome b5 [Olea europaea]
  misc_feature (1)..(134): NCBI GI NO: 15238776 NR Description: cytochrome b5 (dbj|BAA74839
  misc_feature (1)..(132): NCBI GI NO: 1076621 NR Description: cytochrome b5 - common tobacco
  misc_feature (1)..(132): NCBI GI NO: 1345882 NR Description: CYTOCHROME B5
  misc_feature (1)..(133): NCBI GI NO: 15225731 NR Description: putative cytochrome b5; protein id: At2g32720.1
  misc_feature (1)..(134): NCBI GI NO: 14719320 NR Description: cytochrome B5 [Oryza sativa]
  misc_feature (1)..(134): NCBI GI NO: 1345881 NR Description: Cytochrome b5
MASENKVFRFEEVAKHNVTKDCWIIIAGKVYDVTPFMDEHPGGDEVLLAVTGKDATADFEDIGHSDSARDMMEKYHIGQIDASTIPAKRTYVHPQQAPSHSDKNNDLLIKILQFLVPIMILGLAFGIRQYSKSE

SEQ ID NO: 27753 - protein, 98 aa, Zea mays subsp. mays
  peptide (1)..(98): Ceres Seq. ID no. 12405556
  misc_feature (1)..(98): NCBI GI NO: 37536104 NR Description: putative cytochrome
  misc_feature (1)..(96): NCBI GI NO: 25044825 NR Description: cytochrome b5 [Ananas comosus]
  misc_feature (1)..(98): NCBI GI NO: 729252 NR Description: Cytochrome B5
  misc_feature (1)..(98): NCBI GI NO: 2695711 NR Description: cytochome b5 [Olea europaea]
  misc_feature (1)..(98): NCBI GI NO: 15238776 NR Description: cytochrome b5 (dbj|BAA74839
  misc_feature (1)..(96): NCBI GI NO: 1076621 NR Description: cytochrome b5 - common tobacco
  misc_feature (1)..(96): NCBI GI NO: 1345882 NR Description: CYTOCHROME B5
  misc_feature (1)..(97): NCBI GI NO: 15225731 NR Description: putative cytochrome b5; protein id: At2g32720.1
  misc_feature (1)..(98): NCBI GI NO: 14719320 NR Description: cytochrome B5 [Oryza sativa]
  misc_feature (1)..(98): NCBI GI NO: 1345881 NR Description: Cytochrome b5
MDEHPGGDEVLLAVTGKDATADFEDIGHSDSARDMMEKYHIGQIDASTIPAKRTYVHPQQAPSHSDKNNDLLIKILQFLVPIMILGLAFGIRQYSKSE

SEQ ID NO: 27754 - DNA, 1600 bp, Zea mays subsp. mays
  misc_feature (1)..(1600): Ceres Seq. ID no. 12344156
acacgacccacctaccccgccgccgccgccgccgcatccccctcgattccgtctggcgatcgagggctcccagacacatcacagatacaccacgccaagccaaatcgagcaacgtctatcatcatattataatttcccctcattcatctcacagtccctcccaggcctcccctccctcctcccccgtcgccaaccaacctccaacccccagccgatcgcgtcggagatgctgggcgtcgcgcggaggcggctcggatctggatgcgtgctcgcccagctggcgcaggccctccgccccgccgccgctcccgccaggacctactccgccgcggccaaggagataactgtacgggaagcattgaataccgcattagatgaagaaatgtcggcagacccttctgttttcttgatgggagaagaggttggcgagtaccaaggtccatacaagatatccaagggtttgcttgacaagtatggccccgatagggttctcgatactccgatcactgaggcgggcttcactggcattggtgttggtgccgcttaccatggtcttcgacctattgtagagttcatgacatttaacttttcgatgcaggcaattgatcacataattaattcagctgccaagtcgaactacatgtctgctgggcagatatctgttcctattgtctttaggggtccaaatggtgctgctgctggagttggtgcccaacactcacagtgctatgcagcttggtatgcacatgttcccggattgaaagttctagctccatattctgcagaagatgctcgaggtttgctgaaagcagcaatcagggatccagatcctgttgtgttccttgaaaatgaacttctttatggtgaatcatttcctgtatctgctgaggtacttgattctagcttctgccttccgattggaaaggctaagatagagcgacaagggaaagatgtcactatcactgcattctccaaaatggtgggatatgcccttcaggccgctgatatactggccaaggaaggtatcagtgccgaggtaatcaatcttcgctcaattagaccgctggatagagctactattaatgcatctgtgaggaaaaccaatagattggtaaccgtagaagaaggcttccctcaacatgggattggtgcggaaatatgcatgtctgttgtagaggacagctttgagtatcttgatgcaccagtcgagaggattgctggagctgatgtgcccatgccgtacgctgccaaccttgagaggatggctgttccacaggtcgatgacatcgtccgggcagccaagcgtgcttgctacagggcagcagtaccgatggcagcaaccgcctagtccagcagaaccctgcatgttgcatttctttgtctaattttaatgtccgtgctgcagaaagacgtgtcacataatggtgtgacgagtacccactgccgctgcaactcaactatagcatgagctgagtttttgtagagccaccgagaggtgttcagtactccagttccagttccgcttatcttcgccgccgcagccgaaggctgcgcatgactctgcgtctgttttatggttcacgaatgattgcagatttgc

SEQ ID NO: 27755 - protein, 448 aa, Zea mays subsp. mays
  peptide (1)..(448): Ceres Seq. ID no. 12344157
  misc_feature (307)..(429): Pfam Name: Pfam Description:  Transketolase, C-terminal domain
  misc_feature (76)..(448): NCBI GI NO: 3850999 NR Description: pyruvate dehydrogenase E1 beta subunit isoform 1
  misc_feature (76)..(448): NCBI GI NO: 38175533 NR Description: putative pyruvate dehydrogenase E1 beta subunitisoform 1 protein
  misc_feature (76)..(448): NCBI GI NO: 3851001 NR Description: pyruvate dehydrogenase E1 beta subunit isoform 2
  misc_feature (76)..(448): NCBI GI NO: 3851003 NR Description: pyruvate dehydrogenase E1 beta subunit isoform 3
  misc_feature (76)..(440): NCBI GI NO: 15241286 NR Description: pyruvate dehydrogenase E1 component beta subunit
  misc_feature (76)..(440): NCBI GI NO: 520478 NR Description: pyruvate dehydrogenase E1 beta subunit
  misc_feature (95)..(448): NCBI GI NO: 1709454 NR Description: Pyruvate dehydrogenase E1 component beta subunit
  misc_feature (114)..(440): NCBI GI NO: 22968973 NR Description: hypothetical protein [Rhodospirillum rubrum]
  misc_feature (90)..(432): NCBI GI NO: 21358145 NR Description: CG11876-PD [Drosophila melanogaster]
  misc_feature (90)..(432): NCBI GI NO: 25012844 NR Description: RH05604p [Drosophila melanogaster]
HDPPTPPPPPPHPPRFRLAIEGSQTHHRYTTPSQIEQRLSSYYNFPSFISQSLPGLPSLLPRRQPTSNPQPIASEMLGVARRRLGSGCVLAQLAQALRPAAAPARTYSAAAKEITVREALNTALDEEMSADPSVFLMGEEVGEYQGPYKISKGLLDKYGPDRVLDTPITEAGFTGIGVGAAYHGLRPIVEFMTFNFSMQAIDHIINSAAKSNYMSAGQISVPIVFRGPNGAAAGVGAQHSQCYAAWYAHVPGLKVLAPYSAEDARGLLKAAIRDPDPVVFLENELLYGESFPVSAEVLDSSFCLPIGKAKIERQGKDVTITAFSKMVGYALQAADILAKEGISAEVINLRSIRPLDRATINASVRKTNRLVTVEEGFPQHGIGAEICMSVVEDSFEYLDAPVERIAGADVPMPYAANLERMAVPQVDDIVRAAKRACYRAAVPMAATA

SEQ ID NO: 27756 - protein, 373 aa, Zea mays subsp. mays
  peptide (1)..(373): Ceres Seq. ID no. 12344158
  misc_feature (232)..(354): Pfam Name: Pfam Description:  Transketolase, C-terminal domain
  misc_feature (1)..(373): NCBI GI NO: 3850999 NR Description: pyruvate dehydrogenase E1 beta subunit isoform 1
  misc_feature (1)..(373): NCBI GI NO: 38175533 NR Description: putative pyruvate dehydrogenase E1 beta subunitisoform 1 protein
  misc_feature (1)..(373): NCBI GI NO: 3851001 NR Description: pyruvate dehydrogenase E1 beta subunit isoform 2
  misc_feature (1)..(373): NCBI GI NO: 3851003 NR Description: pyruvate dehydrogenase E1 beta subunit isoform 3
  misc_feature (1)..(365): NCBI GI NO: 15241286 NR Description: pyruvate dehydrogenase E1 component beta subunit
  misc_feature (1)..(365): NCBI GI NO: 520478 NR Description: pyruvate dehydrogenase E1 beta subunit
  misc_feature (20)..(373): NCBI GI NO: 1709454 NR Description: Pyruvate dehydrogenase E1 component beta subunit
  misc_feature (39)..(365): NCBI GI NO: 22968973 NR Description: hypothetical protein [Rhodospirillum rubrum]
  misc_feature (15)..(357): NCBI GI NO: 21358145 NR Description: CG11876-PD [Drosophila melanogaster]
  misc_feature (15)..(357): NCBI GI NO: 25012844 NR Description: RH05604p [Drosophila melanogaster]
MLGVARRRLGSGCVLAQLAQALRPAAAPARTYSAAAKEITVREALNTALDEEMSADPSVFLMGEEVGEYQGPYKISKGLLDKYGPDRVLDTPITEAGFTGIGVGAAYHGLRPIVEFMTFNFSMQAIDHIINSAAKSNYMSAGQISVPIVFRGPNGAAAGVGAQHSQCYAAWYAHVPGLKVLAPYSAEDARGLLKAAIRDPDPVVFLENELLYGESFPVSAEVLDSSFCLPIGKAKIERQGKDVTITAFSKMVGYALQAADILAKEGISAEVINLRSIRPLDRATINASVRKTNRLVTVEEGFPQHGIGAEICMSVVEDSFEYLDAPVERIAGADVPMPYAANLERMAVPQVDDIVRAAKRACYRAAVPMAATA

SEQ ID NO: 27757 - protein, 321 aa, Zea mays subsp. mays
  peptide (1)..(321): Ceres Seq. ID no. 12344159
  misc_feature (180)..(302): Pfam Name: Pfam Description:  Transketolase, C-terminal domain
  misc_feature (1)..(321): NCBI GI NO: 3850999 NR Description: pyruvate dehydrogenase E1 beta subunit isoform 1
  misc_feature (1)..(321): NCBI GI NO: 38175533 NR Description: putative pyruvate dehydrogenase E1 beta subunitisoform 1 protein
  misc_feature (1)..(321): NCBI GI NO: 3851001 NR Description: pyruvate dehydrogenase E1 beta subunit isoform 2
  misc_feature (1)..(321): NCBI GI NO: 3851003 NR Description: pyruvate dehydrogenase E1 beta subunit isoform 3
  misc_feature (1)..(313): NCBI GI NO: 15241286 NR Description: pyruvate dehydrogenase E1 component beta subunit
  misc_feature (1)..(313): NCBI GI NO: 520478 NR Description: pyruvate dehydrogenase E1 beta subunit
  misc_feature (1)..(321): NCBI GI NO: 1709454 NR Description: Pyruvate dehydrogenase E1 component beta subunit
  misc_feature (1)..(313): NCBI GI NO: 22968973 NR Description: hypothetical protein [Rhodospirillum rubrum]
  misc_feature (1)..(305): NCBI GI NO: 21358145 NR Description: CG11876-PD [Drosophila melanogaster]
  misc_feature (1)..(305): NCBI GI NO: 25012844 NR Description: RH05604p [Drosophila melanogaster]
MSADPSVFLMGEEVGEYQGPYKISKGLLDKYGPDRVLDTPITEAGFTGIGVGAAYHGLRPIVEFMTFNFSMQAIDHIINSAAKSNYMSAGQISVPIVFRGPNGAAAGVGAQHSQCYAAWYAHVPGLKVLAPYSAEDARGLLKAAIRDPDPVVFLENELLYGESFPVSAEVLDSSFCLPIGKAKIERQGKDVTITAFSKMVGYALQAADILAKEGISAEVINLRSIRPLDRATINASVRKTNRLVTVEEGFPQHGIGAEICMSVVEDSFEYLDAPVERIAGADVPMPYAANLERMAVPQVDDIVRAAKRACYRAAVPMAATA

SEQ ID NO: 27758 - DNA, 1253 bp, Zea mays subsp. mays
  misc_feature (1)..(1253): Ceres Seq. ID no. 12409239
ataaacgagaacccagccgctgagtagacttgtgttttcgcttccccttccccatcccctctcctcccctcgccggcttgtcggtctcgccgcgccactggccatacatccaagacgctaatccgtgtgggggaaaagcccccctctctctgaaactattcaaatggcgtggggcgtatccccgcggcggcagccgtcgttcccggtgcaggccctctacgagctctgcaagcgctccttcccctccccttccgccgcctcatcgtctcccccgcccgctgatgtcgtccgcagcatctcctcgctcatggatacaatcactcctgcggatgttgggctcagagattataatcttgaggacgacagggggcatggattttttgactccaacctcctcaagggttcaggaaggcttcctcggtgggcgcggcccatcaagtaccttcatatctacagctgtgatgcattctctattggaatattctgcttgccaacttcatcagtcattcctcttcatgatcatccaggaatgactgtactgagcaaaatcctttatggttccatgcatgtgaaatcatatgattggatagagcctactgtcctagcaagtagccagccagcaaggttggccaaattacatacagatgatgttcgtactgctccatgtccaacctccattttgtatccccaaagtggtgggaacctgcactgcttcacttcagtatcttcttgtgctgttcttgatgtccttgccccaccatataacgatgacgctggtcggatttgcacttattttcatgactatccattttcaagtctctcagcagctggacgcacgaaggtagctggtaacccagataattatgcatggctggaggccataaacactccagtgaatatcaacatgcacactggcatgtataccggtccaactgtacaggaacttcagacatgatgtaaagatgaaccggagcatcaagcagcagctgggtgcctcttcactgatagtagagctctaatatagtgatgtatgttctatactttgaggttagcttttcccctctggccccctttgttggagaaactgttgtacttcagttaagagataagttttcagagtaatttctcctaatcagtttagtagaggtttcaggttcactaacctgagcagtgatcaggcttttagcttatttatttatgtttgtgcaacgctggaatggttttgaatgcaaaattgtcactgatgttgccgc

SEQ ID NO: 27759 - protein, 263 aa, Zea mays subsp. mays
  peptide (1)..(263): Ceres Seq. ID no. 12409240
  misc_feature (5)..(259): NCBI GI NO: 18394617 NR Description: expressed protein; protein id: At1g18490
  misc_feature (5)..(259): NCBI GI NO: 21618020 NR Description: unknown [Arabidopsis thaliana]
  misc_feature (5)..(259): NCBI GI NO: 25402861 NR Description: protein F15H18.4 [imported] - Arabidopsis thaliana
  misc_feature (42)..(259): NCBI GI NO: 15451150 NR Description: Unknown protein [Arabidopsis thaliana]
  misc_feature (4)..(258): NCBI GI NO: 34906308 NR Description: unnamed protein product
  misc_feature (33)..(260): NCBI GI NO: 10176982 NR Description: contains similarity to unknownprotein~emb|CAB89322
  misc_feature (33)..(260): NCBI GI NO: 15242505 NR Description: putative protein; protein id: At5g39890
  misc_feature (11)..(259): NCBI GI NO: 18406030 NR Description: expressed protein; protein id: At2g42670
  misc_feature (11)..(259): NCBI GI NO: 25370572 NR Description: hypothetical protein At2g42670
  misc_feature (1)..(260): NCBI GI NO: 15242218 NR Description: putative protein; protein id: At5g15120.1
MAWGVSPRRQPSFPVQALYELCKRSFPSPSAASSSPPPADVVRSISSLMDTITPADVGLRDYNLEDDRGHGFFDSNLLKGSGRLPRWARPIKYLHIYSCDAFSIGIFCLPTSSVIPLHDHPGMTVLSKILYGSMHVKSYDWIEPTVLASSQPARLAKLHTDDVRTAPCPTSILYPQSGGNLHCFTSVSSCAVLDVLAPPYNDDAGRICTYFHDYPFSSLSAAGRTKVAGNPDNYAWLEAINTPVNINMHTGMYTGPTVQELQT

SEQ ID NO: 27760 - protein, 215 aa, Zea mays subsp. mays
  peptide (1)..(215): Ceres Seq. ID no. 12409241
  misc_feature (1)..(211): NCBI GI NO: 18394617 NR Description: expressed protein; protein id: At1g18490
  misc_feature (1)..(211): NCBI GI NO: 21618020 NR Description: unknown [Arabidopsis thaliana]
  misc_feature (1)..(211): NCBI GI NO: 25402861 NR Description: protein F15H18.4 [imported] - Arabidopsis thaliana
  misc_feature (1)..(211): NCBI GI NO: 15451150 NR Description: Unknown protein [Arabidopsis thaliana]
  misc_feature (1)..(210): NCBI GI NO: 34906308 NR Description: unnamed protein product
  misc_feature (1)..(212): NCBI GI NO: 10176982 NR Description: contains similarity to unknownprotein~emb|CAB89322
  misc_feature (1)..(212): NCBI GI NO: 15242505 NR Description: putative protein; protein id: At5g39890
  misc_feature (1)..(211): NCBI GI NO: 18406030 NR Description: expressed protein; protein id: At2g42670
  misc_feature (1)..(211): NCBI GI NO: 25370572 NR Description: hypothetical protein At2g42670
  misc_feature (1)..(212): NCBI GI NO: 15242218 NR Description: putative protein; protein id: At5g15120.1
MDTITPADVGLRDYNLEDDRGHGFFDSNLLKGSGRLPRWARPIKYLHIYSCDAFSIGIFCLPTSSVIPLHDHPGMTVLSKILYGSMHVKSYDWIEPTVLASSQPARLAKLHTDDVRTAPCPTSILYPQSGGNLHCFTSVSSCAVLDVLAPPYNDDAGRICTYFHDYPFSSLSAAGRTKVAGNPDNYAWLEAINTPVNINMHTGMYTGPTVQELQT

SEQ ID NO: 27761 - protein, 141 aa, Zea mays subsp. mays
  peptide (1)..(141): Ceres Seq. ID no. 12409242
  misc_feature (1)..(137): NCBI GI NO: 18394617 NR Description: expressed protein; protein id: At1g18490
  misc_feature (1)..(137): NCBI GI NO: 21618020 NR Description: unknown [Arabidopsis thaliana]
  misc_feature (1)..(137): NCBI GI NO: 25402861 NR Description: protein F15H18.4 [imported] - Arabidopsis thaliana
  misc_feature (1)..(137): NCBI GI NO: 15451150 NR Description: Unknown protein [Arabidopsis thaliana]
  misc_feature (1)..(136): NCBI GI NO: 34906308 NR Description: unnamed protein product
  misc_feature (1)..(138): NCBI GI NO: 10176982 NR Description: contains similarity to unknownprotein~emb|CAB89322
  misc_feature (1)..(138): NCBI GI NO: 15242505 NR Description: putative protein; protein id: At5g39890
  misc_feature (1)..(137): NCBI GI NO: 18406030 NR Description: expressed protein; protein id: At2g42670
  misc_feature (1)..(137): NCBI GI NO: 25370572 NR Description: hypothetical protein At2g42670
  misc_feature (1)..(138): NCBI GI NO: 15242218 NR Description: putative protein; protein id: At5g15120.1
MTVLSKILYGSMHVKSYDWIEPTVLASSQPARLAKLHTDDVRTAPCPTSILYPQSGGNLHCFTSVSSCAVLDVLAPPYNDDAGRICTYFHDYPFSSLSAAGRTKVAGNPDNYAWLEAINTPVNINMHTGMYTGPTVQELQT

SEQ ID NO: 27762 - DNA, 2015 bp, Zea mays subsp. mays
  misc_feature (1)..(2015): Ceres Seq. ID no. 12594596
aacaagtcatatgcacaaaatctcatttgagcgtgcaagctccttcgcctcgaaccctctcgcgcttggctttctttcactctccagggctccactcccatctcgccgccgcagccatggcgatcacagcgccaactcccgacatcctcggcgagcgccaatccggccaggacgtccgcacgcagaacgtgatggcttgcggggcggtggccaacatcgtcaaatcctcgctcggccccgtcggtctcgacaagatgctagtggacgatattggtgatgttacaatcacaaatgatggagcaaccatacttaagatgttggaagttgagcatccagccgccaaggttcttgttgagttggctgagctccaagaccgtgaggtaggagatggaactacttccgttgtcatcatagcggcagagttactcaagagaggcaatgatcttgtgaagaataagatccatccaacctctataatcagtggctacaggcttgctatgcgtgaagcctgcaaatatgttgaggaaaagttagcagtcaaggttgacaaacttggaaaagaatcccttatcaactctgcaaaaactagcatgtcttcgaaattgattaatagtgacagtgatttctttgcaactttggttgttgaggcagttcaagccgtgaagactacaaatgccaagggagacgtgaaatatccaatcaagagcatcaatattttgaaagctcatggtaaaagcgccaaggatagttatctgttgaatggctatgcactaaacacaggccgtgcagctcaaggaatgcctacgagagtaactcctgctagaattgcttgtcttgattttaaccttcagaagacaaaaatgcaacttggtgtccaagttcttgtaactgatccaagggaacttgagaagattcgtcagagagaatctgacataacaaaggagcgaattgagaaaattctcaaggctggagctaatgttgtgttgaccaccaagggaattgacgatatgtccttgaagtactttgttgaggctggtgcgattgcagtaaggcgtgtgcgcaaggaagatctgcgacatgttgccaaagccactggtgcaactatggtgtctacttttgcggacatggaaggtgaagaaacattcgattcatcattccttggccatgctgatgaagttgtggaggaaagaattgctgacgatgatgttattctggtgaaaggcacaaagaacaccagcgcggtctctataatacttaggggcgcaaatgactacatgcttgatgagattgaacggtccttgcatgatgccctgtgcattgtgaagagaaccctggaatcaaatatggttgttgctgggggtggtgcagttgaagctgcgttgtcagtttatctggagaaccttgcaacaaccctgggttctcgggaacaattggcaattgctgaatttgctgagtctttgttaatcataccaaaggtactatctgttaatgctgcaaaagatgcaactgagcttgtagcaaagcttagggcatatcatcatactgctcaaacaaaggccgacaagcaacattattcaagtatgggccttgacctctctaagggtatcattcgcaacaaccttgagtatggcgtgatagagccatcgatgagcaaagtaaagatcattcagtttgccacggaggctgccattactatcctgaggattgacgacatgatcaagcttaccaaggaagaagagggtaacgaagagtaagcagcccaccagtagtgggctagtggactcccatgggatggttgccatagcatgtagcacttgttttttcacttatcgtttacttttgcttgctgtgagcattcgtttgtaggaaaagtgagaacggatgtgtatcaatccgtgctgggtgacgatgactcacggatggatcaaatctttgcgtatattggggccaaaacagttctatctgacggatttaagttggaaaatgaaatggtttcgtgtagtgattatttgatt

SEQ ID NO: 27763 - protein, 583 aa, Zea mays subsp. mays
  peptide (1)..(583): Ceres Seq. ID no. 12594597
  misc_feature (69)..(576): Pfam Name: Pfam Description:  TCP-1/cpn60 chaperonin family
  misc_feature (39)..(583): NCBI GI NO: 24371053 NR Description: t-complex polypeptide 1 [Bruguiera sexangula]
  misc_feature (39)..(583): NCBI GI NO: 25083339 NR Description: t-complex polypeptide 1 homologue
  misc_feature (39)..(583): NCBI GI NO: 15231024 NR Description: t-complex polypeptide 1 homologue
  misc_feature (39)..(583): NCBI GI NO: 9293959 NR Description: chaperonin, t-complex protein alpha subunit
  misc_feature (40)..(580): NCBI GI NO: 13959582 NR Description: T-complex protein 1, alpha subunit
  misc_feature (48)..(582): NCBI GI NO: 13959583 NR Description: T-complex protein 1, alpha subunit
  misc_feature (48)..(583): NCBI GI NO: 135536 NR Description: T-COMPLEX PROTEIN 1, ALPHA SUBUNIT
  misc_feature (48)..(583): NCBI GI NO: 135538 NR Description: T-complex protein 1, alpha subunit
  misc_feature (48)..(583): NCBI GI NO: 13540473 NR Description: t-complex 1; T-complex locus TCP-1; t-complex 1
  misc_feature (34)..(578): NCBI GI NO: 17532601 NR Description: Chaperonin Containing TCP-1 CCT-1 (58
QVICTKSHLSVQAPSPRTLSRLAFFHSPGLHSHLAAAAMAITAPTPDILGERQSGQDVRTQNVMACGAVANIVKSSLGPVGLDKMLVDDIGDVTITNDGATILKMLEVEHPAAKVLVELAELQDREVGDGTTSVVIIAAELLKRGNDLVKNKIHPTSIISGYRLAMREACKYVEEKLAVKVDKLGKESLINSAKTSMSSKLINSDSDFFATLVVEAVQAVKTTNAKGDVKYPIKSINILKAHGKSAKDSYLLNGYALNTGRAAQGMPTRVTPARIACLDFNLQKTKMQLGVQVLVTDPRELEKIRQRESDITKERIEKILKAGANVVLTTKGIDDMSLKYFVEAGAIAVRRVRKEDLRHVAKATGATMVSTFADMEGEETFDSSFLGHADEVVEERIADDDVILVKGTKNTSAVSIILRGANDYMLDEIERSLHDALCIVKRTLESNMVVAGGGAVEAALSVYLENLATTLGSREQLAIAEFAESLLIIPKVLSVNAAKDATELVAKLRAYHHTAQTKADKQHYSSMGLDLSKGIIRNNLEYGVIEPSMSKVKIIQFATEAAITILRIDDMIKLTKEEEGNEE

SEQ ID NO: 27764 - protein, 545 aa, Zea mays subsp. mays
  peptide (1)..(545): Ceres Seq. ID no. 12594598
  misc_feature (31)..(538): Pfam Name: Pfam Description:  TCP-1/cpn60 chaperonin family
  misc_feature (1)..(545): NCBI GI NO: 24371053 NR Description: t-complex polypeptide 1 [Bruguiera sexangula]
  misc_feature (1)..(545): NCBI GI NO: 25083339 NR Description: t-complex polypeptide 1 homologue
  misc_feature (1)..(545): NCBI GI NO: 15231024 NR Description: t-complex polypeptide 1 homologue
  misc_feature (1)..(545): NCBI GI NO: 9293959 NR Description: chaperonin, t-complex protein alpha subunit
  misc_feature (2)..(542): NCBI GI NO: 13959582 NR Description: T-complex protein 1, alpha subunit
  misc_feature (10)..(544): NCBI GI NO: 13959583 NR Description: T-complex protein 1, alpha subunit
  misc_feature (10)..(545): NCBI GI NO: 135536 NR Description: T-COMPLEX PROTEIN 1, ALPHA SUBUNIT
  misc_feature (10)..(545): NCBI GI NO: 135538 NR Description: T-complex protein 1, alpha subunit
  misc_feature (10)..(545): NCBI GI NO: 13540473 NR Description: t-complex 1; T-complex locus TCP-1; t-complex 1
  misc_feature (1)..(540): NCBI GI NO: 17532601 NR Description: Chaperonin Containing TCP-1 CCT-1 (58
MAITAPTPDILGERQSGQDVRTQNVMACGAVANIVKSSLGPVGLDKMLVDDIGDVTITNDGATILKMLEVEHPAAKVLVELAELQDREVGDGTTSVVIIAAELLKRGNDLVKNKIHPTSIISGYRLAMREACKYVEEKLAVKVDKLGKESLINSAKTSMSSKLINSDSDFFATLVVEAVQAVKTTNAKGDVKYPIKSINILKAHGKSAKDSYLLNGYALNTGRAAQGMPTRVTPARIACLDFNLQKTKMQLGVQVLVTDPRELEKIRQRESDITKERIEKILKAGANVVLTTKGIDDMSLKYFVEAGAIAVRRVRKEDLRHVAKATGATMVSTFADMEGEETFDSSFLGHADEVVEERIADDDVILVKGTKNTSAVSIILRGANDYMLDEIERSLHDALCIVKRTLESNMVVAGGGAVEAALSVYLENLATTLGSREQLAIAEFAESLLIIPKVLSVNAAKDATELVAKLRAYHHTAQTKADKQHYSSMGLDLSKGIIRNNLEYGVIEPSMSKVKIIQFATEAAITILRIDDMIKLTKEEEGNEE

SEQ ID NO: 27765 - protein, 520 aa, Zea mays subsp. mays
  peptide (1)..(520): Ceres Seq. ID no. 12594599
  misc_feature (6)..(513): Pfam Name: Pfam Description:  TCP-1/cpn60 chaperonin family
  misc_feature (1)..(520): NCBI GI NO: 24371053 NR Description: t-complex polypeptide 1 [Bruguiera sexangula]
  misc_feature (1)..(520): NCBI GI NO: 25083339 NR Description: t-complex polypeptide 1 homologue
  misc_feature (1)..(520): NCBI GI NO: 15231024 NR Description: t-complex polypeptide 1 homologue
  misc_feature (1)..(520): NCBI GI NO: 9293959 NR Description: chaperonin, t-complex protein alpha subunit
  misc_feature (1)..(517): NCBI GI NO: 13959582 NR Description: T-complex protein 1, alpha subunit
  misc_feature (1)..(519): NCBI GI NO: 13959583 NR Description: T-complex protein 1, alpha subunit
  misc_feature (1)..(520): NCBI GI NO: 135536 NR Description: T-COMPLEX PROTEIN 1, ALPHA SUBUNIT
  misc_feature (1)..(520): NCBI GI NO: 135538 NR Description: T-complex protein 1, alpha subunit
  misc_feature (1)..(520): NCBI GI NO: 13540473 NR Description: t-complex 1; T-complex locus TCP-1; t-complex 1
  misc_feature (1)..(515): NCBI GI NO: 17532601 NR Description: Chaperonin Containing TCP-1 CCT-1 (58
MACGAVANIVKSSLGPVGLDKMLVDDIGDVTITNDGATILKMLEVEHPAAKVLVELAELQDREVGDGTTSVVIIAAELLKRGNDLVKNKIHPTSIISGYRLAMREACKYVEEKLAVKVDKLGKESLINSAKTSMSSKLINSDSDFFATLVVEAVQAVKTTNAKGDVKYPIKSINILKAHGKSAKDSYLLNGYALNTGRAAQGMPTRVTPARIACLDFNLQKTKMQLGVQVLVTDPRELEKIRQRESDITKERIEKILKAGANVVLTTKGIDDMSLKYFVEAGAIAVRRVRKEDLRHVAKATGATMVSTFADMEGEETFDSSFLGHADEVVEERIADDDVILVKGTKNTSAVSIILRGANDYMLDEIERSLHDALCIVKRTLESNMVVAGGGAVEAALSVYLENLATTLGSREQLAIAEFAESLLIIPKVLSVNAAKDATELVAKLRAYHHTAQTKADKQHYSSMGLDLSKGIIRNNLEYGVIEPSMSKVKIIQFATEAAITILRIDDMIKLTKEEEGNEE

SEQ ID NO: 27766 - DNA, 1550 bp, Zea mays subsp. mays
  misc_feature (1)..(1550): Ceres Seq. ID no. 12406892
aaaaaaacaaacccggctctctcacttgcttcaaggccgacgggctatctcactgatagtgataggaacagaacccgtgcatatttcagtcgtcgctcgcggagccgtggcgcatcgcgactcaggcactcaccgaccgcggatatggccccgccgccatggcctctccttgcgacttccctcctcctcatcctattccaccactcgcctcgcgccgcggtggcgtttccgccgtctctgggcgacggcctcctgggcgccgcccgcgcgccgggtttcgcggcttggctgcgcggctttcggcgccgcatccacgagcgccccgagctcgccttccaggaataccgcacgagcgagctcgtccgcgacgagctcgacgcgatcggggtgccgtacgtgtggcccgtcgcgcagacgggcgtcgtggcgaccatcgccggcggcagcgatggccccgtcgtcgcgctccgagccgacatggacgcgctacccttgcaggaattggtagactgggaacacaagagcaaggagaatggaaagatgcatgcttgtggacatgatgctcacacaacgatgcttcttggggcagctaaattgcttcatgctcggaaggatgatctgaagggtaccgtgaagcttgtcttccagccaggcgaagaaggctacggcggcgcttaccatgttctcagagaaggtgtcctggatgacgtgtctgccattttcggcttgcatgtggatccaggacttcccgtaggcaccgtttcttccaggccagggccgtttctagcagcagcaggtagatttctggtgacggtcactggaaaaggcggacatgctgcagggccacaggatgctgtggatcccattgttgcagcatcatctgccatcgtcagccttcagcttcttgttgcccgggaaattgatcccctccaggctgcagtggtttcggtcacgttcatgaaaggaggtgatgcttacaacgtaattccagagtcagcatccttcggcgggaccttcaggagcttgacaacagaaggcttttcgtatctcatgaagaggatcaaagagatcatagaaggtcatgccgccgtccaccgctgcaccgccgccgtcgacttcatgcaggagaagctccgcccgtacccagccaccgtgaacgacgaagggatgtaccgtcacgccagagaagtggcagaggccatgcttggacaggacaaggtgagtgtaggcgcccagatgatgggcgccgaggatttctccttctacgcggagaagtttgcaggggcgttcttcatgatcggagtccgcaacaagagcatggaggaggcgatgcatcctctccactccccgtacttcgtgatagatgaggacgtgctgcctgtaggagctgccttccactctgcagtagcgatggagtacctgaacaaatactcaacgacccggcaaactgagctgctgcgcattgagctgtgatagattattttgcttgtaataatggttacgaggccgaggtcatgttgcacaaaagaaagtttgcattgtgcccatag

SEQ ID NO: 27767 - protein, 490 aa, Zea mays subsp. mays
  peptide (1)..(490): Ceres Seq. ID no. 12406893
  misc_feature (94)..(475): Pfam Name: Pfam Description:  Peptidase family M20/M25/M40
  misc_feature (46)..(480): NCBI GI NO: 34900780 NR Description: putative IAA amidohydrolase
  misc_feature (56)..(477): NCBI GI NO: 34900782 NR Description: putative IAA amidohydrolase
  misc_feature (61)..(480): NCBI GI NO: 34900784 NR Description: IAA amidohydrolase-like protein~contains ESTsAU057861
  misc_feature (79)..(476): NCBI GI NO: 28376718 NR Description: putative  IAA amidohydrolase
  misc_feature (79)..(481): NCBI GI NO: 28376716 NR Description: putative  IAA amidohydrolase
  misc_feature (79)..(485): NCBI GI NO: 18129692 NR Description: IAA amidohydrolase [Arabidopsis suecica]
  misc_feature (79)..(485): NCBI GI NO: 15233011 NR Description: IAA-amino acid hydrolase
  misc_feature (79)..(485): NCBI GI NO: 21554648 NR Description: IAA-amino acid hydrolase (ILR1)
  misc_feature (79)..(485): NCBI GI NO: 887785 NR Description: ILR1
  misc_feature (50)..(476): NCBI GI NO: 34910396 NR Description: putative IAA-Ala hydrolase
KKTNPALSLASRPTGYLTDSDRNRTRAYFSRRSRSRGASRLRHSPTADMAPPPWPLLATSLLLILFHHSPRAAVAFPPSLGDGLLGAARAPGFAAWLRGFRRRIHERPELAFQEYRTSELVRDELDAIGVPYVWPVAQTGVVATIAGGSDGPVVALRADMDALPLQELVDWEHKSKENGKMHACGHDAHTTMLLGAAKLLHARKDDLKGTVKLVFQPGEEGYGGAYHVLREGVLDDVSAIFGLHVDPGLPVGTVSSRPGPFLAAAGRFLVTVTGKGGHAAGPQDAVDPIVAASSAIVSLQLLVAREIDPLQAAVVSVTFMKGGDAYNVIPESASFGGTFRSLTTEGFSYLMKRIKEIIEGHAAVHRCTAAVDFMQEKLRPYPATVNDEGMYRHAREVAEAMLGQDKVSVGAQMMGAEDFSFYAEKFAGAFFMIGVRNKSMEEAMHPLHSPYFVIDEDVLPVGAAFHSAVAMEYLNKYSTTRQTELLRIEL

SEQ ID NO: 27768 - protein, 442 aa, Zea mays subsp. mays
  peptide (1)..(442): Ceres Seq. ID no. 12406894
  misc_feature (46)..(427): Pfam Name: Pfam Description:  Peptidase family M20/M25/M40
  misc_feature (1)..(432): NCBI GI NO: 34900780 NR Description: putative IAA amidohydrolase
  misc_feature (8)..(429): NCBI GI NO: 34900782 NR Description: putative IAA amidohydrolase
  misc_feature (13)..(432): NCBI GI NO: 34900784 NR Description: IAA amidohydrolase-like protein~contains ESTsAU057861
  misc_feature (31)..(428): NCBI GI NO: 28376718 NR Description: putative  IAA amidohydrolase
  misc_feature (31)..(433): NCBI GI NO: 28376716 NR Description: putative  IAA amidohydrolase
  misc_feature (31)..(437): NCBI GI NO: 18129692 NR Description: IAA amidohydrolase [Arabidopsis suecica]
  misc_feature (31)..(437): NCBI GI NO: 15233011 NR Description: IAA-amino acid hydrolase
  misc_feature (31)..(437): NCBI GI NO: 21554648 NR Description: IAA-amino acid hydrolase (ILR1)
  misc_feature (31)..(437): NCBI GI NO: 887785 NR Description: ILR1
  misc_feature (2)..(428): NCBI GI NO: 34910396 NR Description: putative IAA-Ala hydrolase
MAPPPWPLLATSLLLILFHHSPRAAVAFPPSLGDGLLGAARAPGFAAWLRGFRRRIHERPELAFQEYRTSELVRDELDAIGVPYVWPVAQTGVVATIAGGSDGPVVALRADMDALPLQELVDWEHKSKENGKMHACGHDAHTTMLLGAAKLLHARKDDLKGTVKLVFQPGEEGYGGAYHVLREGVLDDVSAIFGLHVDPGLPVGTVSSRPGPFLAAAGRFLVTVTGKGGHAAGPQDAVDPIVAASSAIVSLQLLVAREIDPLQAAVVSVTFMKGGDAYNVIPESASFGGTFRSLTTEGFSYLMKRIKEIIEGHAAVHRCTAAVDFMQEKLRPYPATVNDEGMYRHAREVAEAMLGQDKVSVGAQMMGAEDFSFYAEKFAGAFFMIGVRNKSMEEAMHPLHSPYFVIDEDVLPVGAAFHSAVAMEYLNKYSTTRQTELLRIEL

SEQ ID NO: 27769 - protein, 331 aa, Zea mays subsp. mays
  peptide (1)..(331): Ceres Seq. ID no. 12406895
  misc_feature (1)..(316): Pfam Name: Pfam Description:  Peptidase family M20/M25/M40
  misc_feature (1)..(321): NCBI GI NO: 34900780 NR Description: putative IAA amidohydrolase
  misc_feature (1)..(318): NCBI GI NO: 34900782 NR Description: putative IAA amidohydrolase
  misc_feature (1)..(321): NCBI GI NO: 34900784 NR Description: IAA amidohydrolase-like protein~contains ESTsAU057861
  misc_feature (1)..(317): NCBI GI NO: 28376718 NR Description: putative  IAA amidohydrolase
  misc_feature (1)..(322): NCBI GI NO: 28376716 NR Description: putative  IAA amidohydrolase
  misc_feature (1)..(326): NCBI GI NO: 18129692 NR Description: IAA amidohydrolase [Arabidopsis suecica]
  misc_feature (1)..(326): NCBI GI NO: 15233011 NR Description: IAA-amino acid hydrolase
  misc_feature (1)..(326): NCBI GI NO: 21554648 NR Description: IAA-amino acid hydrolase (ILR1)
  misc_feature (1)..(326): NCBI GI NO: 887785 NR Description: ILR1
  misc_feature (1)..(317): NCBI GI NO: 34910396 NR Description: putative IAA-Ala hydrolase
MDALPLQELVDWEHKSKENGKMHACGHDAHTTMLLGAAKLLHARKDDLKGTVKLVFQPGEEGYGGAYHVLREGVLDDVSAIFGLHVDPGLPVGTVSSRPGPFLAAAGRFLVTVTGKGGHAAGPQDAVDPIVAASSAIVSLQLLVAREIDPLQAAVVSVTFMKGGDAYNVIPESASFGGTFRSLTTEGFSYLMKRIKEIIEGHAAVHRCTAAVDFMQEKLRPYPATVNDEGMYRHAREVAEAMLGQDKVSVGAQMMGAEDFSFYAEKFAGAFFMIGVRNKSMEEAMHPLHSPYFVIDEDVLPVGAAFHSAVAMEYLNKYSTTRQTELLRIEL

SEQ ID NO: 27770 - DNA, 1436 bp, Zea mays subsp. mays
  misc_feature (1)..(1436): Ceres Seq. ID no. 12409231
acccttactcagcatggaacaggttctctgtcctcataactccaaccaaacaacggcagctagcgagctcccgcggtcccgccgccgccccctggtcctccaaaaaacggctgaaccctaaaccctccctagctcccgccgcctcgcttaaccgcgcccatggccgccgccgctcgcgccgccctcccgcggccccacctctctcttttttcgtcctcccaccgcagcccccatctgtccctcacgccctcctccgcccctcgcctgcgcagcggcgctgccacctcccctgcgctgcagcagcaccaccaggtcaccacgcgcctgggcgacgtgatcgaggcgcagcagttcgaccgggacgcgctgaacgagatcttcgaggtggcgcgggagatggaggccgtggagaggggttcccacggcgcccccagccgcgtcctcgaggggtacctcatggccacgcttttctacgagccctccacgcgcacgcgcctctccttcgaggctgctatgcggaggctcggcggggaggtcctcaccaccgagaatgcgcgcgagttctcttccgccgccaagggggagacactcgaagataccataagaaccgttgagggttattccgatattattgtactgagacattttgaaagtggagctgcaaggaaagcagcagatactgcaaatattcctgttattaatgcaggtgatggaccagggcaacatccaacccaggctttgttggatgtgtacacaataaagagagaaattggcacactagatggaattaaacttggtttggttggtgaccttgctaatgggaggacagttcgttctctggcttacttgattgctaagtaccagaacattaagatatactttgtatctcctgatgttgttaaaatgaaggatgatatcaagaactacttaaattccaaaggtgttgaatgggaagaaagttcagatttgttggaggtggcatccaagtgtgatgttatttatcaaacacgtattcaaaaagaaagatttggtgagaggattgacctttatgaagctgctcgtggcaagtacatcatggataaaaaggtcttagatgtgctgccaaaacatgctgtcatcatgcatccccttccaaggcttgatgagatcacagtagaagttgatagtgatccaagagctgcatattttaggcaggctaagaatggcctctacataaggatggcattgctcaaacttctgcttgttggtcactgacatttcggctagtgctttagcttgtgctgcgtcaagggattagaaggtattattcttaatataatgatcgaggctgtcttactcacgcaggtcgagtttttagaaacatgtactaataatcagcagcttgtgtcaaaattcaatgttcgctgttgcaggtaataaaagtctgcatccatgcg

SEQ ID NO: 27771 - protein, 364 aa, Zea mays subsp. mays
  peptide (1)..(364): Ceres Seq. ID no. 12409232
  misc_feature (207)..(361): Pfam Name: Pfam Description:  Aspartate/ornithine carbamoyltransferase
  misc_feature (3)..(363): NCBI GI NO: 9453916 NR Description: aspartate carbamoyl transferase
  misc_feature (55)..(363): NCBI GI NO: 3914501 NR Description: Aspartate carbamoyltransferase 3
  misc_feature (55)..(363): NCBI GI NO: 3914503 NR Description: Aspartate carbamoyltransferase 2
  misc_feature (45)..(363): NCBI GI NO: 21535795 NR Description: aspartate carbamoyltransferase [Solanum tuberosum]
  misc_feature (56)..(363): NCBI GI NO: 15231112 NR Description: aspartate carbamoyltransferase precursor
  misc_feature (55)..(363): NCBI GI NO: 3914502 NR Description: Aspartate carbamoyltransferase 1
  misc_feature (56)..(363): NCBI GI NO: 1076293 NR Description: aspartate carbamoyltransferase (EC 2
  misc_feature (56)..(363): NCBI GI NO: 15215706 NR Description: AT3g20330/MQC12_8 [Arabidopsis thaliana]
  misc_feature (97)..(363): NCBI GI NO: 479713 NR Description: aspartate carbamoyltransferase (EC 2
  misc_feature (97)..(363): NCBI GI NO: 397385 NR Description: aspartate carbamoyltransferase
MAAAARAALPRPHLSLFSSSHRSPHLSLTPSSAPRLRSGAATSPALQQHHQVTTRLGDVIEAQQFDRDALNEIFEVAREMEAVERGSHGAPSRVLEGYLMATLFYEPSTRTRLSFEAAMRRLGGEVLTTENAREFSSAAKGETLEDTIRTVEGYSDIIVLRHFESGAARKAADTANIPVINAGDGPGQHPTQALLDVYTIKREIGTLDGIKLGLVGDLANGRTVRSLAYLIAKYQNIKIYFVSPDVVKMKDDIKNYLNSKGVEWEESSDLLEVASKCDVIYQTRIQKERFGERIDLYEAARGKYIMDKKVLDVLPKHAVIMHPLPRLDEITVEVDSDPRAAYFRQAKNGLYIRMALLKLLLVGH

SEQ ID NO: 27772 - protein, 285 aa, Zea mays subsp. mays
  peptide (1)..(285): Ceres Seq. ID no. 12409233
  misc_feature (128)..(282): Pfam Name: Pfam Description:  Aspartate/ornithine carbamoyltransferase
  misc_feature (1)..(284): NCBI GI NO: 9453916 NR Description: aspartate carbamoyl transferase
  misc_feature (1)..(284): NCBI GI NO: 3914501 NR Description: Aspartate carbamoyltransferase 3
  misc_feature (1)..(284): NCBI GI NO: 3914503 NR Description: Aspartate carbamoyltransferase 2
  misc_feature (1)..(284): NCBI GI NO: 21535795 NR Description: aspartate carbamoyltransferase [Solanum tuberosum]
  misc_feature (1)..(284): NCBI GI NO: 15231112 NR Description: aspartate carbamoyltransferase precursor
  misc_feature (1)..(284): NCBI GI NO: 3914502 NR Description: Aspartate carbamoyltransferase 1
  misc_feature (1)..(284): NCBI GI NO: 1076293 NR Description: aspartate carbamoyltransferase (EC 2
  misc_feature (1)..(284): NCBI GI NO: 15215706 NR Description: AT3g20330/MQC12_8 [Arabidopsis thaliana]
  misc_feature (18)..(284): NCBI GI NO: 479713 NR Description: aspartate carbamoyltransferase (EC 2
  misc_feature (18)..(284): NCBI GI NO: 397385 NR Description: aspartate carbamoyltransferase
MEAVERGSHGAPSRVLEGYLMATLFYEPSTRTRLSFEAAMRRLGGEVLTTENAREFSSAAKGETLEDTIRTVEGYSDIIVLRHFESGAARKAADTANIPVINAGDGPGQHPTQALLDVYTIKREIGTLDGIKLGLVGDLANGRTVRSLAYLIAKYQNIKIYFVSPDVVKMKDDIKNYLNSKGVEWEESSDLLEVASKCDVIYQTRIQKERFGERIDLYEAARGKYIMDKKVLDVLPKHAVIMHPLPRLDEITVEVDSDPRAAYFRQAKNGLYIRMALLKLLLVGH

SEQ ID NO: 27773 - protein, 265 aa, Zea mays subsp. mays
  peptide (1)..(265): Ceres Seq. ID no. 12409234
  misc_feature (108)..(262): Pfam Name: Pfam Description:  Aspartate/ornithine carbamoyltransferase
  misc_feature (1)..(264): NCBI GI NO: 9453916 NR Description: aspartate carbamoyl transferase
  misc_feature (1)..(264): NCBI GI NO: 3914501 NR Description: Aspartate carbamoyltransferase 3
  misc_feature (1)..(264): NCBI GI NO: 3914503 NR Description: Aspartate carbamoyltransferase 2
  misc_feature (1)..(264): NCBI GI NO: 21535795 NR Description: aspartate carbamoyltransferase [Solanum tuberosum]
  misc_feature (1)..(264): NCBI GI NO: 15231112 NR Description: aspartate carbamoyltransferase precursor
  misc_feature (1)..(264): NCBI GI NO: 3914502 NR Description: Aspartate carbamoyltransferase 1
  misc_feature (1)..(264): NCBI GI NO: 1076293 NR Description: aspartate carbamoyltransferase (EC 2
  misc_feature (1)..(264): NCBI GI NO: 15215706 NR Description: AT3g20330/MQC12_8 [Arabidopsis thaliana]
  misc_feature (1)..(264): NCBI GI NO: 479713 NR Description: aspartate carbamoyltransferase (EC 2
  misc_feature (1)..(264): NCBI GI NO: 397385 NR Description: aspartate carbamoyltransferase
MATLFYEPSTRTRLSFEAAMRRLGGEVLTTENAREFSSAAKGETLEDTIRTVEGYSDIIVLRHFESGAARKAADTANIPVINAGDGPGQHPTQALLDVYTIKREIGTLDGIKLGLVGDLANGRTVRSLAYLIAKYQNIKIYFVSPDVVKMKDDIKNYLNSKGVEWEESSDLLEVASKCDVIYQTRIQKERFGERIDLYEAARGKYIMDKKVLDVLPKHAVIMHPLPRLDEITVEVDSDPRAAYFRQAKNGLYIRMALLKLLLVGH

SEQ ID NO: 27774 - DNA, 1486 bp, Zea mays subsp. mays
  misc_feature (1)..(1486): Ceres Seq. ID no. 13494425
agaaataggcgcgcgtgccgcctcggccgctcgctcctctggttaatcccccctcgccacgactcgcagccatcccttcacattatccgcgcgcgcgcgagcgagcggacgtagcgtgtgggtagcgtcgccgtgcggacggtctcttggtgccggtgcgggccgcgtgacggtgcgtgtgccgcccgcggggaggaggtcgttcggttggttggccctcggcgacgatggcggtccacggcggagaggcggtctccgtcgcgctcctcttctccctcgctttcttctgcgctcgcctcctgctcgaccgcctcgtctacaagccattagcagtctaccttttcaacaccaaagcttctaagttgatgaataatgaggccaggcaagcaaagattgtcaagttctcagagtccatttggaaacttacctactatgcttctgttcaagcatgggtcctcatgataataaagcaggaaccatggtcattggatatgatgcaatactttgatggctggccgaaccaacccatcgtgtcttcattgatgcttttctatatgtgccagtgtggattttatatctatagcatcggtgctcttgttgcttgggaaacccgcagaaaagattttgctgtaatgatgtctcatcatgtaataacatctactctaattggagtttcatatctgactggatttttccgaattgggaccatcattctcgctcttcatgatgcaagtgatgtgtttcttgagactgccaaattgtgcaaatacacagaaaaagagctgggtgctagcttgttttttggtctcttcgctatctcctggcttctattgcgtctgatttacttcccattttggataatcaaagcctctagctatcattccatcacattcttgaggaagctggatgaattcccaacaactttgtactacatcttgaacacaatgcttctcacattgcttgtattccatatgtactggtggaaactcatatgtttgatgataatgagacagctgaataataaaggacaagttacagacgatgtccgatctgattctgaggatgaggagtgatgggagattcattctttgacatctgcaacgtggcatttcctcgtcaatacttttctatgcctgcttccagaattgattgcttttaatcttggcaagtctcgggaacgtataggaaagtttaatctctgtatattgccttatgatatcaaacatggctagaccgggaatggatctatacatgatgacgggcatagctagcaagcttacttcaaggttccttaaaaaattttggttcacctttatttgatatggggaaagacatgagagggtgtacagctttttcctgaagcttgcagaacccccctctgtaccatgatcaatatacttcacttgtgagtagatttagttctaattgatgataataaattgattcttttgattgggaatgaatctcacctgaaccttgatgatct

SEQ ID NO: 27775 - protein, 281 aa, Zea mays subsp. mays
  peptide (1)..(281): Ceres Seq. ID no. 13494426
  misc_feature (77)..(281): Pfam Name: LAG1 Pfam Description: Longevity-assurance protein
  misc_feature (1)..(281): NCBI GI NO: 34901974 NR Description: unknown protein
  misc_feature (11)..(281): NCBI GI NO: 15230323 NR Description: longevity factor-related protein
  misc_feature (11)..(281): NCBI GI NO: 7658241 NR Description: LAG1 homolog 2 [Arabidopsis thaliana]
  misc_feature (1)..(281): NCBI GI NO: 25518747 NR Description: hypothetical protein F13B4
  misc_feature (1)..(281): NCBI GI NO: 18404559 NR Description: LAG1 homolog 1 [Arabidopsis thaliana]
  misc_feature (7)..(280): NCBI GI NO: 16974114 NR Description: putative resistance protein
  misc_feature (1)..(281): NCBI GI NO: 7688742 NR Description: ASC1 [Lycopersicon esculentum]
  misc_feature (1)..(217): NCBI GI NO: 30683361 NR Description: longevity assurance protein -related
  misc_feature (49)..(281): NCBI GI NO: 27769146 NR Description: Similar to RIKEN cDNA 0610013I17 gene
  misc_feature (45)..(279): NCBI GI NO: 21358551 NR Description: Longevity assurance gene 1 CG3576-PB
MAVHGGEAVSVALLFSLAFFCARLLLDRLVYKPLAVYLFNTKASKLMNNEARQAKIVKFSESIWKLTYYASVQAWVLMIIKQEPWSLDMMQYFDGWPNQPIVSSLMLFYMCQCGFYIYSIGALVAWETRRKDFAVMMSHHVITSTLIGVSYLTGFFRIGTIILALHDASDVFLETAKLCKYTEKELGASLFFGLFAISWLLLRLIYFPFWIIKASSYHSITFLRKLDEFPTTLYYILNTMLLTLLVFHMYWWKLICLMIMRQLNNKGQVTDDVRSDSEDEE

SEQ ID NO: 27776 - protein, 235 aa, Zea mays subsp. mays
  peptide (1)..(235): Ceres Seq. ID no. 13494427
  misc_feature (31)..(235): Pfam Name: LAG1 Pfam Description: Longevity-assurance protein
  misc_feature (1)..(235): NCBI GI NO: 34901974 NR Description: unknown protein
  misc_feature (1)..(235): NCBI GI NO: 15230323 NR Description: longevity factor-related protein
  misc_feature (1)..(235): NCBI GI NO: 7658241 NR Description: LAG1 homolog 2 [Arabidopsis thaliana]
  misc_feature (1)..(235): NCBI GI NO: 25518747 NR Description: hypothetical protein F13B4
  misc_feature (1)..(235): NCBI GI NO: 18404559 NR Description: LAG1 homolog 1 [Arabidopsis thaliana]
  misc_feature (1)..(234): NCBI GI NO: 16974114 NR Description: putative resistance protein
  misc_feature (1)..(235): NCBI GI NO: 7688742 NR Description: ASC1 [Lycopersicon esculentum]
  misc_feature (1)..(171): NCBI GI NO: 30683361 NR Description: longevity assurance protein -related
  misc_feature (3)..(235): NCBI GI NO: 27769146 NR Description: Similar to RIKEN cDNA 0610013I17 gene
  misc_feature (1)..(233): NCBI GI NO: 21358551 NR Description: Longevity assurance gene 1 CG3576-PB
MNNEARQAKIVKFSESIWKLTYYASVQAWVLMIIKQEPWSLDMMQYFDGWPNQPIVSSLMLFYMCQCGFYIYSIGALVAWETRRKDFAVMMSHHVITSTLIGVSYLTGFFRIGTIILALHDASDVFLETAKLCKYTEKELGASLFFGLFAISWLLLRLIYFPFWIIKASSYHSITFLRKLDEFPTTLYYILNTMLLTLLVFHMYWWKLICLMIMRQLNNKGQVTDDVRSDSEDEE

SEQ ID NO: 27777 - protein, 204 aa, Zea mays subsp. mays
  peptide (1)..(204): Ceres Seq. ID no. 13494428
  misc_feature (1)..(204): Pfam Name: LAG1 Pfam Description: Longevity-assurance protein
  misc_feature (1)..(204): NCBI GI NO: 34901974 NR Description: unknown protein
  misc_feature (1)..(204): NCBI GI NO: 15230323 NR Description: longevity factor-related protein
  misc_feature (1)..(204): NCBI GI NO: 7658241 NR Description: LAG1 homolog 2 [Arabidopsis thaliana]
  misc_feature (1)..(204): NCBI GI NO: 25518747 NR Description: hypothetical protein F13B4
  misc_feature (1)..(204): NCBI GI NO: 18404559 NR Description: LAG1 homolog 1 [Arabidopsis thaliana]
  misc_feature (1)..(203): NCBI GI NO: 16974114 NR Description: putative resistance protein
  misc_feature (1)..(204): NCBI GI NO: 7688742 NR Description: ASC1 [Lycopersicon esculentum]
  misc_feature (1)..(140): NCBI GI NO: 30683361 NR Description: longevity assurance protein -related
  misc_feature (1)..(204): NCBI GI NO: 27769146 NR Description: Similar to RIKEN cDNA 0610013I17 gene
  misc_feature (1)..(202): NCBI GI NO: 21358551 NR Description: Longevity assurance gene 1 CG3576-PB
MIIKQEPWSLDMMQYFDGWPNQPIVSSLMLFYMCQCGFYIYSIGALVAWETRRKDFAVMMSHHVITSTLIGVSYLTGFFRIGTIILALHDASDVFLETAKLCKYTEKELGASLFFGLFAISWLLLRLIYFPFWIIKASSYHSITFLRKLDEFPTTLYYILNTMLLTLLVFHMYWWKLICLMIMRQLNNKGQVTDDVRSDSEDEE

SEQ ID NO: 27778 - DNA, 1149 bp, Zea mays subsp. mays
  misc_feature (1)..(1149): Ceres Seq. ID no. 12409227
attttttaactcgaccccgccctacctctcgccgtcgaccacaagtccacaacccacaaaatgcacgggaggacccagggcgccgccgtcggcgacatgacccagcgccttctcctcgccctctcgctcatcgcatcagcgaccgccgtgcccgctgtcatccgcacggtcccggacgaccccaccgcgggctcctctggcgcggcagacgccgcggacgcgctcttctgtgacagctggaggctgtcggtggagacggccaacgcgggcccctggagcgccgtgccctcgcgctgtggggctttcgtgcgggactacatggagggacctcgctacgcgtctgactccgccgtcgccgacgccgacgccctagccttcgcctccgaagccctggccgccgccgagtggggcggctcggcgagcgcgaggcctgcgtgggtgttcgacgtcgacgagacgctgctctctaacgcgccgtactacgcggtcaacggatggggatcacaggaattcaatgagacctcatttgatgaatgggtagatgctgcaaaggcaccaacattaccatcgagcttgaatttgtacaatcaacttcagggacttggtttccatgttatcctattgactggccggagtgaattccaacgtaatgccacagaattgaatcttttgtttgctggctacaactcatgggaaaaactcatactgaggcaaccttatgatattggcaagaacgctgtgcagtacaaatcagagagacgagcagcaatggaagcggaaggtttcaagatacttgggaactcaggggatcagtggagtgatttgataggatcgcccatggcaacgagatccttcaagctaccaaacccaatgtacttcatcagctgattttattgttagagcagtggacgaaggagcaggttttcatagggtgttcatatggtcccggtgtgaaactgcttttgttagacatccctcgggacataaatttagatttttatcttcaagcatgttgaaattcaactgaggcttgggtccgtcgaatctgccctatgatgatctgtaattacacacttcttttcccacactactggaagcatttgtggtaaggctaaaaaaaaaaaaaaaaaaatcaagaactcgcacgag

SEQ ID NO: 27779 - protein, 275 aa, Zea mays subsp. mays
  peptide (1)..(275): Ceres Seq. ID no. 12409228
  misc_feature (56)..(274): Pfam Name: Acid phosphatase Pfam Description: HAD superfamily, subfamily IIIB
  misc_feature (56)..(274): NCBI GI NO: 15233504 NR Description: acid phosphatase-like protein
  misc_feature (53)..(274): NCBI GI NO: 130718 NR Description: Acid phosphatase precursor 1
  misc_feature (53)..(274): NCBI GI NO: 445113 NR Description: acid phosphatase 1
  misc_feature (19)..(275): NCBI GI NO: 15233526 NR Description: acid phosphatase-like protein
  misc_feature (57)..(275): NCBI GI NO: 7442053 NR Description: acid phosphatase (EC 3.1.3.-) - soybean
  misc_feature (18)..(274): NCBI GI NO: 15241412 NR Description: acid phosphatase; protein id: At5g51260.1
  misc_feature (55)..(274): NCBI GI NO: 15234949 NR Description: acid phosphatase - like protein
  misc_feature (19)..(273): NCBI GI NO: 2627233 NR Description: pod storage protein [Phaseolus vulgaris]
  misc_feature (19)..(273): NCBI GI NO: 7442055 NR Description: pod storage protein - kidney bean
  misc_feature (13)..(275): NCBI GI NO: 16506634 NR Description: putative defense associated acid phosphatase
MHGRTQGAAVGDMTQRLLLALSLIASATAVPAVIRTVPDDPTAGSSGAADAADALFCDSWRLSVETANAGPWSAVPSRCGAFVRDYMEGPRYASDSAVADADALAFASEALAAAEWGGSASARPAWVFDVDETLLSNAPYYAVNGWGSQEFNETSFDEWVDAAKAPTLPSSLNLYNQLQGLGFHVILLTGRSEFQRNATELNLLFAGYNSWEKLILRQPYDIGKNAVQYKSERRAAMEAEGFKILGNSGDQWSDLIGSPMATRSFKLPNPMYFIS

SEQ ID NO: 27780 - protein, 263 aa, Zea mays subsp. mays
  peptide (1)..(263): Ceres Seq. ID no. 12409229
  misc_feature (44)..(262): Pfam Name: Acid phosphatase Pfam Description: HAD superfamily, subfamily IIIB
  misc_feature (44)..(262): NCBI GI NO: 15233504 NR Description: acid phosphatase-like protein
  misc_feature (41)..(262): NCBI GI NO: 130718 NR Description: Acid phosphatase precursor 1
  misc_feature (41)..(262): NCBI GI NO: 445113 NR Description: acid phosphatase 1
  misc_feature (7)..(263): NCBI GI NO: 15233526 NR Description: acid phosphatase-like protein
  misc_feature (45)..(263): NCBI GI NO: 7442053 NR Description: acid phosphatase (EC 3.1.3.-) - soybean
  misc_feature (6)..(262): NCBI GI NO: 15241412 NR Description: acid phosphatase; protein id: At5g51260.1
  misc_feature (43)..(262): NCBI GI NO: 15234949 NR Description: acid phosphatase - like protein
  misc_feature (7)..(261): NCBI GI NO: 2627233 NR Description: pod storage protein [Phaseolus vulgaris]
  misc_feature (7)..(261): NCBI GI NO: 7442055 NR Description: pod storage protein - kidney bean
  misc_feature (1)..(263): NCBI GI NO: 16506634 NR Description: putative defense associated acid phosphatase
MTQRLLLALSLIASATAVPAVIRTVPDDPTAGSSGAADAADALFCDSWRLSVETANAGPWSAVPSRCGAFVRDYMEGPRYASDSAVADADALAFASEALAAAEWGGSASARPAWVFDVDETLLSNAPYYAVNGWGSQEFNETSFDEWVDAAKAPTLPSSLNLYNQLQGLGFHVILLTGRSEFQRNATELNLLFAGYNSWEKLILRQPYDIGKNAVQYKSERRAAMEAEGFKILGNSGDQWSDLIGSPMATRSFKLPNPMYFIS

SEQ ID NO: 27781 - protein, 189 aa, Zea mays subsp. mays
  peptide (1)..(189): Ceres Seq. ID no. 12409230
  misc_feature (1)..(188): Pfam Name: Acid phosphatase Pfam Description: HAD superfamily, subfamily IIIB
  misc_feature (1)..(188): NCBI GI NO: 15233504 NR Description: acid phosphatase-like protein
  misc_feature (1)..(188): NCBI GI NO: 130718 NR Description: Acid phosphatase precursor 1
  misc_feature (1)..(188): NCBI GI NO: 445113 NR Description: acid phosphatase 1
  misc_feature (1)..(189): NCBI GI NO: 15233526 NR Description: acid phosphatase-like protein
  misc_feature (1)..(189): NCBI GI NO: 7442053 NR Description: acid phosphatase (EC 3.1.3.-) - soybean
  misc_feature (1)..(188): NCBI GI NO: 15241412 NR Description: acid phosphatase; protein id: At5g51260.1
  misc_feature (1)..(188): NCBI GI NO: 15234949 NR Description: acid phosphatase - like protein
  misc_feature (1)..(187): NCBI GI NO: 2627233 NR Description: pod storage protein [Phaseolus vulgaris]
  misc_feature (1)..(187): NCBI GI NO: 7442055 NR Description: pod storage protein - kidney bean
  misc_feature (1)..(189): NCBI GI NO: 16506634 NR Description: putative defense associated acid phosphatase
MEGPRYASDSAVADADALAFASEALAAAEWGGSASARPAWVFDVDETLLSNAPYYAVNGWGSQEFNETSFDEWVDAAKAPTLPSSLNLYNQLQGLGFHVILLTGRSEFQRNATELNLLFAGYNSWEKLILRQPYDIGKNAVQYKSERRAAMEAEGFKILGNSGDQWSDLIGSPMATRSFKLPNPMYFIS

SEQ ID NO: 27782 - DNA, 1268 bp, Zea mays subsp. mays
  misc_feature (1)..(1268): Ceres Seq. ID no. 12407255
acctgcacgctggccccccgccccgccgcgggatcaaatacgccgcctccgcccgtccactccctcgccgcccccgtctcctctcctctcctctcccccgcatccacggccgcaggccgcagccagccactcgacgatctagtcgtctctctctccccgctctgccgcctcgctgccgcggcttcccgtcggctggaggatgaaggtcacggtcgtgtcccggagcggccgggaggtcgtcaagggcggcatcgacctcaaggactcggccaaggtcgcggacctgcaggaggccatccatgccaggactaagaagtattatccttctaggcagcggctcaccctcccccttcaacctggaaaaggcgggaagccagttgtcctcagtccgaaggccagcctgctagaatactgcgagaagggttctgggtcactgacagtggtcttcaaagatttagggccacaggtctactacagcacactgttcttcttcgagtacctgggtcctctcatcatctaccccatgttctactatctgcctgtctacaaatacttcgggtacgagggggagcgggccatgcaccctgtccagacctacgccatgtactactggtgcttccactacttcaagcggatcatggagacattcttcgtgcaccgcttcagccacgcgacgtcgccgctctcgaacgtcttcaggaactgtgcctactactggaccttcggcgcctacattgcttactactgcaaccacccgctgtacaccccagtgagtgatctgcagatgaagattgggtttggttttggggtcgtctgccaggtcgcgaacttctactgccacatcctgctgcggaacctcaggagcccaagcggcagcggcgggtaccagatcccccgcggtttcttgttcaacatcgtgacctgcgccaattataccaccgagatctatcagtgggtcggcttcaacatcgccacgcagaccgtggcaggttacgtcttccttgtcgtggcggcaggcatcatgaccaactgggcgctcggcaagcacagccgtctgaagaagctgtttgacggcaaggatgggaggcccaagtaccctcgccggtgggtgattctccctccgttcctgtgaagaggtggtggtggtcggcctattgtgattcgatgtctacagacagttgtactgtactaatcgtgcctgtttagcggttgaacttggattccgttgtccgaaatttctaatccgaaagatggatttcattgtcttc

SEQ ID NO: 27783 - protein, 310 aa, Zea mays subsp. mays; identical to SEQ ID NO: 24079
  peptide (1)..(310): Ceres Seq. ID no. 12407256
  misc_feature (158)..(310): Pfam Name: Pfam Description:  3-oxo-5-alpha-steroid 4-dehydrogenase
  misc_feature (1)..(310): NCBI GI NO: 34895848 NR Description: putative glycoprotein
  misc_feature (1)..(310): NCBI GI NO: 15233250 NR Description: synaptic glycoprotein SC2-like protein
  misc_feature (1)..(310): NCBI GI NO: 25004880 NR Description: steroid 5-alpha reductase [Cicer arietinum]
  misc_feature (38)..(310): NCBI GI NO: 39590267 NR Description: Hypothetical protein CBG11196
  misc_feature (38)..(310): NCBI GI NO: 17531783 NR Description: Synaptic glycoprotein SC2 (35.1 kD)
  misc_feature (24)..(291): NCBI GI NO: 13111809 NR Description: Unknown (protein for IMAGE:2901253) [Homo sapiens]
  misc_feature (24)..(291): NCBI GI NO: 24475816 NR Description: glycoprotein, synaptic 2
  misc_feature (24)..(291): NCBI GI NO: 30585427 NR Description: Homo sapiens glycoprotein, synaptic 2
  misc_feature (24)..(310): NCBI GI NO: 33585860 NR Description: Glycoprotein, synaptic 2 [Xenopus laevis]
  misc_feature (20)..(291): NCBI GI NO: 19924091 NR Description: synaptic glycoprotein SC2 [Rattus norvegicus]

SEQ ID NO: 27784 - protein, 202 aa, Zea mays subsp. mays; identical to SEQ ID NO: 24080
  peptide (1)..(202): Ceres Seq. ID no. 12407257
  misc_feature (50)..(202): Pfam Name: Pfam Description:  3-oxo-5-alpha-steroid 4-dehydrogenase
  misc_feature (1)..(202): NCBI GI NO: 34895848 NR Description: putative glycoprotein
  misc_feature (1)..(202): NCBI GI NO: 15233250 NR Description: synaptic glycoprotein SC2-like protein
  misc_feature (1)..(202): NCBI GI NO: 25004880 NR Description: steroid 5-alpha reductase [Cicer arietinum]
  misc_feature (1)..(202): NCBI GI NO: 39590267 NR Description: Hypothetical protein CBG11196
  misc_feature (1)..(202): NCBI GI NO: 17531783 NR Description: Synaptic glycoprotein SC2 (35.1 kD)
  misc_feature (1)..(183): NCBI GI NO: 13111809 NR Description: Unknown (protein for IMAGE:2901253) [Homo sapiens]
  misc_feature (1)..(183): NCBI GI NO: 24475816 NR Description: glycoprotein, synaptic 2
  misc_feature (1)..(183): NCBI GI NO: 30585427 NR Description: Homo sapiens glycoprotein, synaptic 2
  misc_feature (1)..(202): NCBI GI NO: 33585860 NR Description: Glycoprotein, synaptic 2 [Xenopus laevis]
  misc_feature (1)..(183): NCBI GI NO: 19924091 NR Description: synaptic glycoprotein SC2 [Rattus norvegicus]

SEQ ID NO: 27785 - protein, 184 aa, Zea mays subsp. mays; identical to SEQ ID NO: 24081
  peptide (1)..(184): Ceres Seq. ID no. 12407258
  misc_feature (32)..(184): Pfam Name: Pfam Description:  3-oxo-5-alpha-steroid 4-dehydrogenase
  misc_feature (1)..(184): NCBI GI NO: 34895848 NR Description: putative glycoprotein
  misc_feature (1)..(184): NCBI GI NO: 15233250 NR Description: synaptic glycoprotein SC2-like protein
  misc_feature (1)..(184): NCBI GI NO: 25004880 NR Description: steroid 5-alpha reductase [Cicer arietinum]
  misc_feature (1)..(184): NCBI GI NO: 39590267 NR Description: Hypothetical protein CBG11196
  misc_feature (1)..(184): NCBI GI NO: 17531783 NR Description: Synaptic glycoprotein SC2 (35.1 kD)
  misc_feature (1)..(165): NCBI GI NO: 13111809 NR Description: Unknown (protein for IMAGE:2901253) [Homo sapiens]
  misc_feature (1)..(165): NCBI GI NO: 24475816 NR Description: glycoprotein, synaptic 2
  misc_feature (1)..(165): NCBI GI NO: 30585427 NR Description: Homo sapiens glycoprotein, synaptic 2
  misc_feature (1)..(184): NCBI GI NO: 33585860 NR Description: Glycoprotein, synaptic 2 [Xenopus laevis]
  misc_feature (1)..(165): NCBI GI NO: 19924091 NR Description: synaptic glycoprotein SC2 [Rattus norvegicus]

SEQ ID NO: 27786 - DNA, 1010 bp, Zea mays subsp. mays
  misc_feature (1)..(1010): Ceres Seq. ID no. 12353858
agaaatcagcccgccgtgtcgtgcctactctctccttcccccaaaataaaagaagcgattttgaacggctccgctagctaaagcagggcaaggcggccggaaggcaggaaatccgtacgcacgccgaggtcgaggtcgaggtctcagcagggaggatggagacggagcagcagggcgtggttgcggcggtgaagccgacgctggccaaggggacgccgtcggcgtcgttccggctccgcaacgggagcctaaacgcggtgcgcctccgccgcgtgttcgacctgttcgaccgcaacggggacggcgagatcacggtggacgagctggcgcaggcgctggacgcgctgggcctagacgcggaccgcggcgggctggccgccaccgttggcacctacgtgcccgacggcgccgcaggcctccgctttgaggacttcgaccggctgcaccgcgcgctcggggacgccttcttcggagcgctggcgggccaggacgacgcggccgcggacggcgccggcgccggggaggacgacgacgagcaggagatgcgggaggcgttcagggtcttcgacgtcgacggcgacggcttcatctctgccgccgagctgcaggaggtgctcaagaagctcggcctccccgaggccagcagcatggccaacgtccgggagatgatctgcaacgtcgaccgcgacagcgacggccgcgtcgacttcgccgagttcaagtgcatgatgcaggggatcaccgtctggggcgcctgatcgatcccatcgtcgtcggagcggacgagagtgtgtgtgtgtgtgtcgaggagcgggggcgaggcaaattgaaccacaaagctccgtatttccttcctcgagacagcgatgcgactgcgaccttcattcttgtcttgtcttgtggtggcaccggtgtgtctctacttgtgtgtgctcttcttttaaattcattaattattaatcttgtcgtctttcgctggtcaagcagaggcgatgagaatggttcatgct

SEQ ID NO: 27787 - protein, 200 aa, Zea mays subsp. mays
  peptide (1)..(200): Ceres Seq. ID no. 12353859
  misc_feature (36)..(64): Pfam Name: Pfam Description:  EF hand
  misc_feature (1)..(200): NCBI GI NO: 33146667 NR Description: putative Avr9/Cf-9 rapidly elicited protein 31
  misc_feature (1)..(199): NCBI GI NO: 29467539 NR Description: P0665F09.7
  misc_feature (10)..(200): NCBI GI NO: 13194672 NR Description: calmodulin-like protein [Pennisetum ciliare]
  misc_feature (22)..(197): NCBI GI NO: 15233402 NR Description: calcium-binding protein - like
  misc_feature (4)..(197): NCBI GI NO: 12003380 NR Description: Avr9/Cf-9 rapidly elicited protein 31
  misc_feature (22)..(197): NCBI GI NO: 15241500 NR Description: calmodulin-like protein; protein id: At5g44460.1
  misc_feature (18)..(197): NCBI GI NO: 1168782 NR Description: Calcium-binding protein CAST
  misc_feature (22)..(197): NCBI GI NO: 1168696 NR Description: Calcium-binding allergen Bet v 3 (Bet v III)
  misc_feature (19)..(194): NCBI GI NO: 21740787 NR Description: OSJNBb0091E11.1
  misc_feature (123)..(194): NCBI GI NO: 28301674 NR Description: calcium-binding protein [Lotus japonicus]
METEQQGVVAAVKPTLAKGTPSASFRLRNGSLNAVRLRRVFDLFDRNGDGEITVDELAQALDALGLDADRGGLAATVGTYVPDGAAGLRFEDFDRLHRALGDAFFGALAGQDDAAADGAGAGEDDDEQEMREAFRVFDVDGDGFISAAELQEVLKKLGLPEASSMANVREMICNVDRDSDGRVDFAEFKCMMQGITVWGA

SEQ ID NO: 27788 - DNA, 1017 bp, Zea mays subsp. mays
  misc_feature (1)..(1017): Ceres Seq. ID no. 12349105
gtccagggtagagagagagagggatggtgtgagggagggaagggagcaaaggcaaagcagccaacgaccagagagacacggaggctgagagagagagagagagagagatttgggaatcgagaaagcagcgaggaagaagaagatggagcaggaggaagcgtgcacctcgtcgctgcggcagtgcaggatttgccacgacgaggaggacgagcggcgctccgccatggagtcgccctgcgcctgttccggctccctcaagtacgctcacaggggatgcgtgcagaggtggtgcgacgagaagggaagcgccgtctgcgagatttgcctccagaactttgagccgggctacaccgttcctcccaagaaaacccaacctgctgatgtcgcggtgaccatcagagacagcgtgggggtgcccaggccgcagcacgagcctgaagaggaggagcaggagcaggtggacgcggcgttgatcggaggcagcgacccggagtacgccgagtgcgcgcgcgccgccggcaggagcgcgtcctggtgccggtcggtggccgtcacgttcacggtcgtcctgctgctgaggcacctggtcaccgtggtcacggtcggagcggccaaccagttcgccttcggtctcctcacggtatacttgctgcgggcgagcgggatcctgcttccgttctacctcgtcatgaggctcatctccgtgatccagcaggggcagaggcagtaccgcctccggctgctccaggagcagaggaggcacgcgttgaggtcggcccggctgcacggccaggaacaggaacagcatgtcatcctggttcgctgaggaacgagccattcattcaccttggtgtccatacattccattcatccgtcgtacgcgtacaaggttgtaagatgtaccactccatttttttgttcaggcctttacaagcctaaaaaaagcttatatgtaccaccacttcatttgtaaaccctcaaaatttgttgctgagaagatcgacatatcatgtatag

SEQ ID NO: 27789 - protein, 227 aa, Zea mays subsp. mays
  peptide (1)..(227): Ceres Seq. ID no. 12349106
  misc_feature (14)..(61): Pfam Name: RING finger Pfam Description: Zinc finger, C3HC4 type
  misc_feature (1)..(227): NCBI GI NO: 34905532 NR Description: B1146F03.23
  misc_feature (9)..(223): NCBI GI NO: 25518349 NR Description: hypothetical protein T14P4
  misc_feature (13)..(227): NCBI GI NO: 15227065 NR Description: unknown protein; protein id: At2g02960
  misc_feature (11)..(223): NCBI GI NO: 18411826 NR Description: Expressed protein; protein id: At4g02075
  misc_feature (10)..(194): NCBI GI NO: 22325409 NR Description: similar to nucleoside triphosphatase, putative
  misc_feature (1)..(195): NCBI GI NO: 18424590 NR Description: expressed protein; protein id: At5g62460
  misc_feature (2)..(198): NCBI GI NO: 30692888 NR Description: expressed protein [Arabidopsis thaliana]
  misc_feature (2)..(195): NCBI GI NO: 15232824 NR Description: putative protein; protein id: At3g47550.1
  misc_feature (2)..(224): NCBI GI NO: 15223693 NR Description: nucleoside triphosphatase, putative
  misc_feature (2)..(224): NCBI GI NO: 26451292 NR Description: unknown protein [Arabidopsis thaliana]
MEQEEACTSSLRQCRICHDEEDERRSAMESPCACSGSLKYAHRGCVQRWCDEKGSAVCEICLQNFEPGYTVPPKKTQPADVAVTIRDSVGVPRPQHEPEEEEQEQVDAALIGGSDPEYAECARAAGRSASWCRSVAVTFTVVLLLRHLVTVVTVGAANQFAFGLLTVYLLRASGILLPFYLVMRLISVIQQGQRQYRLRLLQEQRRHALRSARLHGQEQEQHVILVR

SEQ ID NO: 27790 - protein, 200 aa, Zea mays subsp. mays
  peptide (1)..(200): Ceres Seq. ID no. 12349107
  misc_feature (1)..(34): Pfam Name: RING finger Pfam Description: Zinc finger, C3HC4 type
  misc_feature (1)..(200): NCBI GI NO: 34905532 NR Description: B1146F03.23
  misc_feature (1)..(196): NCBI GI NO: 25518349 NR Description: hypothetical protein T14P4
  misc_feature (1)..(200): NCBI GI NO: 15227065 NR Description: unknown protein; protein id: At2g02960
  misc_feature (1)..(196): NCBI GI NO: 18411826 NR Description: Expressed protein; protein id: At4g02075
  misc_feature (1)..(167): NCBI GI NO: 22325409 NR Description: similar to nucleoside triphosphatase, putative
  misc_feature (1)..(168): NCBI GI NO: 18424590 NR Description: expressed protein; protein id: At5g62460
  misc_feature (1)..(171): NCBI GI NO: 30692888 NR Description: expressed protein [Arabidopsis thaliana]
  misc_feature (1)..(168): NCBI GI NO: 15232824 NR Description: putative protein; protein id: At3g47550.1
  misc_feature (1)..(197): NCBI GI NO: 15223693 NR Description: nucleoside triphosphatase, putative
  misc_feature (1)..(197): NCBI GI NO: 26451292 NR Description: unknown protein [Arabidopsis thaliana]
MESPCACSGSLKYAHRGCVQRWCDEKGSAVCEICLQNFEPGYTVPPKKTQPADVAVTIRDSVGVPRPQHEPEEEEQEQVDAALIGGSDPEYAECARAAGRSASWCRSVAVTFTVVLLLRHLVTVVTVGAANQFAFGLLTVYLLRASGILLPFYLVMRLISVIQQGQRQYRLRLLQEQRRHALRSARLHGQEQEQHVILVR

SEQ ID NO: 27791 - DNA, 1250 bp, Zea mays subsp. mays
  misc_feature (1)..(1250): Ceres Seq. ID no. 12365550
ggaacagcctcgttctgtccaagtccaactccaacgaggcaacgactcgtcagtggtcagtacactacaccgtaaccgtcgccggaatcgatcgacccaaagctccctttagagcccgagctctatccaacccacgaacgggatcccgatgcccgtggcggcctcggttctcgccgcagcggcggtctcgcccccgctgacgtggcggagatggactcctcttctcgccgcgtcacatccacaggcgaacccgcctcccgcactgcgcccgcgggcgcccgctcctcctctccgggcctcctccgttccccgcgattcctgcgccggagccgccgtccggaggacgccgtgtgcggcggcggcggcacttggtggatgtgtgaaggcggagtccacggagcgggaggcgctcgatcgggatgctctgaagcgggtggcgctactcgcgcttggctgctgcgctgcagccgccgcgctcggctgcggcgctgcagccgccgcgctcggctgcggcgcggcgcgggcagcggcggaggactccatcaaggcgtcaggattcgggctgcgggtggcggagtcgctgcggaggctcggatggcccgacgacaccgtcgtgttcgcgctcgcgacgctgccggtgatcgagctgcggggggcgatccccgttgggtattggctgcggctccatccagtccgcctcaccatcctatccgttcttgggaacatggtgcctgtaccattcatcatcctctacctgaagaaactcgcaacgtttctgtctcagaacagcgcgtccgcgactcgaattatggacctcctctttgagcgggcacggcgcaaggctgctcctgttgaggaattccagtggctcggcttgatgctgttcgttgccgttccattcccaggcacgggagcgtggacatgggccttcattgcatctgtactaggcatgccgttctggtcaggttttacagcaaatttcgtgggagtcgtccttgcagggctgctggtgaacttgctcatgaatcttggcctgaaatacgcgatcgtcactggagtagttttgttctttgtctcaaccgtcatgtggagtgttcttcgttcccttaagaagtccgttaatgtcaagtgatctagtagtctttatcaaactgttcctaatcccttcagagttcagccttgcgtaggaagcttagttgtgtaattttaagtggaactttcagcttccaagtggatttacaagagagagt

SEQ ID NO: 27792 - protein, 327 aa, Zea mays subsp. mays
  peptide (1)..(327): Ceres Seq. ID no. 12365551
  misc_feature (4)..(327): NCBI GI NO: 34897152 NR Description: unknown protein
  misc_feature (122)..(324): NCBI GI NO: 15227004 NR Description: putative transport protein; protein id:At2g02590
  misc_feature (162)..(296): NCBI GI NO: 11499286 NR Description: small multidrug export protein (qacE)
  misc_feature (151)..(303): NCBI GI NO: 21227925 NR Description: putative small multi-drug export protein
  misc_feature (156)..(288): NCBI GI NO: 28212098 NR Description: putative small multi-drug export protein
  misc_feature (162)..(290): NCBI GI NO: 15613797 NR Description: small multidrug export related protein
  misc_feature (151)..(303): NCBI GI NO: 23052254 NR Description: hypothetical protein [Methanosarcina barkeri]
  misc_feature (155)..(295): NCBI GI NO: 22537969 NR Description: conserved hypothetical protein
  misc_feature (156)..(296): NCBI GI NO: 18978147 NR Description: putative small multidrug export protein; (qacE)
  misc_feature (156)..(287): NCBI GI NO: 14591427 NR Description: hypothetical protein [Pyrococcus horikoshii]
MPVAASVLAAAAVSPPLTWRRWTPLLAASHPQANPPPALRPRAPAPPLRASSVPRDSCAGAAVRRTPCAAAAALGGCVKAESTEREALDRDALKRVALLALGCCAAAAALGCGAAAAALGCGAARAAAEDSIKASGFGLRVAESLRRLGWPDDTVVFALATLPVIELRGAIPVGYWLRLHPVRLTILSVLGNMVPVPFIILYLKKLATFLSQNSASATRIMDLLFERARRKAAPVEEFQWLGLMLFVAVPFPGTGAWTWAFIASVLGMPFWSGFTANFVGVVLAGLLVNLLMNLGLKYAIVTGVVLFFVSTVMWSVLRSLKKSVNVK

SEQ ID NO: 27793 - protein, 204 aa, Zea mays subsp. mays
  peptide (1)..(204): Ceres Seq. ID no. 12365552
MDSSSRRVTSTGEPASRTAPAGARSSSPGLLRSPRFLRRSRRPEDAVCGGGGTWWMCEGGVHGAGGARSGCSEAGGATRAWLLRCSRRARLRRCSRRARLRRGAGSGGGLHQGVRIRAAGGGVAAEARMARRHRRVRARDAAGDRAAGGDPRWVLAAAPSSPPHHPIRSWEHGACTIHHPLPEETRNVSVSEQRVRDSNYGPPL

SEQ ID NO: 27794 - DNA, 999 bp, Zea mays subsp. mays
  misc_feature (1)..(999): Ceres Seq. ID no. 12342921
aagaaaaaccctacgtgtcacaagcctccgcctcttctcccgtttgcgacgactgggtgggctacgccgccgccgccgccgctgccgctgctctacggtgctgagtcctttgccgatttcttcccggcgaagagcgccaccagccttttgcataaatcatcgggtatacatccatcttcatttagtagatccgcccctgctgaaaacgcactcgatggcgtccgcgacggggggttcctcctcggagatggcggtggaccacgcgacggggctgggcaccgtggagaagccgcggtttgatgctctgatgccgagtgagatgagcggcgggaggacccagttccggaaagtgaccgtgccgcagcaccggttcgcgccgctcaagcgatgctggatggaaatctacacacccgtttacgagcacatgaagatcgacatacgcatgaatctcaaggcgaggagggtggagctaaagacaaggcaagacacaccagatgtcagcaaccttcagaaatgtgctgactttgtgcatgcttttatgctcgggttcgacattgctgatgccgtcgccttgctgcgtcttgatgatctgtatgtggattcctttgagatcaaggacgtgaagaccttgcgaggggagcatctgtcgcgcgctattggccgcttatcagggaaaggaggcaagaccaagtacgccattgagaactcaaccaggacccgcatcgtcatcgctgatacaaagatccacatacttggatccttcgttaacatcaaggtcgcgcgggattcactttgcagtctcatcttgggttctcctgctggcaaagtgtattctaaactaagggctgtatcagctaggttggcggaaaggtattaaattaaatggggtttgcccgcaccgtataagggcatgttcggttcccctcaattcatatggattggagggatttgagtgggattaattccatatcaagtcaaaattcttcataatttttttcc

SEQ ID NO: 27795 - protein, 291 aa, Zea mays subsp. mays
  peptide (1)..(291): Ceres Seq. ID no. 12342922
  misc_feature (72)..(197): NCBI GI NO: 33669476 NR Description: partner of Nob1 [Sorghum bicolor]
  misc_feature (199)..(291): NCBI GI NO: 33669476 NR Description: partner of Nob1 [Sorghum bicolor]
  misc_feature (83)..(291): NCBI GI NO: 34902190 NR Description: Hypothetical protein
  misc_feature (73)..(291): NCBI GI NO: 34908792 NR Description: P0415A04.33
  misc_feature (80)..(289): NCBI GI NO: 18399930 NR Description: expressed protein; protein id: At3g13230
  misc_feature (63)..(290): NCBI GI NO: 20129085 NR Description: CG11738-PA [Drosophila melanogaster]
  misc_feature (79)..(291): NCBI GI NO: 33989460 NR Description: Unknown (protein for MGC:65782) [Danio rerio]
  misc_feature (95)..(291): NCBI GI NO: 27503881 NR Description: Similar to putatative 28 kDa protein
  misc_feature (71)..(291): NCBI GI NO: 40018534 NR Description: putatative 28 kDa protein; partner of Nob1
  misc_feature (73)..(291): NCBI GI NO: 10047140 NR Description: putatative 28 kDa protein [Homo sapiens]
RKTLRVTSLRLFSRLRRLGGLRRRRRRCRCSTVLSPLPISSRRRAPPAFCINHRVYIHLHLVDPPLLKTHSMASATGGSSSEMAVDHATGLGTVEKPRFDALMPSEMSGGRTQFRKVTVPQHRFAPLKRCWMEIYTPVYEHMKIDIRMNLKARRVELKTRQDTPDVSNLQKCADFVHAFMLGFDIADAVALLRLDDLYVDSFEIKDVKTLRGEHLSRAIGRLSGKGGKTKYAIENSTRTRIVIADTKIHILGSFVNIKVARDSLCSLILGSPAGKVYSKLRAVSARLAERY

SEQ ID NO: 27796 - protein, 220 aa, Zea mays subsp. mays
  peptide (1)..(220): Ceres Seq. ID no. 12342923
  misc_feature (1)..(126): NCBI GI NO: 33669476 NR Description: partner of Nob1 [Sorghum bicolor]
  misc_feature (128)..(220): NCBI GI NO: 33669476 NR Description: partner of Nob1 [Sorghum bicolor]
  misc_feature (12)..(220): NCBI GI NO: 34902190 NR Description: Hypothetical protein
  misc_feature (2)..(220): NCBI GI NO: 34908792 NR Description: P0415A04.33
  misc_feature (9)..(218): NCBI GI NO: 18399930 NR Description: expressed protein; protein id: At3g13230
  misc_feature (1)..(219): NCBI GI NO: 20129085 NR Description: CG11738-PA [Drosophila melanogaster]
  misc_feature (8)..(220): NCBI GI NO: 33989460 NR Description: Unknown (protein for MGC:65782) [Danio rerio]
  misc_feature (24)..(220): NCBI GI NO: 27503881 NR Description: Similar to putatative 28 kDa protein
  misc_feature (1)..(220): NCBI GI NO: 40018534 NR Description: putatative 28 kDa protein; partner of Nob1
  misc_feature (2)..(220): NCBI GI NO: 10047140 NR Description: putatative 28 kDa protein [Homo sapiens]
MASATGGSSSEMAVDHATGLGTVEKPRFDALMPSEMSGGRTQFRKVTVPQHRFAPLKRCWMEIYTPVYEHMKIDIRMNLKARRVELKTRQDTPDVSNLQKCADFVHAFMLGFDIADAVALLRLDDLYVDSFEIKDVKTLRGEHLSRAIGRLSGKGGKTKYAIENSTRTRIVIADTKIHILGSFVNIKVARDSLCSLILGSPAGKVYSKLRAVSARLAERY

SEQ ID NO: 27797 - protein, 209 aa, Zea mays subsp. mays
  peptide (1)..(209): Ceres Seq. ID no. 12342924
  misc_feature (1)..(115): NCBI GI NO: 33669476 NR Description: partner of Nob1 [Sorghum bicolor]
  misc_feature (117)..(209): NCBI GI NO: 33669476 NR Description: partner of Nob1 [Sorghum bicolor]
  misc_feature (1)..(209): NCBI GI NO: 34902190 NR Description: Hypothetical protein
  misc_feature (1)..(209): NCBI GI NO: 34908792 NR Description: P0415A04.33
  misc_feature (1)..(207): NCBI GI NO: 18399930 NR Description: expressed protein; protein id: At3g13230
  misc_feature (1)..(208): NCBI GI NO: 20129085 NR Description: CG11738-PA [Drosophila melanogaster]
  misc_feature (1)..(209): NCBI GI NO: 33989460 NR Description: Unknown (protein for MGC:65782) [Danio rerio]
  misc_feature (13)..(209): NCBI GI NO: 27503881 NR Description: Similar to putatative 28 kDa protein
  misc_feature (1)..(209): NCBI GI NO: 40018534 NR Description: putatative 28 kDa protein; partner of Nob1
  misc_feature (1)..(209): NCBI GI NO: 10047140 NR Description: putatative 28 kDa protein [Homo sapiens]
MAVDHATGLGTVEKPRFDALMPSEMSGGRTQFRKVTVPQHRFAPLKRCWMEIYTPVYEHMKIDIRMNLKARRVELKTRQDTPDVSNLQKCADFVHAFMLGFDIADAVALLRLDDLYVDSFEIKDVKTLRGEHLSRAIGRLSGKGGKTKYAIENSTRTRIVIADTKIHILGSFVNIKVARDSLCSLILGSPAGKVYSKLRAVSARLAERY

SEQ ID NO: 27798 - DNA, 1124 bp, Zea mays subsp. mays
  misc_feature (1)..(1124): Ceres Seq. ID no. 12403543
  misc_feature (646)..(646): n is a, c, t, g, unknown, or other
  misc_feature (955)..(955): n is a, c, t, g, unknown, or other
  misc_feature (729)..(729): n is a, c, t, g, unknown, or other
  misc_feature (600)..(600): n is a, c, t, g, unknown, or other
  misc_feature (389)..(389): n is a, c, t, g, unknown, or other
  misc_feature (441)..(441): n is a, c, t, g, unknown, or other
  misc_feature (734)..(734): n is a, c, t, g, unknown, or other
  misc_feature (728)..(728): n is a, c, t, g, unknown, or other
  misc_feature (641)..(641): n is a, c, t, g, unknown, or other
  misc_feature (909)..(909): n is a, c, t, g, unknown, or other
  misc_feature (378)..(378): n is a, c, t, g, unknown, or other
  misc_feature (876)..(876): n is a, c, t, g, unknown, or other
  misc_feature (647)..(647): n is a, c, t, g, unknown, or other
  misc_feature (733)..(733): n is a, c, t, g, unknown, or other
  misc_feature (640)..(640): n is a, c, t, g, unknown, or other
  misc_feature (197)..(197): n is a, c, t, g, unknown, or other
  misc_feature (890)..(890): n is a, c, t, g, unknown, or other
  misc_feature (390)..(390): n is a, c, t, g, unknown, or other
  misc_feature (400)..(400): n is a, c, t, g, unknown, or other
  misc_feature (425)..(425): n is a, c, t, g, unknown, or other
  misc_feature (601)..(601): n is a, c, t, g, unknown, or other
  misc_feature (430)..(430): n is a, c, t, g, unknown, or other
  misc_feature (377)..(377): n is a, c, t, g, unknown, or other
  misc_feature (908)..(908): n is a, c, t, g, unknown, or other
  misc_feature (545)..(545): n is a, c, t, g, unknown, or other
  misc_feature (722)..(722): n is a, c, t, g, unknown, or other
  misc_feature (414)..(414): n is a, c, t, g, unknown, or other
  misc_feature (335)..(335): n is a, c, t, g, unknown, or other
  misc_feature (196)..(196): n is a, c, t, g, unknown, or other
  misc_feature (557)..(557): n is a, c, t, g, unknown, or other
actgttgcagctgcaaaatactgttgcagctgcaatcactagagagaaaatactgtagaagccgcagccgcagtcggattaaagccgcagcgaacaagcccatatatcgccgtcagagccatcaccccgatggatccctgcgcttcgtgctcaggttcagcggaaactgagccgtgagcaccgccgccgccaccanntttgcgtttgcggtgacgacacgacaccaataatggcggcggcaaggacaaggagcctgctcgcggcggcgttcctggcgctggcggcggtgccggcggtgctctgccaggcgccaggccccgcggcggcggcgccgnccaacaagggcccgccgaacgttacggcgatcctggagaagnncgggcagtacnngacgttcatncggctgatgaagtngacgcagcagnacacncagctgaacgnccagctgaacaactcgttcggcagcgggtacacggtgttcgcgcccaccgacagcgccttctccagcctcaagcccggcacgctgaacaagctgtcgcagcagnagcaggtgtcgntggtgcagtaccacgtcctgccgcagttctactcgctcgactnnttcgagaccgccagcaaccccgtgcgtacgcaggcgtcnngctcnnacgggccctacacgctcaacatcaccgccgacagcagcggccaggccaacgtgtccacgggcctcgtcgccaccngcgtcnnccannccctgcgcgcgcagcagcccctcgccgtctactccgtcgaccaggtgctgctggccaacgacctgttcggcgtcaagcccccggcgtccgcgccgcccgccgccaggaagccggccaagggcgggtccgtcgccgaggcgcncgccgccggctcgntgacgcgccgccctccgnncggccgcgcgcggcgccagcaggaccgccggatggagctcgctgcnccgctctgctgttcctggccgccgcggcctccttcctgtccctgttgtgagaatgtaaacatggttcgtgcttgtcgagcacaaaagagctcgtcttcttgcggtttgtttctcttctggagttctagtaacctggatctgtccctgaatgttgatgaagccagctgtt

SEQ ID NO: 27799 - protein, 298 aa, Zea mays subsp. mays
  peptide (1)..(298): Ceres Seq. ID no. 12403544
  misc_feature (45)..(186): Pfam Name: Pfam Description:  Fasciclin domain
  misc_feature (7)..(230): NCBI GI NO: 34910950 NR Description: putative arabinogalactan-like protein
  misc_feature (1)..(220): NCBI GI NO: 2129473 NR Description: arabinogalactan-like protein - loblolly pine
  misc_feature (1)..(219): NCBI GI NO: 15242651 NR Description: fasciclin-like arabinogalactan-protein
  misc_feature (4)..(225): NCBI GI NO: 18379157 NR Description: fasciclin-like arabinogalactan-protein
  misc_feature (1)..(219): NCBI GI NO: 21553523 NR Description: arabinogalactan protein-like
  misc_feature (4)..(225): NCBI GI NO: 24417458 NR Description: unknown [Arabidopsis thaliana]
  misc_feature (1)..(228): NCBI GI NO: 15241423 NR Description: fasciclin-like arabinogalactan-protein, putative
  misc_feature (9)..(222): NCBI GI NO: 5919185 NR Description: arabinogalactan protein Pop14A9
  misc_feature (24)..(215): NCBI GI NO: 30841338 NR Description: arabinogalactan protein [Gossypium hirsutum]
  misc_feature (9)..(208): NCBI GI NO: 15239344 NR Description: fasciclin-like arabinogalactan-protein
  misc_feature (36)..(36): Xaa is any aa, unknown or other
  misc_feature (50)..(50): Xaa is any aa, unknown or other
  misc_feature (54)..(54): Xaa is any aa, unknown or other
  misc_feature (57)..(57): Xaa is any aa, unknown or other
  misc_feature (62)..(62): Xaa is any aa, unknown or other
  misc_feature (66)..(66): Xaa is any aa, unknown or other
  misc_feature (67)..(67): Xaa is any aa, unknown or other
  misc_feature (71)..(71): Xaa is any aa, unknown or other
  misc_feature (106)..(106): Xaa is any aa, unknown or other
  misc_feature (110)..(110): Xaa is any aa, unknown or other
  misc_feature (124)..(124): Xaa is any aa, unknown or other
  misc_feature (137)..(137): Xaa is any aa, unknown or other
  misc_feature (138)..(138): Xaa is any aa, unknown or other
  misc_feature (139)..(139): Xaa is any aa, unknown or other
  misc_feature (140)..(140): Xaa is any aa, unknown or other
  misc_feature (165)..(165): Xaa is any aa, unknown or other
  misc_feature (167)..(167): Xaa is any aa, unknown or other
  misc_feature (168)..(168): Xaa is any aa, unknown or other
  misc_feature (169)..(169): Xaa is any aa, unknown or other
  misc_feature (216)..(216): Xaa is any aa, unknown or other
  misc_feature (221)..(221): Xaa is any aa, unknown or other
  misc_feature (227)..(227): Xaa is any aa, unknown or other
  misc_feature (242)..(242): Xaa is any aa, unknown or other
MAAARTRSLLAAAFLALAAVPAVLCQAPGPAAAAPXNKGPPNVTAILEKXGQYXTFXRLMKXTQQXXQLNXQLNNSFGSGYTVFAPTDSAFSSLKPGTLNKLSQQXQVSXVQYHVLPQFYSLDXFETASNPVRTQAXXXXGPYTLNITADSSGQANVSTGLVATXVXXXLRAQQPLAVYSVDQVLLANDLFGVKPPASAPPAARKPAKGGSVAEAXAAGSXTRRPPXGRARRQQDRRMELAXPLCCSWPPRPPSCPCCENVNMVRACRAQKSSSSCGLFLFWSSSNLDLSLNVDEASC

SEQ ID NO: 27800 - protein, 239 aa, Zea mays subsp. mays
  peptide (1)..(239): Ceres Seq. ID no. 12403545
  misc_feature (1)..(127): Pfam Name: Pfam Description:  Fasciclin domain
  misc_feature (1)..(171): NCBI GI NO: 34910950 NR Description: putative arabinogalactan-like protein
  misc_feature (1)..(161): NCBI GI NO: 2129473 NR Description: arabinogalactan-like protein - loblolly pine
  misc_feature (1)..(160): NCBI GI NO: 15242651 NR Description: fasciclin-like arabinogalactan-protein
  misc_feature (1)..(166): NCBI GI NO: 18379157 NR Description: fasciclin-like arabinogalactan-protein
  misc_feature (1)..(160): NCBI GI NO: 21553523 NR Description: arabinogalactan protein-like
  misc_feature (1)..(166): NCBI GI NO: 24417458 NR Description: unknown [Arabidopsis thaliana]
  misc_feature (1)..(169): NCBI GI NO: 15241423 NR Description: fasciclin-like arabinogalactan-protein, putative
  misc_feature (1)..(163): NCBI GI NO: 5919185 NR Description: arabinogalactan protein Pop14A9
  misc_feature (1)..(156): NCBI GI NO: 30841338 NR Description: arabinogalactan protein [Gossypium hirsutum]
  misc_feature (1)..(149): NCBI GI NO: 15239344 NR Description: fasciclin-like arabinogalactan-protein
  misc_feature (3)..(3): Xaa is any aa, unknown or other
  misc_feature (7)..(7): Xaa is any aa, unknown or other
  misc_feature (8)..(8): Xaa is any aa, unknown or other
  misc_feature (12)..(12): Xaa is any aa, unknown or other
  misc_feature (47)..(47): Xaa is any aa, unknown or other
  misc_feature (51)..(51): Xaa is any aa, unknown or other
  misc_feature (65)..(65): Xaa is any aa, unknown or other
  misc_feature (78)..(78): Xaa is any aa, unknown or other
  misc_feature (79)..(79): Xaa is any aa, unknown or other
  misc_feature (80)..(80): Xaa is any aa, unknown or other
  misc_feature (81)..(81): Xaa is any aa, unknown or other
  misc_feature (106)..(106): Xaa is any aa, unknown or other
  misc_feature (108)..(108): Xaa is any aa, unknown or other
  misc_feature (109)..(109): Xaa is any aa, unknown or other
  misc_feature (110)..(110): Xaa is any aa, unknown or other
  misc_feature (157)..(157): Xaa is any aa, unknown or other
  misc_feature (162)..(162): Xaa is any aa, unknown or other
  misc_feature (168)..(168): Xaa is any aa, unknown or other
  misc_feature (183)..(183): Xaa is any aa, unknown or other
MKXTQQXXQLNXQLNNSFGSGYTVFAPTDSAFSSLKPGTLNKLSQQXQVSXVQYHVLPQFYSLDXFETASNPVRTQAXXXXGPYTLNITADSSGQANVSTGLVATXVXXXLRAQQPLAVYSVDQVLLANDLFGVKPPASAPPAARKPAKGGSVAEAXAAGSXTRRPPXGRARRQQDRRMELAXPLCCSWPPRPPSCPCCENVNMVRACRAQKSSSSCGLFLFWSSSNLDLSLNVDEASC

SEQ ID NO: 27801 - DNA, 667 bp, Zea mays subsp. mays
  misc_feature (1)..(667): Ceres Seq. ID no. 12353842
aatcgtccatccgtatttccgtcacaactcacaacccgagccccccaaacccgaagcagcaggagctcccctgaccttgctccgcctccgatcaaggaaaaggaagatgagctactacggccagcagccccccgtcggcgtcccgccgcagcaaggctacccggggaaggacggctacccgccagcggggtacccgccggccggctaccccccgccggcgcagggctacccgcagcagggttacccacagcagggctacccgccgcagtacgcgcagccgcctccacagcagcagcagagcagcgggccttccttcatggaaggatgcttggctgccctctgctgctgctgcctcctggacgcctgcttctgacggatccatccgtgccgggttcaacacggctgcaagtgaagcaacaagcttacggaagagctggaactgggccgtgctattctagctttgtcctgcgttatcgccctcttttcttttcttttcttttttttttctctctctctctctctctgttataagactactggtactctgtcgatgtcgattggattagactagggctggtgtgtattctgtggatgctccgtgtttctggtgggattcaagttcaaacctgggattattgtatttcttctacctgttactctgttgccg

SEQ ID NO: 27802 - protein, 176 aa, Zea mays subsp. mays
  peptide (1)..(176): Ceres Seq. ID no. 12353843
NRPSVFPSQLTTRAPQTRSSRSSPDLAPPPIKEKEDELLRPAAPRRRPAAARLPGEGRLPASGVPAGRLPPAGAGLPAAGLPTAGLPAAVRAAASTAAAEQRAFLHGRMLGCPLLLLPPGRLLLTDPSVPGSTRLQVKQQAYGRAGTGPCYSSFVLRYRPLFFSFLFFFSLSLSLL

SEQ ID NO: 27803 - protein, 123 aa, Zea mays subsp. mays
  peptide (1)..(123): Ceres Seq. ID no. 12353844
  misc_feature (8)..(103): Pfam Name: Pfam Description:  Extensin-like region
  misc_feature (36)..(123): NCBI GI NO: 34393718 NR Description: adhesive/proline-rich protein homolog-like protein
  misc_feature (36)..(123): NCBI GI NO: 1808688 NR Description: hypothetical protein [Sporobolus stapfianus]
  misc_feature (36)..(123): NCBI GI NO: 40538901 NR Description: expressed protein
  misc_feature (36)..(108): NCBI GI NO: 34901106 NR Description: contains ESTsC24875
  misc_feature (36)..(123): NCBI GI NO: 15227350 NR Description: unknown protein; protein id: At2g41420.1
  misc_feature (38)..(123): NCBI GI NO: 18425209 NR Description: expressed protein; protein id: At5g67600
  misc_feature (38)..(123): NCBI GI NO: 21618167 NR Description: adhesive/proline-rich protein homolog
  misc_feature (16)..(123): NCBI GI NO: 21554421 NR Description: unknown [Arabidopsis thaliana]
  misc_feature (40)..(123): NCBI GI NO: 15229624 NR Description: putative protein; protein id: At3g49840.1
  misc_feature (29)..(105): NCBI GI NO: 15229624 NR Description: putative protein; protein id: At3g49840.1
IVHPYFRHNSQPEPPKPEAAGAPLTLLRLRSRKRKMSYYGQQPPVGVPPQQGYPGKDGYPPAGYPPAGYPPPAQGYPQQGYPQQGYPPQYAQPPPQQQQSSGPSFMEGCLAALCCCCLLDACF

SEQ ID NO: 27804 - protein, 88 aa, Zea mays subsp. mays
  peptide (1)..(88): Ceres Seq. ID no. 12353845
  misc_feature (1)..(68): Pfam Name: Pfam Description:  Extensin-like region
  misc_feature (1)..(88): NCBI GI NO: 34393718 NR Description: adhesive/proline-rich protein homolog-like protein
  misc_feature (1)..(88): NCBI GI NO: 1808688 NR Description: hypothetical protein [Sporobolus stapfianus]
  misc_feature (1)..(88): NCBI GI NO: 40538901 NR Description: expressed protein
  misc_feature (1)..(73): NCBI GI NO: 34901106 NR Description: contains ESTsC24875
  misc_feature (1)..(88): NCBI GI NO: 15227350 NR Description: unknown protein; protein id: At2g41420.1
  misc_feature (3)..(88): NCBI GI NO: 18425209 NR Description: expressed protein; protein id: At5g67600
  misc_feature (3)..(88): NCBI GI NO: 21618167 NR Description: adhesive/proline-rich protein homolog
  misc_feature (1)..(88): NCBI GI NO: 21554421 NR Description: unknown [Arabidopsis thaliana]
  misc_feature (5)..(88): NCBI GI NO: 15229624 NR Description: putative protein; protein id: At3g49840.1
  misc_feature (1)..(70): NCBI GI NO: 15229624 NR Description: putative protein; protein id: At3g49840.1
MSYYGQQPPVGVPPQQGYPGKDGYPPAGYPPAGYPPPAQGYPQQGYPQQGYPPQYAQPPPQQQQSSGPSFMEGCLAALCCCCLLDACF

SEQ ID NO: 27805 - DNA, 1341 bp, Zea mays subsp. mays
  misc_feature (1)..(1341): Ceres Seq. ID no. 12356334
atccctcccaactccagcgccgctaggggtcaaatcgaaaaatggcgttgctgagcccgcgcgtgccgcggctgccgccctccaccttcacctccgttgccggtgcccggtgctttggccctgccgcgaggtgccaggcgacggcggcgggcggcgtggcggccgcggggcccccgtcgtcggagctggaggccatccggtggggcagcgccaagctgcagggcgctcgcgacgagatggaggatgaggtcttgctccgccccggggctccctcctcgatggcttctccttcgccgccgtcttggatggacacgccggcttctccgccgtccagttcctcagggatgagctgtacaaggagtgcgcagctgcgttggacggcggcgcggtgctcagcactaagaatctcgacgctatcacggcctccatccagcgtgccttcgccgctgtcgacgccaagctctccacctggctcgagcaaacggacaaggacgactctggtgctacggccactgtcatgtttctcaggagcgatgtgcttgttgtctcgcacattggggactcttgcttggtgatatcacgtggtggaagatctgaagctttgactggctctcatcgaccgtatgggaacaacaaaacgtcccttgaagaggtcaagaggatcagagcagcaggtggatggattgttgatgggcgcatatgtggagacatatctgtatctcgtgcttttggggacataagatttaagacacaaaagaatgaaatgctggtgaaaggagttaaacaaggaaggtggactgataagttcatctcacgaatacaatttaaagatgatatagtaatctcgtcacctgatgtatctctggtagagcttggaccagacgtggaatttgttctgttggcaatggtctttgggactacataaaaagctctgaagctgtagcttttgtcagagatcaactccgtcagcatggtgatgtccagttggcctgcgaggcacttggtcagaaagctctggatcaacggtcccaagacaatattagcatagtcatagctgacttggggaggacaaactggaaggcgttgcccgatgaaaggccgaacttgttcttgtaactaagtcaagcagtcgcgactgtaggggttgtctcaataggaatttgggtctcgtcgttccttgggttacagtagaactagctactccgtccggatgtgtatattacctactgagtttacatctttctgctagcagtagcagctgcaaaatatatgtatattcgtatatagtgtgtgaattgatagggtaatctgtttgggtaatactgagtgaacgtgtgaagt

SEQ ID NO: 27806 - protein, 177 aa, Zea mays subsp. mays
  peptide (1)..(177): Ceres Seq. ID no. 12356335
  misc_feature (1)..(72): NCBI GI NO: 3643090 NR Description: protein phosphatase-2C; PP2C
  misc_feature (30)..(81): NCBI GI NO: 15234274 NR Description: protein phosphatase homolog
  misc_feature (30)..(81): NCBI GI NO: 7488010 NR Description: phosphoprotein phosphatase homolog T27E11
  misc_feature (30)..(81): NCBI GI NO: 30687733 NR Description: Protein phosphatase 2C PPH1  (PPH1) (PP2C)
  misc_feature (30)..(81): NCBI GI NO: 30687740 NR Description: Protein phosphatase 2C PPH1  (PPH1) (PP2C)
  misc_feature (1)..(76): NCBI GI NO: 34913920 NR Description: putative protein phosphatase-2C
MALLSPRVPRLPPSTFTSVAGARCFGPAARCQATAAGGVAAAGPPSSELEAIRWGSAKLQGARDEMEDEVLLRPGAPSSMASPSPPSWMDTPASPPSSSSGMSCTRSAQLRWTAARCSALRISTLSRPPSSVPSPLSTPSSPPGSSKRTRTTLVLRPLSCFSGAMCLLSRTLGTLAW

SEQ ID NO: 27807 - protein, 135 aa, Zea mays subsp. mays
  peptide (1)..(135): Ceres Seq. ID no. 12356336
  misc_feature (1)..(129): Pfam Name: Pfam Description:  Protein phosphatase 2C
  misc_feature (1)..(129): NCBI GI NO: 3643090 NR Description: protein phosphatase-2C; PP2C
  misc_feature (1)..(129): NCBI GI NO: 15234274 NR Description: protein phosphatase homolog
  misc_feature (1)..(129): NCBI GI NO: 7488010 NR Description: phosphoprotein phosphatase homolog T27E11
  misc_feature (1)..(129): NCBI GI NO: 995839 NR Description: protein phosphatase homolog
  misc_feature (1)..(129): NCBI GI NO: 30687733 NR Description: Protein phosphatase 2C PPH1  (PPH1) (PP2C)
  misc_feature (1)..(129): NCBI GI NO: 30687740 NR Description: Protein phosphatase 2C PPH1  (PPH1) (PP2C)
  misc_feature (1)..(60): NCBI GI NO: 34913920 NR Description: putative protein phosphatase-2C
  misc_feature (1)..(77): NCBI GI NO: 25355102 NR Description: protein T23F11.1
  misc_feature (1)..(77): NCBI GI NO: 17555234 NR Description: Protein phosphatase PP2C, possibly N-myristoylated
  misc_feature (1)..(77): NCBI GI NO: 39591591 NR Description: Hypothetical protein CBG18025
MFLRSDVLVVSHIGDSCLVISRGGRSEALTGSHRPYGNNKTSLEEVKRIRAAGGWIVDGRICGDISVSRAFGDIRFKTQKNEMLVKGVKQGRWTDKFISRIQFKDDIVISSPDVSLVELGPDVEFVLLAMVFGTT

SEQ ID NO: 27808 - protein, 112 aa, Zea mays subsp. mays
  peptide (1)..(112): Ceres Seq. ID no. 12356337
  misc_feature (1)..(16): NCBI GI NO: 15234274 NR Description: protein phosphatase homolog
  misc_feature (1)..(16): NCBI GI NO: 7488010 NR Description: phosphoprotein phosphatase homolog T27E11
  misc_feature (1)..(16): NCBI GI NO: 30687733 NR Description: Protein phosphatase 2C PPH1  (PPH1) (PP2C)
  misc_feature (1)..(16): NCBI GI NO: 30687740 NR Description: Protein phosphatase 2C PPH1  (PPH1) (PP2C)
  misc_feature (1)..(11): NCBI GI NO: 34913920 NR Description: putative protein phosphatase-2C
MEDEVLLRPGAPSSMASPSPPSWMDTPASPPSSSSGMSCTRSAQLRWTAARCSALRISTLSRPPSSVPSPLSTPSSPPGSSKRTRTTLVLRPLSCFSGAMCLLSRTLGTLAW

SEQ ID NO: 27809 - DNA, 867 bp, Zea mays subsp. mays
  misc_feature (1)..(867): Ceres Seq. ID no. 12402556
actcgaagtcgaagccgcagcagctagctagctagcatggccgggaaagagcttacgctgctggggttatgggcgagcccgttcgtgctccgggcgcgcatcgcgctcagcctcaaaggcctcacctacgcatactccgaggagaacctcgacgacaagagcgagcttctcctcagctccaaccccgtgctcaagaaggtgcccgtgctcatccaccacggcaagcccgtctgcgagtcccagatcatcgtgcagtacgtcgacgaggctttccccgccgccgcacctaatttccttccatccgacccctacgaccgcgccattgctcgcttctgggcctcctacgtcgacgacaagttctacagcgcgtggatacccgtgttcaggggcaggacggcggaggagatggcggaggcggcgaggcaggccgtcgcggcgctggagacgctggagcaggcgttcagggagtgctccaaggggaaggccttcttcggaggggacagcgtggggctcgtcgacgtcgtgctcggcggccttgttgggtggctgtacgccaccgaggccatctgcggggtgaaggccctcgacgccggcaggacgccgctgctggcggcgtgggcggagcggttctgcgcgctggagggtgtcaaggggctgatcccggacgtggacaggcttctggagtataccaaggccaggcgggccgtatttggcctgccgccgctccgtccttaggcatagtggacatgtttcttttctttttttttcttttttaaaaaattatatgttctatgtttgtttgaaataaagtactgttatggtgttacacatgtattccaacgtcaactctacgtgctgctatttggc

SEQ ID NO: 27810 - protein, 232 aa, Zea mays subsp. mays
  peptide (1)..(232): Ceres Seq. ID no. 12402557
  misc_feature (4)..(232): NCBI GI NO: 11385495 NR Description: glutathione S-transferase GST 22 [Zea mays]
  misc_feature (5)..(228): NCBI GI NO: 11385525 NR Description: glutathione S-transferase GST 37 [Zea mays]
  misc_feature (3)..(223): NCBI GI NO: 37536250 NR Description: putative glutathione S-transferase
  misc_feature (3)..(223): NCBI GI NO: 37536280 NR Description: putative glutathione S-transferase
  misc_feature (2)..(223): NCBI GI NO: 37536308 NR Description: putative glutathione S-transferase
  misc_feature (3)..(223): NCBI GI NO: 37536328 NR Description: putative glutathione S-transferase
  misc_feature (3)..(223): NCBI GI NO: 11385535 NR Description: glutathione S-transferase GST 42 [Zea mays]
  misc_feature (2)..(223): NCBI GI NO: 33304610 NR Description: tau class GST protein 4
  misc_feature (3)..(223): NCBI GI NO: 15430711 NR Description: putative glutathione S-transferase OsGSTU7
  misc_feature (2)..(223): NCBI GI NO: 37536310 NR Description: putative glutathione S-transferase
MAGKELTLLGLWASPFVLRARIALSLKGLTYAYSEENLDDKSELLLSSNPVLKKVPVLIHHGKPVCESQIIVQYVDEAFPAAAPNFLPSDPYDRAIARFWASYVDDKFYSAWIPVFRGRTAEEMAEAARQAVAALETLEQAFRECSKGKAFFGGDSVGLVDVVLGGLVGWLYATEAICGVKALDAGRTPLLAAWAERFCALEGVKGLIPDVDRLLEYTKARRAVFGLPPLRP

SEQ ID NO: 27811 - DNA, 771 bp, Zea mays subsp. mays
  misc_feature (1)..(771): Ceres Seq. ID no. 12343659
acctgcgcattttgtaaaggtacgaggagctaggtgaggcaccaccaccaaccgggctccgactccgagttcatcacgcacgcatggaaggctcggcggcacaggcgccggggaagaccgtcctgagggtggtggcgatctccggctcgctgcgcagggcgtcggccaacaccggcctcatccgcgccgccgcggagatctgcagggagtcgatcccggggctggaggtggagcacgtggacatctcggagctgccgctgctgaacaccgacctggagggcccgggccccggcgcgttcccggcggccgtcgaggcgttccgcggcaaggtgcgcgccgccgactgcttcctgttcgcgtcgcccgagtacaactactccatctcgggcccgctgaagaacgcgctggactgggggtcgcgcccgcccaactgctggggcgacagggccgccgccatcctcagcgcgtcgggcgggtcggggggcagccgctcgcagtaccacgtccgccaggtcggcgttttcctcgacctccacttcgtcaacaagcccgaggtgttcaccagggcgcaccagccgcccagaaagttcgaccacgacggcaacctcgtcgacccggacaccaaggaccaggtcaccaaggtgctcctggcgctgcaggctctcgcgctcaggctgcagctggggaagctcgctgttgctgcacactcttcttgaacgtcgtcgtcgtcgggggtgcactaaactacactacacatcgtcgccgagctcc

SEQ ID NO: 27812 - protein, 210 aa, Zea mays subsp. mays
  peptide (1)..(210): Ceres Seq. ID no. 12343660
  misc_feature (14)..(184): Pfam Name: Pfam Description:  NADPH-dependent FMN reductase
  misc_feature (1)..(210): NCBI GI NO: 34906652 NR Description: putative NADPH:quinone oxidoreductase
  misc_feature (1)..(199): NCBI GI NO: 34906648 NR Description: putative NADPH:quinone oxidoreductase
  misc_feature (13)..(202): NCBI GI NO: 24745889 NR Description: NAD(P)H:quinone oxidoreductase [Solanum tuberosum]
  misc_feature (11)..(202): NCBI GI NO: 5002232 NR Description: NADPH:quinone oxidoreductase
  misc_feature (11)..(202): NCBI GI NO: 15232856 NR Description: NADPH:quinone oxidoreductase
  misc_feature (14)..(199): NCBI GI NO: 15596401 NR Description: conserved hypothetical protein
  misc_feature (14)..(199): NCBI GI NO: 32041222 NR Description: hypothetical protein
  misc_feature (14)..(199): NCBI GI NO: 22406524 NR Description: hypothetical protein [Ferroplasma acidarmanus]
  misc_feature (14)..(200): NCBI GI NO: 26250454 NR Description: Hypothetical protein yieF
  misc_feature (13)..(175): NCBI GI NO: 23061144 NR Description: hypothetical protein
MEGSAAQAPGKTVLRVVAISGSLRRASANTGLIRAAAEICRESIPGLEVEHVDISELPLLNTDLEGPGPGAFPAAVEAFRGKVRAADCFLFASPEYNYSISGPLKNALDWGSRPPNCWGDRAAAILSASGGSGGSRSQYHVRQVGVFLDLHFVNKPEVFTRAHQPPRKFDHDGNLVDPDTKDQVTKVLLALQALALRLQLGKLAVAAHSS

SEQ ID NO: 27813 - DNA, 1509 bp, Zea mays subsp. mays
  misc_feature (1)..(1509): Ceres Seq. ID no. 12373608
gcacgagaccattacctagaacatcctaatcgaaaattttgcaatccgtatcatcatcttggcctcgtcaatccaccaccaccgtcgtcgctgagctcctcctccggcttcgcttcgcttcgctgtcttgcctcctcctcggtcgaagaagaagaagaaaacatgtgtccgggatccgtggagtcgtcgtcggcggcggcggcgggcaagagcgtgtgcgtgatggacgccgcggggccgctgggccacgcgctcgtggaccgcctcctccggcgcgggtacacagtccacgccgccacgtacgcccgcgacggggaggagggcgcggctgccgccgcgctgctcggccacctgtcgcgcgccgccgacgcgtgcaggcaccggctgaagctgttccgcgccgacccgttcgactaccacgccatcgccgacgccgtgcggggctgcgccggcgtcttctgcatgttcaacacgcccgaggatcaggcccaatgcgatgagtcgacggtggagacggaggtgcgcgcggcgcacaacgtgctggaggcgtgcgcgcagacggacgccatggagcgggtcgtcttcacctcctccgtcaccgccgtcgtctggagcggcgccggcgccggcgtcggcgcccacagggaggaggtcgccgacgagaggagctggagcgacctcgccttctgcaggaagttcaagctgtggcacgccctggccaagacgctgtcggagaagacggcgtgggcgctggccatggaccggggcgtcgacatggtggccatcaacgccggcctgctgctgtccgcccccgggcccgggctcgggctcaccgccgcgcacccctacctcaagggcgcccccgacatgtacgacggcggcgtcctcgccaccgtcgacgtcggcttcctggccgacgcgcacgtcgccgcctacgagtcccccaccgcctacggccgctacctctgcttcagcgacgccgtctgccgtcccgaggacgccgtcaagctcgcccagatgctctcgccggccgcgccacgctcgccgccgccaagcgacgaactgaaggtgataccacagaggatccagggcaagaaactgaacaagctcatgctggagttcgccagcggggtatacggggagctggactaggaaggaactgccaggccacagatgatgcgatgcgactagggctgttgtattcttttgtacgtagtactatttgtagttttcgcccccctcacaaaaaaaaggagggaaatctgtttggttggccaaaatgtgccatacgctcgctgtacatggccaaacacgccacgtgtgtagcccctgccagcagcaggggtgggtggggagagcatttcagtgatcggttgccaaagaaataccatatcgtatctaggttcgtgagttacatcccatgcatgtgttacgtgacgcttatattgaactctgacaaacttgtagcgcacaattacaaacatgattacggaagaatcgtttcagggt

SEQ ID NO: 27814 - protein, 383 aa, Zea mays subsp. mays
  peptide (1)..(383): Ceres Seq. ID no. 12373609
  misc_feature (70)..(383): NCBI GI NO: 37537132 NR Description: putative cinnamoyl-CoA reductase
  misc_feature (73)..(371): NCBI GI NO: 25412171 NR Description: probable cinnamoyl CoA reductase
  misc_feature (73)..(371): NCBI GI NO: 18400407 NR Description: putative cinnamoyl CoA reductase
  misc_feature (73)..(371): NCBI GI NO: 21553382 NR Description: putative cinnamoyl CoA reductase
  misc_feature (73)..(371): NCBI GI NO: 15234751 NR Description: cinnamoyl-CoA reductase - like protein
  misc_feature (73)..(371): NCBI GI NO: 21553548 NR Description: cinnamoyl-CoA reductase-like protein
  misc_feature (69)..(374): NCBI GI NO: 3341511 NR Description: cinnamoyl-CoA reductase [Saccharum officinarum]
  misc_feature (69)..(374): NCBI GI NO: 25140432 NR Description: cinnamoyl CoA reductase [Hordeum vulgare]
  misc_feature (57)..(374): NCBI GI NO: 3242328 NR Description: cinnamoyl-CoA reductase [Zea mays]
  misc_feature (69)..(374): NCBI GI NO: 9964087 NR Description: cinnamoyl CoA reductase [Lolium perenne]
ARDHYLEHPNRKFCNPYHHLGLVNPPPPSSLSSSSGFASLRCLASSSVEEEEENMCPGSVESSSAAAAGKSVCVMDAAGPLGHALVDRLLRRGYTVHAATYARDGEEGAAAAALLGHLSRAADACRHRLKLFRADPFDYHAIADAVRGCAGVFCMFNTPEDQAQCDESTVETEVRAAHNVLEACAQTDAMERVVFTSSVTAVVWSGAGAGVGAHREEVADERSWSDLAFCRKFKLWHALAKTLSEKTAWALAMDRGVDMVAINAGLLLSAPGPGLGLTAAHPYLKGAPDMYDGGVLATVDVGFLADAHVAAYESPTAYGRYLCFSDAVCRPEDAVKLAQMLSPAAPRSPPPSDELKVIPQRIQGKKLNKLMLEFASGVYGELD

SEQ ID NO: 27815 - protein, 329 aa, Zea mays subsp. mays
  peptide (1)..(329): Ceres Seq. ID no. 12373610
  misc_feature (16)..(329): NCBI GI NO: 37537132 NR Description: putative cinnamoyl-CoA reductase
  misc_feature (19)..(317): NCBI GI NO: 25412171 NR Description: probable cinnamoyl CoA reductase
  misc_feature (19)..(317): NCBI GI NO: 18400407 NR Description: putative cinnamoyl CoA reductase
  misc_feature (19)..(317): NCBI GI NO: 21553382 NR Description: putative cinnamoyl CoA reductase
  misc_feature (19)..(317): NCBI GI NO: 15234751 NR Description: cinnamoyl-CoA reductase - like protein
  misc_feature (19)..(317): NCBI GI NO: 21553548 NR Description: cinnamoyl-CoA reductase-like protein
  misc_feature (15)..(320): NCBI GI NO: 3341511 NR Description: cinnamoyl-CoA reductase [Saccharum officinarum]
  misc_feature (15)..(320): NCBI GI NO: 25140432 NR Description: cinnamoyl CoA reductase [Hordeum vulgare]
  misc_feature (3)..(320): NCBI GI NO: 3242328 NR Description: cinnamoyl-CoA reductase [Zea mays]
  misc_feature (15)..(320): NCBI GI NO: 9964087 NR Description: cinnamoyl CoA reductase [Lolium perenne]
MCPGSVESSSAAAAGKSVCVMDAAGPLGHALVDRLLRRGYTVHAATYARDGEEGAAAAALLGHLSRAADACRHRLKLFRADPFDYHAIADAVRGCAGVFCMFNTPEDQAQCDESTVETEVRAAHNVLEACAQTDAMERVVFTSSVTAVVWSGAGAGVGAHREEVADERSWSDLAFCRKFKLWHALAKTLSEKTAWALAMDRGVDMVAINAGLLLSAPGPGLGLTAAHPYLKGAPDMYDGGVLATVDVGFLADAHVAAYESPTAYGRYLCFSDAVCRPEDAVKLAQMLSPAAPRSPPPSDELKVIPQRIQGKKLNKLMLEFASGVYGELD

SEQ ID NO: 27816 - protein, 309 aa, Zea mays subsp. mays
  peptide (1)..(309): Ceres Seq. ID no. 12373611
  misc_feature (1)..(309): NCBI GI NO: 37537132 NR Description: putative cinnamoyl-CoA reductase
  misc_feature (1)..(297): NCBI GI NO: 25412171 NR Description: probable cinnamoyl CoA reductase
  misc_feature (1)..(297): NCBI GI NO: 18400407 NR Description: putative cinnamoyl CoA reductase
  misc_feature (1)..(297): NCBI GI NO: 21553382 NR Description: putative cinnamoyl CoA reductase
  misc_feature (1)..(297): NCBI GI NO: 15234751 NR Description: cinnamoyl-CoA reductase - like protein
  misc_feature (1)..(297): NCBI GI NO: 21553548 NR Description: cinnamoyl-CoA reductase-like protein
  misc_feature (1)..(300): NCBI GI NO: 3341511 NR Description: cinnamoyl-CoA reductase [Saccharum officinarum]
  misc_feature (1)..(300): NCBI GI NO: 25140432 NR Description: cinnamoyl CoA reductase [Hordeum vulgare]
  misc_feature (1)..(300): NCBI GI NO: 3242328 NR Description: cinnamoyl-CoA reductase [Zea mays]
  misc_feature (1)..(300): NCBI GI NO: 9964087 NR Description: cinnamoyl CoA reductase [Lolium perenne]
MDAAGPLGHALVDRLLRRGYTVHAATYARDGEEGAAAAALLGHLSRAADACRHRLKLFRADPFDYHAIADAVRGCAGVFCMFNTPEDQAQCDESTVETEVRAAHNVLEACAQTDAMERVVFTSSVTAVVWSGAGAGVGAHREEVADERSWSDLAFCRKFKLWHALAKTLSEKTAWALAMDRGVDMVAINAGLLLSAPGPGLGLTAAHPYLKGAPDMYDGGVLATVDVGFLADAHVAAYESPTAYGRYLCFSDAVCRPEDAVKLAQMLSPAAPRSPPPSDELKVIPQRIQGKKLNKLMLEFASGVYGELD

SEQ ID NO: 27817 - DNA, 1574 bp, Zea mays subsp. mays
  misc_feature (1)..(1574): Ceres Seq. ID no. 12367619
agaggcacagtgacagacagagagagagcgcgcgcggggggagcccagcacagcacctacactagctagccaccaccaccaccaccaccgaccgaatcgggtgcgcgcggcgcgctgctcgtcagctccggccggccgcccggccgctttataaagccacccacccagccccgcccgatcgccatcgccatacccccgcctccgtccacggacacacacccgccttgccagccggcaccctcccggcctcccccacctgtgtcctccggcctcgccgccgcaaaacccgccgcgcaggccggttgctccgattgggagtgccaatcggagccaacagcgagggaagcacatgctgccgttcgtcctagagttcctcattgatgtcgcctgtgatcagtgagatcctcctctcggggtttatgatcaactccacactccggcgccgcacccacctggtccagtccttctccgtcgtcttcctctactggttctatgtcttctcatgaactactcgcccccatcatagccacgcccctcctctcccactcctcctcctcctctttcccttccatctagtagcatctaccgtcctcctcttctctccgtgtcagtctctgccttcgtcgtcgccgtttcagtcgtttcctaaaccttctttagcttgcatgcacttccctactgctgctagcaaagacctttattagtagtgtcaattaagttacgaaagaagaagaaagaaagaaaatttcgaggccgagaaaaaagacggctttgatctctctgctagtgtggtgtggtagtgtgtgcttctagtaagtaagcgagccagggatcaagaagcagagagctgctttgtctcttttgtctcttgcaagaatggcttcctccagcgggagcgggagctcgggctccctctcggcggcaacggcggccctggccgccgcggcgggcacggaggaggagctgcgcgcgctcatggagcagcgccgcgcgaagcggatgctgtccaaccgcgagtccgcgcggcggtcgcggatgcgcaagcagcgccacctcgacgagctgaccgcgcaggcggcgcacctgcgccgcgagaacgcgcacgtggccaccgcgctcggcctcaccgcgcagggcctcctcgccgtggacgccgagaacgccgtcctccgcacccaggccgccgagctcgccgcgcgcctcggctccctcaacgacatcctcgcctgcatgaacaccaacgccgtcggcgccgtcgccgtcttcctcacagccgccgccgccgccgccgccgcttcctccgacccctgcctcgccttcgacggcgccaccgccctggacgacctcctcagatcctgccccgagaacatgttccagtaccagctctgctagctccagaccgcgcgaagtcaccatggcagcgcaaaacaccttcttttcttttcttttgttttttttttttttttcttcttcttcttctggtgtttcaggtttagtaatctgctagtgagatggaagaactgaggtcagatcagacgtggtggtgactagccatgaaagtgaactttactgtt

SEQ ID NO: 27818 - protein, 171 aa, Zea mays subsp. mays
  peptide (1)..(171): Ceres Seq. ID no. 12367620
  misc_feature (33)..(97): Pfam Name: Pfam Description:  bZIP transcription factor
  misc_feature (1)..(136): NCBI GI NO: 22597162 NR Description: bZIP transcription factor ATB2 [Glycine max]
  misc_feature (1)..(122): NCBI GI NO: 4457221 NR Description: putative bZIP DNA-binding protein
  misc_feature (1)..(122): NCBI GI NO: 24460973 NR Description: bZIP transcription factor [Capsicum chinense]
  misc_feature (1)..(122): NCBI GI NO: 16580130 NR Description: bZIP transcription factor BZI-2
  misc_feature (3)..(156): NCBI GI NO: 9650828 NR Description: common plant regulatory factor 7
  misc_feature (6)..(125): NCBI GI NO: 15222223 NR Description: bZIP transcription factor ATB2, putative
  misc_feature (7)..(122): NCBI GI NO: 1769891 NR Description: bZIP transcription factor [Arabidopsis thaliana]
  misc_feature (7)..(122): NCBI GI NO: 15236153 NR Description: bZIP family transcription factor
  misc_feature (9)..(78): NCBI GI NO: 82708 NR Description: Ocs-element binding factor 1 - maize
MASSSGSGSSGSLSAATAALAAAAGTEEELRALMEQRRAKRMLSNRESARRSRMRKQRHLDELTAQAAHLRRENAHVATALGLTAQGLLAVDAENAVLRTQAAELAARLGSLNDILACMNTNAVGAVAVFLTAAAAAAAASSDPCLAFDGATALDDLLRSCPENMFQYQLC

SEQ ID NO: 27819 - protein, 138 aa, Zea mays subsp. mays
  peptide (1)..(138): Ceres Seq. ID no. 12367621
  misc_feature (1)..(64): Pfam Name: Pfam Description:  bZIP transcription factor
  misc_feature (1)..(103): NCBI GI NO: 22597162 NR Description: bZIP transcription factor ATB2 [Glycine max]
  misc_feature (1)..(89): NCBI GI NO: 4457221 NR Description: putative bZIP DNA-binding protein
  misc_feature (1)..(89): NCBI GI NO: 24460973 NR Description: bZIP transcription factor [Capsicum chinense]
  misc_feature (1)..(89): NCBI GI NO: 16580130 NR Description: bZIP transcription factor BZI-2
  misc_feature (1)..(123): NCBI GI NO: 9650828 NR Description: common plant regulatory factor 7
  misc_feature (1)..(92): NCBI GI NO: 15222223 NR Description: bZIP transcription factor ATB2, putative
  misc_feature (1)..(89): NCBI GI NO: 1769891 NR Description: bZIP transcription factor [Arabidopsis thaliana]
  misc_feature (1)..(89): NCBI GI NO: 15236153 NR Description: bZIP family transcription factor
  misc_feature (1)..(45): NCBI GI NO: 82708 NR Description: Ocs-element binding factor 1 - maize
MEQRRAKRMLSNRESARRSRMRKQRHLDELTAQAAHLRRENAHVATALGLTAQGLLAVDAENAVLRTQAAELAARLGSLNDILACMNTNAVGAVAVFLTAAAAAAAASSDPCLAFDGATALDDLLRSCPENMFQYQLC

SEQ ID NO: 27820 - protein, 130 aa, Zea mays subsp. mays
  peptide (1)..(130): Ceres Seq. ID no. 12367622
  misc_feature (1)..(56): Pfam Name: Pfam Description:  bZIP transcription factor
  misc_feature (1)..(95): NCBI GI NO: 22597162 NR Description: bZIP transcription factor ATB2 [Glycine max]
  misc_feature (1)..(81): NCBI GI NO: 4457221 NR Description: putative bZIP DNA-binding protein
  misc_feature (1)..(81): NCBI GI NO: 24460973 NR Description: bZIP transcription factor [Capsicum chinense]
  misc_feature (1)..(81): NCBI GI NO: 16580130 NR Description: bZIP transcription factor BZI-2
  misc_feature (1)..(115): NCBI GI NO: 9650828 NR Description: common plant regulatory factor 7
  misc_feature (1)..(84): NCBI GI NO: 15222223 NR Description: bZIP transcription factor ATB2, putative
  misc_feature (1)..(81): NCBI GI NO: 1769891 NR Description: bZIP transcription factor [Arabidopsis thaliana]
  misc_feature (1)..(81): NCBI GI NO: 15236153 NR Description: bZIP family transcription factor
  misc_feature (1)..(37): NCBI GI NO: 82708 NR Description: Ocs-element binding factor 1 - maize
MLSNRESARRSRMRKQRHLDELTAQAAHLRRENAHVATALGLTAQGLLAVDAENAVLRTQAAELAARLGSLNDILACMNTNAVGAVAVFLTAAAAAAAASSDPCLAFDGATALDDLLRSCPENMFQYQLC

SEQ ID NO: 27821 - DNA, 1466 bp, Zea mays subsp. mays
  misc_feature (1)..(1466): Ceres Seq. ID no. 13577847
  misc_feature (1394)..(1394): n is a, c, t, g, unknown, or other
  misc_feature (1373)..(1373): n is a, c, t, g, unknown, or other
  misc_feature (1191)..(1191): n is a, c, t, g, unknown, or other
atgtaaaaccgtccgacgcgagccccacctccgcgctcgcacgcggaaggagagggacgagcgagccaccgtcaccgagcgcggttacaagaaaatccaatctctcccccacgctcgtttcgactcgcgccatggaggcgcaggcgcaggacaatagggcggaggatggggacggcgcgcggcaacacgtagccggcggcgtcgcggcgacggggatggctatgggcgcgatccccatgcacgggttcatggtcccgaagccagagccggtggagttcttcggcgggatggccgtggtgcggagcaagccgccgccgcggaaccgcgaccggcacaccaaggtggaggggcgggggcggcggatccgcatgcccgcggcgtgcgcggccaggatcttccagctgacgcgggagctagggcacaagtccgacggcgagaccatccggtggctgctgcagcagtcggagcccgccatcatcgccgccaccggcaccggcacggtcccggcgatcgcgaccacggtcgacggcgtgctccgcatccccacgcagtcctcgtcgtcctccagcccctcgtccctcaccaccgtggtcgacggcgacgaggcgtccgccaagcgccgccgcaagctgcagccgacgcgagcggccgccggcgcgtccccgctcgccaccgccgcgcccgcggcgtactacccggtcctcgccgacccgctcctgcagggcaccggtggagcggccatctcggtgccgagcggcctcgcccccatcgccgcgtcgggcgcccctcaagggctcgtcccggtcttcgcggtccctgcggccggcagccccggcggcggcaaccgcatgattccgcaggccaccgccgtgtggatggtgccccagcctggcgccgcggccgcccagcccacgcaattctgggccatccagcccgcgccgcagctcatcaacctcggcggcgcgcaggccgccgtgttccccgcggcggtgaacgtcgccgacttccagggccagcagcccatctctagcttgtctcacaacagcaactcggagcatctgcacctggggtccgggtcccacgagcagcagcgcggcggtcgcagcgacgtcaaccatccggaggaggaagaagacgacgacgacgacgacgagccggtgtccgactccagcccagaagagtaacgcaccnccgtacccccagaaagtccaaccccaaagcttaggttccttttgctctaatttaatcgccccccctcgttttcccccttttcgcaatcctccttatgatgaactacatgatgctttctgtcgtagctcacgttcagttcagtgacccccagtgttagtggtagagagaagaagatgatgatnaaagaggtagtggaactgtanaagcagcgtgtaatgcaaatcaaaacgagcagctgatttgttattgagttaattaattgacgaccttttgcc

SEQ ID NO: 27822 - protein, 393 aa, Zea mays subsp. mays
  peptide (1)..(393): Ceres Seq. ID no. 13577848
  misc_feature (98)..(254): Pfam Name: Pfam Description:  TCP family transcription factor
  misc_feature (44)..(393): NCBI GI NO: 7489534 NR Description: probable DNA binding protein PCF2 - rice
  misc_feature (85)..(359): NCBI GI NO: 15225538 NR Description: TCP family transcription factor, putative
  misc_feature (81)..(276): NCBI GI NO: 15242216 NR Description: TCP family transcription factor, putative
  misc_feature (94)..(276): NCBI GI NO: 21592496 NR Description: unknown [Arabidopsis thaliana]
  misc_feature (98)..(391): NCBI GI NO: 15219640 NR Description: TCP family transcription factor, putative
  misc_feature (96)..(358): NCBI GI NO: 15218305 NR Description: TCP family transcription factor, putative
  misc_feature (102)..(258): NCBI GI NO: 18409345 NR Description: TCP family transcription factor, putative
  misc_feature (103)..(212): NCBI GI NO: 5731257 NR Description: auxin-induced basic helix-loop-helix transcriptionfactor
  misc_feature (97)..(237): NCBI GI NO: 15237274 NR Description: TCP family transcription factor, putative
  misc_feature (97)..(237): NCBI GI NO: 26452377 NR Description: unknown protein [Arabidopsis thaliana]
VKPSDASPTSALARGRRGTSEPPSPSAVTRKSNLSPTLVSTRAMEAQAQDNRAEDGDGARQHVAGGVAATGMAMGAIPMHGFMVPKPEPVEFFGGMAVVRSKPPPRNRDRHTKVEGRGRRIRMPAACAARIFQLTRELGHKSDGETIRWLLQQSEPAIIAATGTGTVPAIATTVDGVLRIPTQSSSSSSPSSLTTVVDGDEASAKRRRKLQPTRAAAGASPLATAAPAAYYPVLADPLLQGTGGAAISVPSGLAPIAASGAPQGLVPVFAVPAAGSPGGGNRMIPQATAVWMVPQPGAAAAQPTQFWAIQPAPQLINLGGAQAAVFPAAVNVADFQGQQPISSLSHNSNSEHLHLGSGSHEQQRGGRSDVNHPEEEEDDDDDDEPVSDSSPEE

SEQ ID NO: 27823 - protein, 350 aa, Zea mays subsp. mays
  peptide (1)..(350): Ceres Seq. ID no. 13577849
  misc_feature (55)..(211): Pfam Name: Pfam Description:  TCP family transcription factor
  misc_feature (1)..(350): NCBI GI NO: 7489534 NR Description: probable DNA binding protein PCF2 - rice
  misc_feature (42)..(316): NCBI GI NO: 15225538 NR Description: TCP family transcription factor, putative
  misc_feature (38)..(233): NCBI GI NO: 15242216 NR Description: TCP family transcription factor, putative
  misc_feature (51)..(233): NCBI GI NO: 21592496 NR Description: unknown [Arabidopsis thaliana]
  misc_feature (55)..(348): NCBI GI NO: 15219640 NR Description: TCP family transcription factor, putative
  misc_feature (53)..(315): NCBI GI NO: 15218305 NR Description: TCP family transcription factor, putative
  misc_feature (59)..(215): NCBI GI NO: 18409345 NR Description: TCP family transcription factor, putative
  misc_feature (60)..(169): NCBI GI NO: 5731257 NR Description: auxin-induced basic helix-loop-helix transcriptionfactor
  misc_feature (54)..(194): NCBI GI NO: 15237274 NR Description: TCP family transcription factor, putative
  misc_feature (54)..(194): NCBI GI NO: 26452377 NR Description: unknown protein [Arabidopsis thaliana]
MEAQAQDNRAEDGDGARQHVAGGVAATGMAMGAIPMHGFMVPKPEPVEFFGGMAVVRSKPPPRNRDRHTKVEGRGRRIRMPAACAARIFQLTRELGHKSDGETIRWLLQQSEPAIIAATGTGTVPAIATTVDGVLRIPTQSSSSSSPSSLTTVVDGDEASAKRRRKLQPTRAAAGASPLATAAPAAYYPVLADPLLQGTGGAAISVPSGLAPIAASGAPQGLVPVFAVPAAGSPGGGNRMIPQATAVWMVPQPGAAAAQPTQFWAIQPAPQLINLGGAQAAVFPAAVNVADFQGQQPISSLSHNSNSEHLHLGSGSHEQQRGGRSDVNHPEEEEDDDDDDEPVSDSSPEE

SEQ ID NO: 27824 - protein, 322 aa, Zea mays subsp. mays
  peptide (1)..(322): Ceres Seq. ID no. 13577850
  misc_feature (27)..(183): Pfam Name: Pfam Description:  TCP family transcription factor
  misc_feature (1)..(322): NCBI GI NO: 7489534 NR Description: probable DNA binding protein PCF2 - rice
  misc_feature (14)..(288): NCBI GI NO: 15225538 NR Description: TCP family transcription factor, putative
  misc_feature (10)..(205): NCBI GI NO: 15242216 NR Description: TCP family transcription factor, putative
  misc_feature (23)..(205): NCBI GI NO: 21592496 NR Description: unknown [Arabidopsis thaliana]
  misc_feature (27)..(320): NCBI GI NO: 15219640 NR Description: TCP family transcription factor, putative
  misc_feature (25)..(287): NCBI GI NO: 15218305 NR Description: TCP family transcription factor, putative
  misc_feature (31)..(187): NCBI GI NO: 18409345 NR Description: TCP family transcription factor, putative
  misc_feature (32)..(141): NCBI GI NO: 5731257 NR Description: auxin-induced basic helix-loop-helix transcriptionfactor
  misc_feature (26)..(166): NCBI GI NO: 15237274 NR Description: TCP family transcription factor, putative
  misc_feature (26)..(166): NCBI GI NO: 26452377 NR Description: unknown protein [Arabidopsis thaliana]
MAMGAIPMHGFMVPKPEPVEFFGGMAVVRSKPPPRNRDRHTKVEGRGRRIRMPAACAARIFQLTRELGHKSDGETIRWLLQQSEPAIIAATGTGTVPAIATTVDGVLRIPTQSSSSSSPSSLTTVVDGDEASAKRRRKLQPTRAAAGASPLATAAPAAYYPVLADPLLQGTGGAAISVPSGLAPIAASGAPQGLVPVFAVPAAGSPGGGNRMIPQATAVWMVPQPGAAAAQPTQFWAIQPAPQLINLGGAQAAVFPAAVNVADFQGQQPISSLSHNSNSEHLHLGSGSHEQQRGGRSDVNHPEEEEDDDDDDEPVSDSSPEE

SEQ ID NO: 27825 - DNA, 1633 bp, Zea mays subsp. mays
  misc_feature (1)..(1633): Ceres Seq. ID no. 12373222
atcaagcgtgcaaggtctcaatctcgcggtaatggcgaggccacacgtcgtggttgtgccgtacccatgctccggcaacatcaacccagcgctgcagatcgccaggctgctccaccgccacggcgtctacgtcaccttcgtcaacaccgagcacaaccaccggcgcgtgcaggccaccgagggcgccggagccgtgcgcggcggggaggggttccgcttcgaggcaatcccggacggcctgtccgaggccgagcggggcaagcaggactacgggcgcagcctggctgtgtccacgagcacgcgctgcgctgcgccgctcagggacctcatcgcgcggctcaacggcacgccgggcgtgccgccggtcacctgcgtgctgcccaccatgctgatgagcttcgcgctgggcgtggcgcgggagctcgggatcccgaccatgtcgttctggacggccagcgcggcctcgctgatgacgcacatgaggctccgcgagctgcaggaaagagggtacgtgccactcaaggatgagagtttcttgacgaacggctacctcgagacgacggtcatcgactggatccccggggtgccgccgatccgcctcggcgacttctcgagcttcctccgcaccaccgacccggacgacttcggtctgcgcttcaacgagtcggaggcgaacagctgcgccaaggccggcgccctcatcctcaacaccttagacggcctcgaggccgacgtgctcgccgcgctgcgcgccgagtacccgcgcgtgtacaccgtcgggcccctgggcctgctcctcagccaggacgacgaccgagacagcagcgcctccgccagcggcagcaccgagtcgaccggcctgagcctgtggaagaaggacgccgagtgcctcgcctggctggacgcgcaagagcggggctccgtcgtgtacgtcaacttcggcagccacacggtggtgacgccggagcagctgaacgagttcgcgtggggcctcgcggcgagcggccaccggttcctctggtccatgagggacaacctcgtccgcggcggcggcggcgccggcgccggcctggacgcgatgccctcgaccttcaaggctgagacggcggggcggtgccacgtggccgcgtggtgtccccaggagcaggtgctgcggcacccggccgtcggctgcttcctgacccacagcggatggaactcgacgtgcgagagtctggccgccggcgtgcccatggtgtgctggccgggcttctcggaccagtacaccaactgcaagtacagctgcgaggtctggggtgtcggcgtccggctggaggcaacggtggagagggagcaggtcgccatgcacgtcaggaaggtgatggcaagcgaggagatgcggaagagcgcggccaagtggaaggaggaggcggaggctgcggccggccccggcggttcgtcacgcgagaacctgctgagcatggtgagagcgctcagccccgcacccaactcgtcagatgcagaagagcccaaagataagtagtcacactagaacggaatctaatgaagcaattgttcatgatcgacgccagtaaagtttgtgttcagttgattgattttctgtgagtaaattggagtagcggtcctcagccgg

SEQ ID NO: 27826 - protein, 506 aa, Zea mays subsp. mays
  peptide (1)..(506): Ceres Seq. ID no. 12373223
  misc_feature (17)..(489): Pfam Name: Pfam Description:  UDP-glucoronosyl and UDP-glucosyl transferase
  misc_feature (13)..(496): NCBI GI NO: 19911203 NR Description: glucosyltransferase-10 [Vigna angularis]
  misc_feature (13)..(499): NCBI GI NO: 15219876 NR Description: UDP-glucose glucosyltransferase, putative
  misc_feature (13)..(488): NCBI GI NO: 15219867 NR Description: UDP-glucose glucosyltransferase, putative
  misc_feature (10)..(488): NCBI GI NO: 17065006 NR Description: UDP-glucose glucosyltransferase
  misc_feature (10)..(488): NCBI GI NO: 15219870 NR Description: UDP-glucose glucosyltransferase
  misc_feature (11)..(488): NCBI GI NO: 38569140 NR Description: OSJNBb0033P05.8
  misc_feature (13)..(488): NCBI GI NO: 38569188 NR Description: OSJNBa0086B14.13
  misc_feature (13)..(488): NCBI GI NO: 15218268 NR Description: UDP-glucose glucosyltransferase, putative
  misc_feature (14)..(484): NCBI GI NO: 38347667 NR Description: OSJNBa0054D14.2
  misc_feature (15)..(478): NCBI GI NO: 38344776 NR Description: OSJNBb0026L04.7
SSVQGLNLAVMARPHVVVVPYPCSGNINPALQIARLLHRHGVYVTFVNTEHNHRRVQATEGAGAVRGGEGFRFEAIPDGLSEAERGKQDYGRSLAVSTSTRCAAPLRDLIARLNGTPGVPPVTCVLPTMLMSFALGVARELGIPTMSFWTASAASLMTHMRLRELQERGYVPLKDESFLTNGYLETTVIDWIPGVPPIRLGDFSSFLRTTDPDDFGLRFNESEANSCAKAGALILNTLDGLEADVLAALRAEYPRVYTVGPLGLLLSQDDDRDSSASASGSTESTGLSLWKKDAECLAWLDAQERGSVVYVNFGSHTVVTPEQLNEFAWGLAASGHRFLWSMRDNLVRGGGGAGAGLDAMPSTFKAETAGRCHVAAWCPQEQVLRHPAVGCFLTHSGWNSTCESLAAGVPMVCWPGFSDQYTNCKYSCEVWGVGVRLEATVEREQVAMHVRKVMASEEMRKSAAKWKEEAEAAAGPGGSSRENLLSMVRALSPAPNSSDAEEPKDK

SEQ ID NO: 27827 - protein, 496 aa, Zea mays subsp. mays
  peptide (1)..(496): Ceres Seq. ID no. 12373224
  misc_feature (7)..(479): Pfam Name: Pfam Description:  UDP-glucoronosyl and UDP-glucosyl transferase
  misc_feature (3)..(486): NCBI GI NO: 19911203 NR Description: glucosyltransferase-10 [Vigna angularis]
  misc_feature (3)..(489): NCBI GI NO: 15219876 NR Description: UDP-glucose glucosyltransferase, putative
  misc_feature (3)..(478): NCBI GI NO: 15219867 NR Description: UDP-glucose glucosyltransferase, putative
  misc_feature (1)..(478): NCBI GI NO: 17065006 NR Description: UDP-glucose glucosyltransferase
  misc_feature (1)..(478): NCBI GI NO: 15219870 NR Description: UDP-glucose glucosyltransferase
  misc_feature (1)..(478): NCBI GI NO: 38569140 NR Description: OSJNBb0033P05.8
  misc_feature (3)..(478): NCBI GI NO: 38569188 NR Description: OSJNBa0086B14.13
  misc_feature (3)..(478): NCBI GI NO: 15218268 NR Description: UDP-glucose glucosyltransferase, putative
  misc_feature (4)..(474): NCBI GI NO: 38347667 NR Description: OSJNBa0054D14.2
  misc_feature (5)..(468): NCBI GI NO: 38344776 NR Description: OSJNBb0026L04.7
MARPHVVVVPYPCSGNINPALQIARLLHRHGVYVTFVNTEHNHRRVQATEGAGAVRGGEGFRFEAIPDGLSEAERGKQDYGRSLAVSTSTRCAAPLRDLIARLNGTPGVPPVTCVLPTMLMSFALGVARELGIPTMSFWTASAASLMTHMRLRELQERGYVPLKDESFLTNGYLETTVIDWIPGVPPIRLGDFSSFLRTTDPDDFGLRFNESEANSCAKAGALILNTLDGLEADVLAALRAEYPRVYTVGPLGLLLSQDDDRDSSASASGSTESTGLSLWKKDAECLAWLDAQERGSVVYVNFGSHTVVTPEQLNEFAWGLAASGHRFLWSMRDNLVRGGGGAGAGLDAMPSTFKAETAGRCHVAAWCPQEQVLRHPAVGCFLTHSGWNSTCESLAAGVPMVCWPGFSDQYTNCKYSCEVWGVGVRLEATVEREQVAMHVRKVMASEEMRKSAAKWKEEAEAAAGPGGSSRENLLSMVRALSPAPNSSDAEEPKDK

SEQ ID NO: 27828 - protein, 378 aa, Zea mays subsp. mays
  peptide (1)..(378): Ceres Seq. ID no. 12373225
  misc_feature (1)..(361): Pfam Name: Pfam Description:  UDP-glucoronosyl and UDP-glucosyl transferase
  misc_feature (1)..(368): NCBI GI NO: 19911203 NR Description: glucosyltransferase-10 [Vigna angularis]
  misc_feature (1)..(371): NCBI GI NO: 15219876 NR Description: UDP-glucose glucosyltransferase, putative
  misc_feature (1)..(360): NCBI GI NO: 15219867 NR Description: UDP-glucose glucosyltransferase, putative
  misc_feature (1)..(360): NCBI GI NO: 17065006 NR Description: UDP-glucose glucosyltransferase
  misc_feature (1)..(360): NCBI GI NO: 15219870 NR Description: UDP-glucose glucosyltransferase
  misc_feature (1)..(360): NCBI GI NO: 38569140 NR Description: OSJNBb0033P05.8
  misc_feature (1)..(360): NCBI GI NO: 38569188 NR Description: OSJNBa0086B14.13
  misc_feature (1)..(360): NCBI GI NO: 15218268 NR Description: UDP-glucose glucosyltransferase, putative
  misc_feature (1)..(356): NCBI GI NO: 38347667 NR Description: OSJNBa0054D14.2
  misc_feature (1)..(350): NCBI GI NO: 38344776 NR Description: OSJNBb0026L04.7
MLMSFALGVARELGIPTMSFWTASAASLMTHMRLRELQERGYVPLKDESFLTNGYLETTVIDWIPGVPPIRLGDFSSFLRTTDPDDFGLRFNESEANSCAKAGALILNTLDGLEADVLAALRAEYPRVYTVGPLGLLLSQDDDRDSSASASGSTESTGLSLWKKDAECLAWLDAQERGSVVYVNFGSHTVVTPEQLNEFAWGLAASGHRFLWSMRDNLVRGGGGAGAGLDAMPSTFKAETAGRCHVAAWCPQEQVLRHPAVGCFLTHSGWNSTCESLAAGVPMVCWPGFSDQYTNCKYSCEVWGVGVRLEATVEREQVAMHVRKVMASEEMRKSAAKWKEEAEAAAGPGGSSRENLLSMVRALSPAPNSSDAEEPKDK

SEQ ID NO: 27829 - DNA, 1318 bp, Zea mays subsp. mays
  misc_feature (1)..(1318): Ceres Seq. ID no. 12349119
gagacgcacacgggcagtgacacgcgcgcataccgacggacttggtagctgctcaccagctatccagatcattggctcattgctgcttccattccattccccccctcggcatcggccgcgcccgcccgtgtcgggcggaggcggacgcgcgcgggaatgggacgccacgcggcctccggcggcggcgtgcagcagaagctgcgcaagggcctctggtcgcccgaggaagacgagaagctctacaaccacatcatccgctacggggtcgggtgctggagctccgtgcccaagctcgcagggctgcagaggtgcggcaagagctgccggcttcggtggatcaactacctacgccccgacctgaagcggggcagcttctcgcagcaggaggaggacgcgatcgtcggcctccaccagatcctggggaacaggtggtcgcagatcgcgtcgcacttgccgggccggacggataacgagatcaagaacttctggaacagctgcctcaagaagaagctgcgtcagcgcggcatcgaccccagcacccacaagcccgcggtctccgccaacgtgccggcggcatcggagcagccggcgtcgaaggaccgcaagccgtttgccacagccgccgctgatggcggctccgacatgaagcaccagcaggtgttcgacccgttcccgctgaccgacagcttcggcggcggcttcggcgccgcactgtacggccacacgggcggcaagcaggacgcggccgcgttcgtggactacagcagcgtgctggacgtgtcggagaacctgggctacggcggcgagagctccagcaacagcagcaactggaactgcgcgccggaggtgcacaacaatgcggtcgacggcgacgcgccgctgcactgggcctccgagagcaaggccacgcccttcgccggctacggcggcgaggagcaatcactcctcgggcacaggttctcgctgccctgccacggccagcaggagcagagccctccgcgttttgacttcgacatcggccggggcgccgtggtcggcgagttcagcctcgagttcttctgaaggtccagcttgggaatttcagcaatctagataccgcgtagcgcgtatatatatactgtgtattaaaggcatttcacacggaacaacaattgagagatcgtgcttcgttaatttcctctagtcgaccttactccttaacaatgtcttgcgtttcttttgttttttttatgttttatgtatgtctaaaataaaggcatagacatatatatgtaaacacggtgtagtgtaatagctatacattaaagtttttgtatgc

SEQ ID NO: 27830 - protein, 301 aa, Zea mays subsp. mays
  peptide (1)..(301): Ceres Seq. ID no. 12349120
  misc_feature (17)..(64): Pfam Name: Pfam Description:  Myb-like DNA-binding domain
  misc_feature (1)..(301): NCBI GI NO: 34911526 NR Description: putative myb-related protein
  misc_feature (1)..(287): NCBI GI NO: 547958 NR Description: Myb-related protein Hv33
  misc_feature (1)..(287): NCBI GI NO: 19059 NR Description: MybHv33 [Hordeum vulgare subsp. vulgare]
  misc_feature (36)..(296): NCBI GI NO: 227031 NR Description: myb-related gene Hv33
  misc_feature (1)..(301): NCBI GI NO: 25458597 NR Description: probable myb-related protein [imported] - rice
  misc_feature (1)..(196): NCBI GI NO: 34913750 NR Description: OSJNBa0051H17.23
  misc_feature (1)..(149): NCBI GI NO: 34902542 NR Description: putative transcription factor (myb)
  misc_feature (1)..(150): NCBI GI NO: 28628949 NR Description: MYB2 [Dendrobium sp. XMW-2002-2]
  misc_feature (5)..(174): NCBI GI NO: 34913340 NR Description: contains ESTsAU101387
  misc_feature (1)..(134): NCBI GI NO: 2280530 NR Description: ATMYB4 [Arabidopsis thaliana]
MGRHAASGGGVQQKLRKGLWSPEEDEKLYNHIIRYGVGCWSSVPKLAGLQRCGKSCRLRWINYLRPDLKRGSFSQQEEDAIVGLHQILGNRWSQIASHLPGRTDNEIKNFWNSCLKKKLRQRGIDPSTHKPAVSANVPAASEQPASKDRKPFATAAADGGSDMKHQQVFDPFPLTDSFGGGFGAALYGHTGGKQDAAAFVDYSSVLDVSENLGYGGESSSNSSNWNCAPEVHNNAVDGDAPLHWASESKATPFAGYGGEEQSLLGHRFSLPCHGQQEQSPPRFDFDIGRGAVVGEFSLEFF

SEQ ID NO: 27831 - DNA, 1005 bp, Zea mays subsp. mays
  misc_feature (1)..(1005): Ceres Seq. ID no. 12401368
actcactcactcgcatcactgactgactggactgctgctcactccttccttcccctggcagagaatctgcagtgcttgccggccggccctgcagagcgcggggatctgcaggcatcatggtgcaatcaaagaagaagttccgcggcgtcaggcagcgccactggggctcctgggtctccgagatcaggcacccgctgcttaagaggagggtgtggctggctcaccttcgagacggcagaggaggcggcgcgggcgtacgacgaggccgccgtcctcatgagcggccgcaacgccaagaccaacttccccgtgccaaggagcggcaccggggagctgctggcccctgcagtgccggccgcacggggaggcgcgtggtggcggtggcggcggcaccagcctgtcgcagatcctcagcgccaagctccgcaggtgctgcaagacgccgtcgccgtcgctcacctgcctccgcctcgacccggagaagtcccacattggcgtctggcagaagcgcgccggcgcgcgcgccgactccagctgggtcatgaccgtcgagctcaacaaggacgcgccgccgccaccgtcctccggcgaggagccggcgcccagctacggcggcgcggccaccacgtccacgtccacgcccacgtcgtccactatcacggccggctcgcctccacctgagatgatggacgacgaggagagtgttgcgctgcagatgatcgaggagctgctgggatcacatgggatgatgctccaggtccagggtgcagcaggcagcctcgtcatctgaaggaaaccgcatggttcaacaagctattatgatatgatcaggacatcatcatcaggtcactgtcccagatcagaccaagcagttaagattgcatcatatatataatataggtacacctctattactacatcaagcttaggaaaaaaccatatagtaagatgaatcactactgtgtgaagctctgtaattatatatattaaaggcttttacttgtg

SEQ ID NO: 27832 - protein, 226 aa, Zea mays subsp. mays
  peptide (1)..(226): Ceres Seq. ID no. 12401369
  misc_feature (73)..(111): NCBI GI NO: 15218134 NR Description: putative ethylene responsive element
  misc_feature (73)..(110): NCBI GI NO: 15238976 NR Description: putative protein; protein id: At5g11190.1
  misc_feature (73)..(112): NCBI GI NO: 15239413 NR Description: AP2 domain containing protein
  misc_feature (73)..(112): NCBI GI NO: 30689846 NR Description: AP2 domain transcription factor, putative
  misc_feature (73)..(119): NCBI GI NO: 18650662 NR Description: ethylene response factor 1
  misc_feature (73)..(119): NCBI GI NO: 15238727 NR Description: ethylene-responsive element - like protein
  misc_feature (75)..(119): NCBI GI NO: 131754 NR Description: PPLZ02 PROTEIN
  misc_feature (73)..(103): NCBI GI NO: 2281637 NR Description: AP2 domain containing protein RAP2.6
  misc_feature (73)..(111): NCBI GI NO: 4699791 NR Description: Solution Structure Of The Gcc-Box Binding Domain
  misc_feature (73)..(103): NCBI GI NO: 15218275 NR Description: AP2 domain protein RAP2
THSLASLTDWTAAHSFLPLAENLQCLPAGPAERGDLQASWCNQRRSSAASGSATGAPGSPRSGTRCLRGGCGWLTFETAEEAARAYDEAAVLMSGRNAKTNFPVPRSGTGELLAPAVPAARGGAWWRWRRHQPVADPQRQAPQVLQDAVAVAHLPPPRPGEVPHWRLAEARRRARRLQLGHDRRAQQGRAAATVLRRGAGAQLRRRGHHVHVHAHVVHYHGRLAST

SEQ ID NO: 27833 - protein, 142 aa, Zea mays subsp. mays
  peptide (1)..(142): Ceres Seq. ID no. 12401370
  misc_feature (1)..(34): NCBI GI NO: 15218134 NR Description: putative ethylene responsive element
  misc_feature (1)..(34): NCBI GI NO: 15238976 NR Description: putative protein; protein id: At5g11190.1
  misc_feature (1)..(34): NCBI GI NO: 15239413 NR Description: AP2 domain containing protein
  misc_feature (1)..(34): NCBI GI NO: 30689846 NR Description: AP2 domain transcription factor, putative
  misc_feature (1)..(34): NCBI GI NO: 18650662 NR Description: ethylene response factor 1
  misc_feature (1)..(34): NCBI GI NO: 15238727 NR Description: ethylene-responsive element - like protein
  misc_feature (1)..(33): NCBI GI NO: 131754 NR Description: PPLZ02 PROTEIN
  misc_feature (1)..(34): NCBI GI NO: 2281637 NR Description: AP2 domain containing protein RAP2.6
  misc_feature (1)..(120): NCBI GI NO: 21553845 NR Description: putative ethylene responsive element
  misc_feature (6)..(34): NCBI GI NO: 4699791 NR Description: Solution Structure Of The Gcc-Box Binding Domain
MVQSKKKFRGVRQRHWGSWVSEIRHPLLKRRVWLAHLRDGRGGGAGVRRGRRPHERPQRQDQLPRAKERHRGAAGPCSAGRTGRRVVAVAAAPACRRSSAPSSAGAARRRRRRSPASASTRRSPTLASGRSAPARAPTPAGS

SEQ ID NO: 27834 - protein, 134 aa, Zea mays subsp. mays
  peptide (1)..(134): Ceres Seq. ID no. 12401371
  misc_feature (1)..(19): NCBI GI NO: 15218134 NR Description: putative ethylene responsive element
  misc_feature (1)..(18): NCBI GI NO: 15238976 NR Description: putative protein; protein id: At5g11190.1
  misc_feature (1)..(20): NCBI GI NO: 15239413 NR Description: AP2 domain containing protein
  misc_feature (1)..(20): NCBI GI NO: 30689846 NR Description: AP2 domain transcription factor, putative
  misc_feature (1)..(27): NCBI GI NO: 18650662 NR Description: ethylene response factor 1
  misc_feature (1)..(27): NCBI GI NO: 15238727 NR Description: ethylene-responsive element - like protein
  misc_feature (1)..(27): NCBI GI NO: 131754 NR Description: PPLZ02 PROTEIN
  misc_feature (1)..(11): NCBI GI NO: 2281637 NR Description: AP2 domain containing protein RAP2.6
  misc_feature (1)..(19): NCBI GI NO: 4699791 NR Description: Solution Structure Of The Gcc-Box Binding Domain
  misc_feature (1)..(11): NCBI GI NO: 15218275 NR Description: AP2 domain protein RAP2
MSGRNAKTNFPVPRSGTGELLAPAVPAARGGAWWRWRRHQPVADPQRQAPQVLQDAVAVAHLPPPRPGEVPHWRLAEARRRARRLQLGHDRRAQQGRAAATVLRRGAGAQLRRRGHHVHVHAHVVHYHGRLAST

SEQ ID NO: 27835 - DNA, 802 bp, Zea mays subsp. mays
  misc_feature (1)..(802): Ceres Seq. ID no. 12403537
atacctgaaacttcactgcctttttgtcaggcacgctggtcaggaaatcagtagcctgttttggctgctgttgctaatcagttgggagagggggagatggccaggaggaacatcggagtcgcagtggacttctcgtcgtgcagcaaagcggctttgcggtgggcgtcgacgaaccttgcgaggaacggcgacaggctcatactcatccacgtgaacagctcctgccagaacgagcggggcgccgttcatctctgggagcagagcggttccccattgatccctctggccgagttttcagacgtcgccaggacatacggtgtgtcaccggacaaggagacgatcgagatcctcactcaagcggcaaatcatagagggatcgaagtctttgcaaaggtgttctacggcgacccggcaaagaagctgtacgaagcagccgacatggtcccgcttagctgcatggtggtcgggagcagaggactaagcacgctcaagagggctctgatggggagcgtgagcacgtatgttgtgaaccacgcggcctgccccgtgacggttgtgaaggagatggtgtagcgtgttgaacaccgctggttacaagcttcaccctagccagattgaataagcgtgcttgataagcactgatcaggggggatcttgctacttatacgacattttgtgcttgaaatttgggtaactaggaccgggcagaacatatctatgtcttgggctcatggcactgacatctgaacatatgccctaagtctgttgtaatcgcaaaatatttttgcttataaaatcagtt

SEQ ID NO: 27836 - protein, 158 aa, Zea mays subsp. mays
  peptide (1)..(158): Ceres Seq. ID no. 12403538
  misc_feature (4)..(155): Pfam Name: Pfam Description:  Universal stress protein family
  misc_feature (1)..(158): NCBI GI NO: 15528707 NR Description: P0583G08.8
  misc_feature (1)..(155): NCBI GI NO: 18401345 NR Description: expressed protein; protein id: At3g17020
  misc_feature (4)..(155): NCBI GI NO: 30678807 NR Description: expressed protein [Arabidopsis thaliana]
  misc_feature (4)..(156): NCBI GI NO: 11602747 NR Description: early nodulin ENOD18 [Vicia faba]
  misc_feature (4)..(156): NCBI GI NO: 11602751 NR Description: ENOD18 protein [Vicia faba]
  misc_feature (4)..(156): NCBI GI NO: 11602749 NR Description: early nodulin ENOD18 [Vicia faba]
  misc_feature (4)..(156): NCBI GI NO: 30693971 NR Description: expressed protein [Arabidopsis thaliana]
  misc_feature (4)..(155): NCBI GI NO: 20160561 NR Description: P0414E03.3
  misc_feature (4)..(133): NCBI GI NO: 18396497 NR Description: expressed protein; protein id: At3g03270
  misc_feature (1)..(155): NCBI GI NO: 18408994 NR Description: expressed protein; protein id: At1g68300
MARRNIGVAVDFSSCSKAALRWASTNLARNGDRLILIHVNSSCQNERGAVHLWEQSGSPLIPLAEFSDVARTYGVSPDKETIEILTQAANHRGIEVFAKVFYGDPAKKLYEAADMVPLSCMVVGSRGLSTLKRALMGSVSTYVVNHAACPVTVVKEMV

SEQ ID NO: 27837 - DNA, 832 bp, Zea mays subsp. mays; identical to SEQ ID NO: 25705
  misc_feature (1)..(832): Ceres Seq. ID no. 12366950

SEQ ID NO: 27838 - protein, 161 aa, Zea mays subsp. mays; identical to SEQ ID NO: 23397
  peptide (1)..(161): Ceres Seq. ID no. 12366951
  misc_feature (3)..(73): Pfam Name: Pfam Description:  Ribosomal protein L24e
  misc_feature (1)..(161): NCBI GI NO: 1710521 NR Description: 60S RIBOSOMAL PROTEIN L24
  misc_feature (4)..(161): NCBI GI NO: 34900364 NR Description: putative 60S ribosomal protein L24
  misc_feature (1)..(160): NCBI GI NO: 6094040 NR Description: 60S ribosomal protein L24
  misc_feature (1)..(156): NCBI GI NO: 10180025 NR Description: 60S ribosomal protein L24 [Prunus avium]
  misc_feature (1)..(161): NCBI GI NO: 18404176 NR Description: 60S ribosomal protein L24; protein id: At2g36620
  misc_feature (1)..(161): NCBI GI NO: 15231730 NR Description: 60S ribosomal protein - like; protein id:At3g53020
  misc_feature (5)..(161): NCBI GI NO: 25295112 NR Description: 60S ribosomal protein L24
  misc_feature (3)..(150): NCBI GI NO: 19075214 NR Description: 60s ribosomal protein L24
  misc_feature (3)..(150): NCBI GI NO: 19115030 NR Description: 60S ribosomal protein L24
  misc_feature (10)..(154): NCBI GI NO: 40741063 NR Description: conserved hypothetical protein

SEQ ID NO: 27839 - protein, 106 aa, Zea mays subsp. mays; identical to SEQ ID NO: 23398
  peptide (1)..(106): Ceres Seq. ID no. 12366952
  misc_feature (1)..(106): NCBI GI NO: 1710521 NR Description: 60S RIBOSOMAL PROTEIN L24
  misc_feature (1)..(106): NCBI GI NO: 34900364 NR Description: putative 60S ribosomal protein L24
  misc_feature (1)..(105): NCBI GI NO: 6094040 NR Description: 60S ribosomal protein L24
  misc_feature (1)..(101): NCBI GI NO: 10180025 NR Description: 60S ribosomal protein L24 [Prunus avium]
  misc_feature (1)..(106): NCBI GI NO: 18404176 NR Description: 60S ribosomal protein L24; protein id: At2g36620
  misc_feature (1)..(106): NCBI GI NO: 15231730 NR Description: 60S ribosomal protein - like; protein id:At3g53020
  misc_feature (1)..(106): NCBI GI NO: 25295112 NR Description: 60S ribosomal protein L24
  misc_feature (1)..(95): NCBI GI NO: 19075214 NR Description: 60s ribosomal protein L24
  misc_feature (1)..(95): NCBI GI NO: 19115030 NR Description: 60S ribosomal protein L24
  misc_feature (1)..(99): NCBI GI NO: 40741063 NR Description: conserved hypothetical protein

SEQ ID NO: 27840 - DNA, 1256 bp, Zea mays subsp. mays
  misc_feature (1)..(1256): Ceres Seq. ID no. 12405546
aatcttcttcttcctccttcagtcacccggcctgtcgtgtcgatctcactctcagggtccggtccggtccggtgcatcatatatacccttggtcgatcgatcgaccagatagatacactagatagctaggattgcattgtgttccaccaaaagccagccacaacacatcgacatgatgcaggacttgttctcggtcccttcgtgtttctcggcgggcgagaagcttccggacgtcccggcgtccgctgcggccaccaccaggtccgggcagagcgcggcgacgctggtctaccgcgcgggaatcgccggccacgaccgcctggtgacggtgacgtggtgcaggaacctgctcacccacgggctgaccgtgtcgatcgaagggtcggcgggcggcggcaaggacaagagcggcggcggcagggagtggggcgacgccgacggtggcgcggcctcgtcctccaacaagggctgcagcaccgcctgcaaggtggagatgcagccgtggcacttttggcgcaagtacggcgccaagcagttccacgtcgacggcagggccgtggacgtggtctgggacctcaggagcgcgaggtactccgacgagcccgagccgctgtccgactactacgtcgccgtggtgtcggacgaggaggtggtcctcctcctcggcaacctcaagaaggaggcgttccggcgcaccgggtcccggccgtcgctgcgggacgccgcactggtgtgcaagaaggagcacgtctttagcaagaagcggttcctcaccaaggccaggttccacgacaggggcaagctgcacgacatcagcatcgagtgcagcagcagcaacctcggcggcggcggcgtcgacgtcgacatggtcatcaagatcgacggctacgtcaacgtcctcgtcaggcacctgcagtggaagttcaggggcaacgagtgcatctccatcaaccagctcaaggtgcaggtgtactgggacgcgcacgactggatctttggcacgggggtgaggaacgcgctgttcatcttcaagcccgagccgctgccgtccgccaccaatgagtactctgatttctgcctgtttctgtacgcatggaagcttgagtgagctaggattcctgttcctgcattatactggacacctcaccatatatgttatgaaccaataattcatacgtatcatgtaactgatggattattgggcgatggaagtgtatgcgaaatgaatgattggggccgttttccctttcccttcc

SEQ ID NO: 27841 - protein, 311 aa, Zea mays subsp. mays
  peptide (1)..(311): Ceres Seq. ID no. 12405547
  misc_feature (33)..(310): Pfam Name: DUF868 Pfam Description: Plant protein of unknown function
  misc_feature (2)..(311): NCBI GI NO: 20804936 NR Description: P0456E05.14
  misc_feature (104)..(311): NCBI GI NO: 15235452 NR Description: putative protein; protein id: At4g12690
  misc_feature (7)..(73): NCBI GI NO: 15235452 NR Description: putative protein; protein id: At4g12690
  misc_feature (104)..(288): NCBI GI NO: 15228105 NR Description: hypothetical protein; protein id: At2g04220.1
  misc_feature (16)..(73): NCBI GI NO: 15228105 NR Description: hypothetical protein; protein id: At2g04220.1
  misc_feature (94)..(300): NCBI GI NO: 15238927 NR Description: putative protein; protein id: At5g48270.1
  misc_feature (2)..(68): NCBI GI NO: 15238927 NR Description: putative protein; protein id: At5g48270.1
  misc_feature (99)..(311): NCBI GI NO: 14719318 NR Description: hypothetical protein [Oryza sativa]
  misc_feature (91)..(311): NCBI GI NO: 18397034 NR Description: expressed protein; protein id: At3g04860
  misc_feature (9)..(71): NCBI GI NO: 18397034 NR Description: expressed protein; protein id: At3g04860
MMQDLFSVPSCFSAGEKLPDVPASAAATTRSGQSAATLVYRAGIAGHDRLVTVTWCRNLLTHGLTVSIEGSAGGGKDKSGGGREWGDADGGAASSSNKGCSTACKVEMQPWHFWRKYGAKQFHVDGRAVDVVWDLRSARYSDEPEPLSDYYVAVVSDEEVVLLLGNLKKEAFRRTGSRPSLRDAALVCKKEHVFSKKRFLTKARFHDRGKLHDISIECSSSNLGGGGVDVDMVIKIDGYVNVLVRHLQWKFRGNECISINQLKVQVYWDAHDWIFGTGVRNALFIFKPEPLPSATNEYSDFCLFLYAWKLE

SEQ ID NO: 27842 - protein, 310 aa, Zea mays subsp. mays
  peptide (1)..(310): Ceres Seq. ID no. 12405548
  misc_feature (32)..(309): Pfam Name: DUF868 Pfam Description: Plant protein of unknown function
  misc_feature (1)..(310): NCBI GI NO: 20804936 NR Description: P0456E05.14
  misc_feature (103)..(310): NCBI GI NO: 15235452 NR Description: putative protein; protein id: At4g12690
  misc_feature (6)..(72): NCBI GI NO: 15235452 NR Description: putative protein; protein id: At4g12690
  misc_feature (103)..(287): NCBI GI NO: 15228105 NR Description: hypothetical protein; protein id: At2g04220.1
  misc_feature (15)..(72): NCBI GI NO: 15228105 NR Description: hypothetical protein; protein id: At2g04220.1
  misc_feature (93)..(299): NCBI GI NO: 15238927 NR Description: putative protein; protein id: At5g48270.1
  misc_feature (1)..(67): NCBI GI NO: 15238927 NR Description: putative protein; protein id: At5g48270.1
  misc_feature (98)..(310): NCBI GI NO: 14719318 NR Description: hypothetical protein [Oryza sativa]
  misc_feature (90)..(310): NCBI GI NO: 18397034 NR Description: expressed protein; protein id: At3g04860
  misc_feature (8)..(70): NCBI GI NO: 18397034 NR Description: expressed protein; protein id: At3g04860
MQDLFSVPSCFSAGEKLPDVPASAAATTRSGQSAATLVYRAGIAGHDRLVTVTWCRNLLTHGLTVSIEGSAGGGKDKSGGGREWGDADGGAASSSNKGCSTACKVEMQPWHFWRKYGAKQFHVDGRAVDVVWDLRSARYSDEPEPLSDYYVAVVSDEEVVLLLGNLKKEAFRRTGSRPSLRDAALVCKKEHVFSKKRFLTKARFHDRGKLHDISIECSSSNLGGGGVDVDMVIKIDGYVNVLVRHLQWKFRGNECISINQLKVQVYWDAHDWIFGTGVRNALFIFKPEPLPSATNEYSDFCLFLYAWKLE

SEQ ID NO: 27843 - protein, 204 aa, Zea mays subsp. mays
  peptide (1)..(204): Ceres Seq. ID no. 12405549
  misc_feature (1)..(203): Pfam Name: DUF868 Pfam Description: Plant protein of unknown function
  misc_feature (1)..(204): NCBI GI NO: 20804936 NR Description: P0456E05.14
  misc_feature (1)..(204): NCBI GI NO: 15235452 NR Description: putative protein; protein id: At4g12690
  misc_feature (1)..(181): NCBI GI NO: 15228105 NR Description: hypothetical protein; protein id: At2g04220.1
  misc_feature (1)..(193): NCBI GI NO: 15238927 NR Description: putative protein; protein id: At5g48270.1
  misc_feature (1)..(204): NCBI GI NO: 14719318 NR Description: hypothetical protein [Oryza sativa]
  misc_feature (1)..(204): NCBI GI NO: 18397034 NR Description: expressed protein; protein id: At3g04860
  misc_feature (1)..(204): NCBI GI NO: 21593854 NR Description: unknown [Arabidopsis thaliana]
  misc_feature (1)..(204): NCBI GI NO: 15241702 NR Description: putative protein; protein id: At5g28150
  misc_feature (1)..(181): NCBI GI NO: 25334990 NR Description: hypothetical protein At2g04220
  misc_feature (1)..(204): NCBI GI NO: 30102999 NR Description: hypothetical protein
MQPWHFWRKYGAKQFHVDGRAVDVVWDLRSARYSDEPEPLSDYYVAVVSDEEVVLLLGNLKKEAFRRTGSRPSLRDAALVCKKEHVFSKKRFLTKARFHDRGKLHDISIECSSSNLGGGGVDVDMVIKIDGYVNVLVRHLQWKFRGNECISINQLKVQVYWDAHDWIFGTGVRNALFIFKPEPLPSATNEYSDFCLFLYAWKLE

SEQ ID NO: 27844 - DNA, 1386 bp, Zea mays subsp. mays
  misc_feature (1)..(1386): Ceres Seq. ID no. 12373219
gcagcggattgcggagtggcattgggttggcagcacgcccctgcacacggtgacacgggccacggcgcggcgcggcgcggcacggggagcgagcgccgagcgagagcaagcaaccgctgtccgccgggccggccacggcgctgccccctgcttcgcgccttcgccggtgcgctcacgcctcacgcaggtgcatgcatcgacctacggtatcctagtctgggatcagaaaagaacacagcaacaacaaagaagaaaggcgcgagcgatggacggtgacgccggaccagagcaacacgggtgcgtgcactacaggaggggatgcaagataagggcgccgtgctgcggcgaggtatttggttgcaggcactgccacaacgaagccaaggactcgctggaggtcagcgtccacgaccgccacgtgcttccccgtcacgacatcaagctggttatctgctctctctgcaacaaagaacaggatgtaagttccctgacgaagcagggacagtgttcttcggccactgttggtgttacctgccacacaccacatgaaaaaaaaacccatctcgtctgtcgacaggtgcagcaagactgtgcgaactgcggagcatgtctcggcaaatacttctgcgcgaaatgcaacctcttcgacgacgatgtgtcgaagaaccaatttcactgcgatgggtgcggcatatgcaggactggtggcgctgagaatttctatcactgtggcagatgtggatgctgctacaccactccgctgaaggattctcaccgctgcgtggacggagctatgcatcacaactgccctgtctgcatggagtatctattcgactcgatgaaagctatcagcgtgctccactgcggacacaccatccacctggaatgcctttacgagatgagagcgcaccagcagttttcatgcccggtgtgcctgaggtctgcctgcaacatgtccgacatctggcaaaagctggatcagcaggttgcagcgtccccgatgccagcgatctaccagaagaagatggtatggatcctttgcaacgactgtggcgtgacgtccaacgtgcagttccacatcttggcgcacaagtgccctggatgcagctcttacaacacccggcagacgaggggcgatccagccgcatgctctagagtctgagagcaaataaaactgcagtactgcactgcacataaactcgtggggttgtgcggtcgatcgataggtagcttgcagggaggaaattaaagactaccattgcgcatggacacgattggtgccggcagttgagtacgtgtattaggcctgtcatatgtagatgtatcatatgcaatgccttcacaaagaagaatttggcgcagcggacagggtttttttttgttgct

SEQ ID NO: 27845 - protein, 386 aa, Zea mays subsp. mays
  peptide (1)..(386): Ceres Seq. ID no. 12373220
  misc_feature (100)..(160): Pfam Name: Pfam Description:  CHY zinc finger
  misc_feature (191)..(382): NCBI GI NO: 37535002 NR Description: putative PGPD14 protein
  misc_feature (191)..(386): NCBI GI NO: 4105798 NR Description: PGPD14 [Petunia x hybrida]
  misc_feature (191)..(384): NCBI GI NO: 21593716 NR Description: PGPD14 protein [Arabidopsis thaliana]
  misc_feature (191)..(384): NCBI GI NO: 15237169 NR Description: PGPD14 protein; protein id: At5g22920
  misc_feature (154)..(375): NCBI GI NO: 34910658 NR Description: putative PGPD14 protein
  misc_feature (233)..(357): NCBI GI NO: 15451615 NR Description: Hypothetical protein with similarity to PGPD14
  misc_feature (195)..(374): NCBI GI NO: 15238890 NR Description: putative protein; protein id: At5g18650
  misc_feature (191)..(382): NCBI GI NO: 30102616 NR Description: At3g62970 [Arabidopsis thaliana]
  misc_feature (191)..(382): NCBI GI NO: 30695702 NR Description: expressed protein [Arabidopsis thaliana]
  misc_feature (191)..(382): NCBI GI NO: 11358168 NR Description: hypothetical protein T20O10
QRIAEWHWVGSTPLHTVTRATARRGAARGASAEREQATAVRRAGHGAAPCFAPSPVRSRLTQVHASTYGILVWDQKRTQQQQRRKARAMDGDAGPEQHGCVHYRRGCKIRAPCCGEVFGCRHCHNEAKDSLEVSVHDRHVLPRHDIKLVICSLCNKEQDVSSLTKQGQCSSATVGVTCHTPHEKKTHLVCRQVQQDCANCGACLGKYFCAKCNLFDDDVSKNQFHCDGCGICRTGGAENFYHCGRCGCCYTTPLKDSHRCVDGAMHHNCPVCMEYLFDSMKAISVLHCGHTIHLECLYEMRAHQQFSCPVCLRSACNMSDIWQKLDQQVAASPMPAIYQKKMVWILCNDCGVTSNVQFHILAHKCPGCSSYNTRQTRGDPAACSRV

SEQ ID NO: 27846 - protein, 298 aa, Zea mays subsp. mays
  peptide (1)..(298): Ceres Seq. ID no. 12373221
  misc_feature (12)..(72): Pfam Name: Pfam Description:  CHY zinc finger
  misc_feature (103)..(294): NCBI GI NO: 37535002 NR Description: putative PGPD14 protein
  misc_feature (103)..(298): NCBI GI NO: 4105798 NR Description: PGPD14 [Petunia x hybrida]
  misc_feature (103)..(296): NCBI GI NO: 21593716 NR Description: PGPD14 protein [Arabidopsis thaliana]
  misc_feature (103)..(296): NCBI GI NO: 15237169 NR Description: PGPD14 protein; protein id: At5g22920
  misc_feature (66)..(287): NCBI GI NO: 34910658 NR Description: putative PGPD14 protein
  misc_feature (145)..(269): NCBI GI NO: 15451615 NR Description: Hypothetical protein with similarity to PGPD14
  misc_feature (107)..(286): NCBI GI NO: 15238890 NR Description: putative protein; protein id: At5g18650
  misc_feature (103)..(294): NCBI GI NO: 30102616 NR Description: At3g62970 [Arabidopsis thaliana]
  misc_feature (103)..(294): NCBI GI NO: 30695702 NR Description: expressed protein [Arabidopsis thaliana]
  misc_feature (103)..(294): NCBI GI NO: 11358168 NR Description: hypothetical protein T20O10
MDGDAGPEQHGCVHYRRGCKIRAPCCGEVFGCRHCHNEAKDSLEVSVHDRHVLPRHDIKLVICSLCNKEQDVSSLTKQGQCSSATVGVTCHTPHEKKTHLVCRQVQQDCANCGACLGKYFCAKCNLFDDDVSKNQFHCDGCGICRTGGAENFYHCGRCGCCYTTPLKDSHRCVDGAMHHNCPVCMEYLFDSMKAISVLHCGHTIHLECLYEMRAHQQFSCPVCLRSACNMSDIWQKLDQQVAASPMPAIYQKKMVWILCNDCGVTSNVQFHILAHKCPGCSSYNTRQTRGDPAACSRV

SEQ ID NO: 27847 - DNA, 1845 bp, Zea mays subsp. mays; identical to SEQ ID NO: 25753
  misc_feature (1)..(1845): Ceres Seq. ID no. 13492086

SEQ ID NO: 27848 - protein, 469 aa, Zea mays subsp. mays; identical to SEQ ID NO: 25754
  peptide (1)..(469): Ceres Seq. ID no. 13492087
  misc_feature (135)..(350): Pfam Name: Pfam Description:  Papain family cysteine protease
  misc_feature (1)..(469): NCBI GI NO: 6682829 NR Description: cysteine protease component of protease-inhibitorcomplex
  misc_feature (1)..(469): NCBI GI NO: 7435806 NR Description: cysteine proteinase mir3 (EC 3.4.22.-) - maize
  misc_feature (8)..(469): NCBI GI NO: 129231 NR Description: Oryzain alpha chain precursor
  misc_feature (8)..(469): NCBI GI NO: 38345906 NR Description: OSJNBb0059K02.8
  misc_feature (8)..(432): NCBI GI NO: 10241433 NR Description: putative oryzain alpha precursor
  misc_feature (8)..(455): NCBI GI NO: 14517542 NR Description: F2G19.31/F2G19.31 [Arabidopsis thaliana]
  misc_feature (8)..(455): NCBI GI NO: 18401614 NR Description: cysteine proteinase RD21A [Arabidopsis thaliana]
  misc_feature (8)..(434): NCBI GI NO: 18141285 NR Description: senescence-associated cysteine protease
  misc_feature (15)..(457): NCBI GI NO: 18422289 NR Description: cysteine proteinase RD21A [Arabidopsis thaliana]
  misc_feature (14)..(463): NCBI GI NO: 7435791 NR Description: cysteine proteinase (EC 3

SEQ ID NO: 27849 - protein, 441 aa, Zea mays subsp. mays; identical to SEQ ID NO: 25755
  peptide (1)..(441): Ceres Seq. ID no. 13492088
  misc_feature (107)..(322): Pfam Name: Pfam Description:  Papain family cysteine protease
  misc_feature (1)..(441): NCBI GI NO: 6682829 NR Description: cysteine protease component of protease-inhibitorcomplex
  misc_feature (1)..(441): NCBI GI NO: 7435806 NR Description: cysteine proteinase mir3 (EC 3.4.22.-) - maize
  misc_feature (1)..(441): NCBI GI NO: 129231 NR Description: Oryzain alpha chain precursor
  misc_feature (1)..(441): NCBI GI NO: 38345906 NR Description: OSJNBb0059K02.8
  misc_feature (1)..(404): NCBI GI NO: 10241433 NR Description: putative oryzain alpha precursor
  misc_feature (1)..(427): NCBI GI NO: 14517542 NR Description: F2G19.31/F2G19.31 [Arabidopsis thaliana]
  misc_feature (1)..(427): NCBI GI NO: 18401614 NR Description: cysteine proteinase RD21A [Arabidopsis thaliana]
  misc_feature (1)..(406): NCBI GI NO: 18141285 NR Description: senescence-associated cysteine protease
  misc_feature (1)..(429): NCBI GI NO: 18422289 NR Description: cysteine proteinase RD21A [Arabidopsis thaliana]
  misc_feature (1)..(435): NCBI GI NO: 7435791 NR Description: cysteine proteinase (EC 3

SEQ ID NO: 27850 - protein, 425 aa, Zea mays subsp. mays; identical to SEQ ID NO: 25756
  peptide (1)..(425): Ceres Seq. ID no. 13492089
  misc_feature (91)..(306): Pfam Name: Pfam Description:  Papain family cysteine protease
  misc_feature (1)..(425): NCBI GI NO: 6682829 NR Description: cysteine protease component of protease-inhibitorcomplex
  misc_feature (1)..(425): NCBI GI NO: 7435806 NR Description: cysteine proteinase mir3 (EC 3.4.22.-) - maize
  misc_feature (1)..(425): NCBI GI NO: 129231 NR Description: Oryzain alpha chain precursor
  misc_feature (1)..(425): NCBI GI NO: 38345906 NR Description: OSJNBb0059K02.8
  misc_feature (1)..(388): NCBI GI NO: 10241433 NR Description: putative oryzain alpha precursor
  misc_feature (1)..(411): NCBI GI NO: 14517542 NR Description: F2G19.31/F2G19.31 [Arabidopsis thaliana]
  misc_feature (1)..(411): NCBI GI NO: 18401614 NR Description: cysteine proteinase RD21A [Arabidopsis thaliana]
  misc_feature (1)..(390): NCBI GI NO: 18141285 NR Description: senescence-associated cysteine protease
  misc_feature (1)..(413): NCBI GI NO: 18422289 NR Description: cysteine proteinase RD21A [Arabidopsis thaliana]
  misc_feature (1)..(419): NCBI GI NO: 7435791 NR Description: cysteine proteinase (EC 3

SEQ ID NO: 27851 - DNA, 1382 bp, Zea mays subsp. mays
  misc_feature (1)..(1382): Ceres Seq. ID no. 12409212
aaagtggaagtggaatcgagtcaaatcgaccacttctctggcaagcccgcaggccgcagcccctcctccccccaagagccgccgaggctgctccccctagcaaacccgccatggccgagcgcctcgcagcatccgccgccaccctccgcgcctcggccgccaccaccccgttcgcccgccgcgcggcgccggccaaccgcgccttcttctcgccttcgctagctcgcgcgcgcgtcgctctccgcgccgcgccctctccgctcccgcagaaggcgagggtagtgaggtgcgcggctgtggcgatggcgtctgacgcggctcaggtgaaggccgcacgcgaggacatcagggagcttctcaggacgactcactgccaccccatcctggtccgtctaggatggcatgatgctggtacgtatgacaagaatattgaggagtggccacaacgaggtggagctaatggaagtttaagatttgatgttgagttgaaacatggagccaatgctggtctgataaatgctctaaagcttatccaaccaatcaaggacaagtaccctagtatcacttatgcagatttatttcagttggcaagtgctacagcaattgaggaagctggtggcccaaagattccaatgaaatacggacgagttgatgttacaggacctgagcagtgcccccctgaggggaaacttcctgatgctggcccaagttcacctgctgaccacttgagggaggtattctacagaatgggccttaatgacaaggaaattgttgccttgtctggagcacatacacttggaaggtccaggcctgaacggagtggctgggggaaaccagaaacaaaatatactaaaaatggtcctggtgcacctggttggcaatcatggacagttgaatggctgaggtttgataacagttacttcaaggatatcaaaagaaacgagatcaggatcttctggtcctacctacagatgctgctttatttgaggacccaaagttcaaggtctatgcggagaaatatgcagaggaccaagacgcattcttcagagactacgctgaggctcatgctaaactgagcgaattgggtgcgaagttccaaccaccgcagggattctctttggatgattagtgcggcaccagaaccctaaaccctctccttgaaaaggatcaagagggagcatacaattcattgttcttctcatatcatcgtacaagatggactggtccccctttttcatgatgctatatggagtcttctaatttagctagatttctgaaccgagcttgcaaataaaaaagaaccgacacagtggcactacataattttcagagccattgggagaactgacacagtgctatcagatttggttttatcccttcct

SEQ ID NO: 27852 - protein, 357 aa, Zea mays subsp. mays
  peptide (1)..(357): Ceres Seq. ID no. 12409213
  misc_feature (111)..(311): Pfam Name: Pfam Description:  Peroxidase
  misc_feature (41)..(311): NCBI GI NO: 32879781 NR Description: stromal ascorbate peroxidase
  misc_feature (15)..(311): NCBI GI NO: 32879783 NR Description: thylakoid-bound ascorbate peroxidase
  misc_feature (90)..(311): NCBI GI NO: 25992557 NR Description: thylakoid-bound ascorbate peroxidase
  misc_feature (26)..(311): NCBI GI NO: 21741210 NR Description: OSJNBb0086G13.5
  misc_feature (90)..(311): NCBI GI NO: 25992555 NR Description: thylakoid-bound ascorbate peroxidase
  misc_feature (29)..(311): NCBI GI NO: 3202026 NR Description: stromal L-ascorbate peroxidase precursor
  misc_feature (29)..(311): NCBI GI NO: 7484621 NR Description: L-ascorbate peroxidase (EC 1
  misc_feature (37)..(311): NCBI GI NO: 2392025 NR Description: stromal ascorbate peroxidase
  misc_feature (37)..(311): NCBI GI NO: 7484766 NR Description: L-ascorbate peroxidase (EC 1
  misc_feature (12)..(311): NCBI GI NO: 4996602 NR Description: thylakoid-bound ascorbate peroxidase
SGSGIESNRPLLWQARRPQPLLPPRAAEAAPPSKPAMAERLAASAATLRASAATTPFARRAAPANRAFFSPSLARARVALRAAPSPLPQKARVVRCAAVAMASDAAQVKAAREDIRELLRTTHCHPILVRLGWHDAGTYDKNIEEWPQRGGANGSLRFDVELKHGANAGLINALKLIQPIKDKYPSITYADLFQLASATAIEEAGGPKIPMKYGRVDVTGPEQCPPEGKLPDAGPSSPADHLREVFYRMGLNDKEIVALSGAHTLGRSRPERSGWGKPETKYTKNGPGAPGWQSWTVEWLRFDNSYFKDIKRNEIRIFWSYLQMLLYLRTQSSRSMRRNMQRTKTHSSETTLRLMLN

SEQ ID NO: 27853 - protein, 321 aa, Zea mays subsp. mays
  peptide (1)..(321): Ceres Seq. ID no. 12409214
  misc_feature (75)..(275): Pfam Name: Pfam Description:  Peroxidase
  misc_feature (5)..(275): NCBI GI NO: 32879781 NR Description: stromal ascorbate peroxidase
  misc_feature (1)..(275): NCBI GI NO: 32879783 NR Description: thylakoid-bound ascorbate peroxidase
  misc_feature (54)..(275): NCBI GI NO: 25992557 NR Description: thylakoid-bound ascorbate peroxidase
  misc_feature (1)..(275): NCBI GI NO: 21741210 NR Description: OSJNBb0086G13.5
  misc_feature (54)..(275): NCBI GI NO: 25992555 NR Description: thylakoid-bound ascorbate peroxidase
  misc_feature (1)..(275): NCBI GI NO: 3202026 NR Description: stromal L-ascorbate peroxidase precursor
  misc_feature (1)..(275): NCBI GI NO: 7484621 NR Description: L-ascorbate peroxidase (EC 1
  misc_feature (1)..(275): NCBI GI NO: 2392025 NR Description: stromal ascorbate peroxidase
  misc_feature (1)..(275): NCBI GI NO: 7484766 NR Description: L-ascorbate peroxidase (EC 1
  misc_feature (1)..(275): NCBI GI NO: 4996602 NR Description: thylakoid-bound ascorbate peroxidase
MAERLAASAATLRASAATTPFARRAAPANRAFFSPSLARARVALRAAPSPLPQKARVVRCAAVAMASDAAQVKAAREDIRELLRTTHCHPILVRLGWHDAGTYDKNIEEWPQRGGANGSLRFDVELKHGANAGLINALKLIQPIKDKYPSITYADLFQLASATAIEEAGGPKIPMKYGRVDVTGPEQCPPEGKLPDAGPSSPADHLREVFYRMGLNDKEIVALSGAHTLGRSRPERSGWGKPETKYTKNGPGAPGWQSWTVEWLRFDNSYFKDIKRNEIRIFWSYLQMLLYLRTQSSRSMRRNMQRTKTHSSETTLRLMLN

SEQ ID NO: 27854 - protein, 257 aa, Zea mays subsp. mays
  peptide (1)..(257): Ceres Seq. ID no. 12409215
  misc_feature (11)..(211): Pfam Name: Pfam Description:  Peroxidase
  misc_feature (1)..(211): NCBI GI NO: 32879781 NR Description: stromal ascorbate peroxidase
  misc_feature (1)..(211): NCBI GI NO: 32879783 NR Description: thylakoid-bound ascorbate peroxidase
  misc_feature (1)..(211): NCBI GI NO: 25992557 NR Description: thylakoid-bound ascorbate peroxidase
  misc_feature (1)..(211): NCBI GI NO: 21741210 NR Description: OSJNBb0086G13.5
  misc_feature (1)..(211): NCBI GI NO: 25992555 NR Description: thylakoid-bound ascorbate peroxidase
  misc_feature (1)..(211): NCBI GI NO: 3202026 NR Description: stromal L-ascorbate peroxidase precursor
  misc_feature (1)..(211): NCBI GI NO: 7484621 NR Description: L-ascorbate peroxidase (EC 1
  misc_feature (1)..(211): NCBI GI NO: 2392025 NR Description: stromal ascorbate peroxidase
  misc_feature (1)..(211): NCBI GI NO: 7484766 NR Description: L-ascorbate peroxidase (EC 1
  misc_feature (1)..(211): NCBI GI NO: 4996602 NR Description: thylakoid-bound ascorbate peroxidase
MASDAAQVKAAREDIRELLRTTHCHPILVRLGWHDAGTYDKNIEEWPQRGGANGSLRFDVELKHGANAGLINALKLIQPIKDKYPSITYADLFQLASATAIEEAGGPKIPMKYGRVDVTGPEQCPPEGKLPDAGPSSPADHLREVFYRMGLNDKEIVALSGAHTLGRSRPERSGWGKPETKYTKNGPGAPGWQSWTVEWLRFDNSYFKDIKRNEIRIFWSYLQMLLYLRTQSSRSMRRNMQRTKTHSSETTLRLMLN

SEQ ID NO: 27855 - DNA, 1522 bp, Zea mays subsp. mays
  misc_feature (1)..(1522): Ceres Seq. ID no. 12409208
aaaaacctcgcaagcgaccccagtaatggcgaccaaggcgctatccgtctcctcgctcacctccacggcctttgcctccttttccttgccgcggccccgcaggccttcaccttcgcctcccctcctccgccttctcggccctcgcccccgcgcctccactctctccgccgccgctcccggcgacgaggacggcgtcgacaccgtggagcagctcctccacccacgcccgcctgagacctcagcccccgccggatcccgcggccggatcgaccgcctcatgaagctccagcgccgcgccgacggcgacgccgtgcccgggggccggaggaggtggttcccttacctggacgcgttccggcccgcggccgggggcgcggagctgtccagcggggaggtcatagaggtgctggagccgcacatcctagaggcgcggcgggaccggattcgacaagccgttggcaaccggagctacgccgtttgcctcgtggtggaaggcctctccgacttcggcaacgtctcggccgcgttccgctccgcggacgcgctcggcgtgcagtccgtgcacgtcatttccttgatagcagcaaaaggtgcagaggtatagagacaacaggcatgtgagcatgggtgctgagaaatggcttgacattgagatatggaactcacctgcagaatgtttcagtgcattaaaaaaacgcggttatcgcattgcgaccacttatttgggaactgattcggtttgtgtgtatgatatggattggtctcaaccaacagctattgttgtgggcaatgagcttaggggtataagtgatgatgctctagaattgtcagatttgcactgcagcattccaatgaaaggcatggtggattcgtttaatgtatctgttgcagctggaatcctcatgcaccatgctgtttgtgatagagtttcccgcctgggccatcacggtgatctcttgcctgaagaaaataggatattgcttgctgagttctatctgcgacacagagaaagcacggctactatagttcatgaatatgccaaaatgaaggcaggaaaaattatgaccagactttgaaaacatcctgagaagctgagtgacgtgtctgtcaatcaagtcttggattatctggtgcatttttctaacagaaaacgaggctattttttcctggagtttaccgctgatcccaccagattgctgggaagacgaggatccaagcccaatcattgagcagagctgttaacgattacgcatatggttttcagtgacgtggacttttgctcccaaaacagtcgcccgttaactatttttgtatgtttttgttaggatgaaagcttaatatgtttccacttgtttttcacaaacgttggcggtggttgggtttgggcggcaacgctccatgttctacagacggttacgaccggaagcttggtgtaaccgtaccagtataacctgtccttggagggttgagagcttgagatgtaaacgaactgcacttgtctacggcaggatgatgcgtctgt

SEQ ID NO: 27856 - protein, 200 aa, Zea mays subsp. mays
  peptide (1)..(200): Ceres Seq. ID no. 12409209
  misc_feature (9)..(191): NCBI GI NO: 34393586 NR Description: putative rRNA methylase
  misc_feature (15)..(196): NCBI GI NO: 15242287 NR Description: rRNA methylase - like protein
  misc_feature (76)..(191): NCBI GI NO: 28207743 NR Description: CR004 protein [Chlamydomonas reinhardtii]
  misc_feature (142)..(190): NCBI GI NO: 27364301 NR Description: rRNA methylases [Vibrio vulnificus CMCP6]
  misc_feature (144)..(189): NCBI GI NO: 23475629 NR Description: hypothetical protein
  misc_feature (144)..(190): NCBI GI NO: 28896932 NR Description: tRNA methyltransferase
  misc_feature (142)..(191): NCBI GI NO: 11079208 NR Description: tRNA (Gm18) methyltransferase
  misc_feature (125)..(191): NCBI GI NO: 21673707 NR Description: tRNA methyltransferase SpoU
  misc_feature (140)..(192): NCBI GI NO: 33866213 NR Description: putative tRNA (guanosine-2'-O-)-methyltransferase
  misc_feature (133)..(190): NCBI GI NO: 15594398 NR Description: spoU protein (spoU) [Borrelia burgdorferi]
KTSQATPVMATKALSVSSLTSTAFASFSLPRPRRPSPSPPLLRLLGPRPRASTLSAAAPGDEDGVDTVEQLLHPRPPETSAPAGSRGRIDRLMKLQRRADGDAVPGGRRRWFPYLDAFRPAAGGAELSSGEVIEVLEPHILEARRDRIRQAVGNRSYAVCLVVEGLSDFGNVSAAFRSADALGVQSVHVISLIAAKGAEV

SEQ ID NO: 27857 - protein, 192 aa, Zea mays subsp. mays
  peptide (1)..(192): Ceres Seq. ID no. 12409210
  misc_feature (1)..(183): NCBI GI NO: 34393586 NR Description: putative rRNA methylase
  misc_feature (7)..(188): NCBI GI NO: 15242287 NR Description: rRNA methylase - like protein
  misc_feature (68)..(183): NCBI GI NO: 28207743 NR Description: CR004 protein [Chlamydomonas reinhardtii]
  misc_feature (134)..(182): NCBI GI NO: 27364301 NR Description: rRNA methylases [Vibrio vulnificus CMCP6]
  misc_feature (136)..(181): NCBI GI NO: 23475629 NR Description: hypothetical protein
  misc_feature (136)..(182): NCBI GI NO: 28896932 NR Description: tRNA methyltransferase
  misc_feature (134)..(183): NCBI GI NO: 11079208 NR Description: tRNA (Gm18) methyltransferase
  misc_feature (117)..(183): NCBI GI NO: 21673707 NR Description: tRNA methyltransferase SpoU
  misc_feature (132)..(184): NCBI GI NO: 33866213 NR Description: putative tRNA (guanosine-2'-O-)-methyltransferase
  misc_feature (125)..(182): NCBI GI NO: 15594398 NR Description: spoU protein (spoU) [Borrelia burgdorferi]
MATKALSVSSLTSTAFASFSLPRPRRPSPSPPLLRLLGPRPRASTLSAAAPGDEDGVDTVEQLLHPRPPETSAPAGSRGRIDRLMKLQRRADGDAVPGGRRRWFPYLDAFRPAAGGAELSSGEVIEVLEPHILEARRDRIRQAVGNRSYAVCLVVEGLSDFGNVSAAFRSADALGVQSVHVISLIAAKGAEV

SEQ ID NO: 27858 - protein, 150 aa, Zea mays subsp. mays
  peptide (1)..(150): Ceres Seq. ID no. 12409211
  misc_feature (1)..(95): Pfam Name: Pfam Description:  SpoU rRNA Methylase family
  misc_feature (1)..(150): NCBI GI NO: 34393586 NR Description: putative rRNA methylase
  misc_feature (1)..(142): NCBI GI NO: 15242287 NR Description: rRNA methylase - like protein
  misc_feature (1)..(137): NCBI GI NO: 28207743 NR Description: CR004 protein [Chlamydomonas reinhardtii]
  misc_feature (1)..(97): NCBI GI NO: 27364301 NR Description: rRNA methylases [Vibrio vulnificus CMCP6]
  misc_feature (1)..(125): NCBI GI NO: 23475629 NR Description: hypothetical protein
  misc_feature (1)..(119): NCBI GI NO: 28896932 NR Description: tRNA methyltransferase
  misc_feature (1)..(126): NCBI GI NO: 11079208 NR Description: tRNA (Gm18) methyltransferase
  misc_feature (1)..(97): NCBI GI NO: 21673707 NR Description: tRNA methyltransferase SpoU
  misc_feature (1)..(101): NCBI GI NO: 33866213 NR Description: putative tRNA (guanosine-2'-O-)-methyltransferase
  misc_feature (1)..(115): NCBI GI NO: 15606763 NR Description: rRNA methylase SpoU [Aquifex aeolicus]
MGAEKWLDIEIWNSPAECFSALKKRGYRIATTYLGTDSVCVYDMDWSQPTAIVVGNELRGISDDALELSDLHCSIPMKGMVDSFNVSVAAGILMHHAVCDRVSRLGHHGDLLPEENRILLAEFYLRHRESTATIVHEYAKMKAGKIMTRL

SEQ ID NO: 27859 - DNA, 924 bp, Zea mays subsp. mays
  misc_feature (1)..(924): Ceres Seq. ID no. 12340827
acccagggcagagtcgcagggtgacggggagagcccatcatggcgccgcagcagccgtgaagcacaagagcttttctgcagcacgacggctttgtcctctctcctttaaagcggactgctctcctcaattgtcagtcagtagcatccaattgattgttctatcctcttctctgttctcacccccttgcaagcaacaatcgttcaccgatcgatccagtgcgtcctgcatggaaactgccgccgtcgccgccgccggtgccgggcgccgcatcatggtggccgtggacgagggcgaggagagcctgcacgcgctcaactggtgcctcgccaacgtcgtctccccggcaggaggcgacacgctggtgctcgtccacgcccgccgcccgcgcccggtctacgccgccatggacagcgcagggtacatgatgacctcggacgtgctggcgagcgtcgagaggcacgccaacgcggtctcggcggcggcggtcgacaaggccaagcgcgtctgcgcggaccacccgcacgtcaaggtggagacgatggtggagagcggggacccgcgggacgtcatctgcgacgccgccaacaagatggccgcggacctgctcgtcatgggcagccatggttacggcttcatccagagggcgttcttgggcagcgtcagcaaccactgcgcgcagaactgcaaatgcccggtcctcattgtcaagaggcccaaggagtagaaaggctcctcgcatgtacgctgcagcttagccaataatgtttcatgggcgaccatataggcatatatgtacacacttcacatcccattgcatggcagtgtcttcccttccctagttcaacaactagctttctgctggaataaggtgttcagacaaatcttcttgcatttggtactcttgtttagagagaagcgttccg

SEQ ID NO: 27860 - protein, 240 aa, Zea mays subsp. mays
  peptide (1)..(240): Ceres Seq. ID no. 12340828
  misc_feature (87)..(214): Pfam Name: Pfam Description:  Universal stress protein family
  misc_feature (71)..(216): NCBI GI NO: 34905540 NR Description: B1146F03.27
  misc_feature (88)..(237): NCBI GI NO: 15228790 NR Description: putative protein; protein id: At3g62550
  misc_feature (79)..(237): NCBI GI NO: 34914610 NR Description: P0520B06.18
  misc_feature (82)..(239): NCBI GI NO: 20067187 NR Description: putative universal stress protein USP1
  misc_feature (80)..(239): NCBI GI NO: 22831145 NR Description: contains ESTsAU063900
  misc_feature (90)..(236): NCBI GI NO: 5669654 NR Description: ER6 protein [Lycopersicon esculentum]
  misc_feature (78)..(240): NCBI GI NO: 18399413 NR Description: ethylene-responsive protein, putative
  misc_feature (78)..(240): NCBI GI NO: 30681955 NR Description: ethylene-responsive protein -related
  misc_feature (78)..(240): NCBI GI NO: 21594903 NR Description: ethylene-responsive protein, putative
  misc_feature (71)..(239): NCBI GI NO: 40539010 NR Description: putative stress-related protein
PGQSRRVTGRAHHGAAAAVKHKSFSAARRLCPLSFKADCSPQLSVSSIQLIVLSSSLFSPPCKQQSFTDRSSASCMETAAVAAAGAGRRIMVAVDEGEESLHALNWCLANVVSPAGGDTLVLVHARRPRPVYAAMDSAGYMMTSDVLASVERHANAVSAAAVDKAKRVCADHPHVKVETMVESGDPRDVICDAANKMAADLLVMGSHGYGFIQRAFLGSVSNHCAQNCKCPVLIVKRPKE

SEQ ID NO: 27861 - protein, 165 aa, Zea mays subsp. mays
  peptide (1)..(165): Ceres Seq. ID no. 12340829
  misc_feature (12)..(139): Pfam Name: Pfam Description:  Universal stress protein family
  misc_feature (1)..(141): NCBI GI NO: 34905540 NR Description: B1146F03.27
  misc_feature (13)..(162): NCBI GI NO: 15228790 NR Description: putative protein; protein id: At3g62550
  misc_feature (4)..(162): NCBI GI NO: 34914610 NR Description: P0520B06.18
  misc_feature (7)..(164): NCBI GI NO: 20067187 NR Description: putative universal stress protein USP1
  misc_feature (5)..(164): NCBI GI NO: 22831145 NR Description: contains ESTsAU063900
  misc_feature (15)..(161): NCBI GI NO: 5669654 NR Description: ER6 protein [Lycopersicon esculentum]
  misc_feature (3)..(165): NCBI GI NO: 18399413 NR Description: ethylene-responsive protein, putative
  misc_feature (3)..(165): NCBI GI NO: 30681955 NR Description: ethylene-responsive protein -related
  misc_feature (3)..(165): NCBI GI NO: 21594903 NR Description: ethylene-responsive protein, putative
  misc_feature (1)..(164): NCBI GI NO: 40539010 NR Description: putative stress-related protein
METAAVAAAGAGRRIMVAVDEGEESLHALNWCLANVVSPAGGDTLVLVHARRPRPVYAAMDSAGYMMTSDVLASVERHANAVSAAAVDKAKRVCADHPHVKVETMVESGDPRDVICDAANKMAADLLVMGSHGYGFIQRAFLGSVSNHCAQNCKCPVLIVKRPKE

SEQ ID NO: 27862 - protein, 150 aa, Zea mays subsp. mays
  peptide (1)..(150): Ceres Seq. ID no. 12340830
  misc_feature (1)..(124): Pfam Name: Pfam Description:  Universal stress protein family
  misc_feature (1)..(126): NCBI GI NO: 34905540 NR Description: B1146F03.27
  misc_feature (1)..(147): NCBI GI NO: 15228790 NR Description: putative protein; protein id: At3g62550
  misc_feature (1)..(147): NCBI GI NO: 34914610 NR Description: P0520B06.18
  misc_feature (1)..(149): NCBI GI NO: 20067187 NR Description: putative universal stress protein USP1
  misc_feature (1)..(149): NCBI GI NO: 22831145 NR Description: contains ESTsAU063900
  misc_feature (1)..(146): NCBI GI NO: 5669654 NR Description: ER6 protein [Lycopersicon esculentum]
  misc_feature (1)..(150): NCBI GI NO: 18399413 NR Description: ethylene-responsive protein, putative
  misc_feature (1)..(150): NCBI GI NO: 30681955 NR Description: ethylene-responsive protein -related
  misc_feature (1)..(150): NCBI GI NO: 21594903 NR Description: ethylene-responsive protein, putative
  misc_feature (1)..(149): NCBI GI NO: 40539010 NR Description: putative stress-related protein
MVAVDEGEESLHALNWCLANVVSPAGGDTLVLVHARRPRPVYAAMDSAGYMMTSDVLASVERHANAVSAAAVDKAKRVCADHPHVKVETMVESGDPRDVICDAANKMAADLLVMGSHGYGFIQRAFLGSVSNHCAQNCKCPVLIVKRPKE

SEQ ID NO: 27863 - DNA, 2074 bp, Zea mays subsp. mays
  misc_feature (1)..(2074): Ceres Seq. ID no. 12409204
cggaacgcgtacaggcgccagctgctggctctgtcgcggcggatccggctcctcggccccttcgccgaggagctgcgggaggcacgccggggggtccgcggagcaggaggagcaggagcgggcgctggcgcctctcgccgacgcgctggagaaggcactcgacctgctccagctcggccgcgacggcagcaggatattcctggtccttgatagggatgaagtaatgaagaagttccatgaatcaattgctcagctggagcaagccctgtgcgattttccatatgataaactggatatatctgatgaagctagagagcaggttgagttagtgcatgcacagctcaaaagagccaaagagcgggtcgacatgcccgatgacgagttctacaacgaattatgttcgctgtataacaagagccacgacccaagtgctgagttggatatccttgggagattgtcggagaagttacacctgacgaccatcgctgatctcacgcaagaatcacttgctttgcacgagatggtggcatctggtggtggcaacgatcctggagaacacattgagaaaatgtcgatgctgctgaagaagatcaaggactttgtgcagactcagaaccctgaaacgggcccgctggtgactgccaagccaatgggttccaacgggaagccaagacctgtaaacgttcctgacgagttccggtgcccaatctctcttgagctgatgaaagacccggttatcgttgctactggccagacatacgagcgggcattgatcgagaaatggctagcttccgggcaccatacctgtccaagcactcaacaaaggatgccaaacacgacgctgacaccgaactatgttctcagaagccttatcacgcagtggtgtgaggccaacgggatcgatccaccgaagcgcccgacgcagcagcctgacagacctacatcttcatgctcttcgagcgagcgcgccagcatcgacgctctcctctccaagctatgctccgcagatcccgaggaacagagatcggctgccgcagagctccggctcctagcgaagcggaacgcgaacaaccggatctgcatcgccgaggccggtgccatccccttgctactgagcctcctgtcttcgtctgacctgcagacgcaggagcacgccgtgacggcgcttctgaacctctccatacacgaggacaacaaggcgagcatcatactgtccggcgctgtcccgggcatagttcacgtcctgaagaacgggagcatggaggcacgggagaacgctgcggccacactcttcagcctgtcggtggtggacgaatacaaggtcacgatcgggggcacaggagccatccctgccctcgtggtcttgctgagcgagggcaggcagcgcgggaagaaggacgcggcggctgccctgttcaacctgtgcatctaccaggggaacaagggccgcgccatacgggctggcctcgtgccactcgtcatggggctcgtgacgaaccccaccggagctctgctggacgaggccatggcgatcctgtcgatactgtccagccaccccgagggcaaggccgcgatcggggcggcggagcccgtccccgtcctcgtggagatgatcgcgggtgggtcgccgaggaacagggagaacgctgccgccgtgatgctgcacctgtccgccagcgtgcggcagtccgcgcatctggctccggcgcaggagtgcggcatcatggccccgctgcgggagctggcactgaatggcacggggagggggaagagaaaggccgtgcagctgctcgagcggatgagcaggttcctggtccagcagcaggaggacgcggtggatccacgtgtgcaggagctggaggagatcgagcgccagcttgccgcctttggacctggcgttacggaggctgatgtccttcaacagttgggagctctttaacctatgggacatttttcactatgatactactatactacatagaaaagttctagcggcggactttattatcagtaaaatctcaattcttgctactgaatgttagcgtgggtttcggatttcaagatttttatggtc

SEQ ID NO: 27864 - protein, 645 aa, Zea mays subsp. mays
  peptide (1)..(645): Ceres Seq. ID no. 12409205
  misc_feature (228)..(301): Pfam Name: Pfam Description:  U-box domain
  misc_feature (36)..(620): NCBI GI NO: 15231445 NR Description: arm repeat containing protein homolog
  misc_feature (37)..(609): NCBI GI NO: 18401867 NR Description: expressed protein; protein id: At2g28830.1
  misc_feature (37)..(609): NCBI GI NO: 14334730 NR Description: unknown protein [Arabidopsis thaliana]
  misc_feature (35)..(609): NCBI GI NO: 22331792 NR Description: putative protein; protein id: At3g54850
  misc_feature (35)..(609): NCBI GI NO: 7486336 NR Description: hypothetical protein F28P10
  misc_feature (52)..(602): NCBI GI NO: 15238931 NR Description: arm repeat containing protein
  misc_feature (84)..(602): NCBI GI NO: 5902398 NR Description: Unknown protein [Arabidopsis thaliana]
  misc_feature (84)..(602): NCBI GI NO: 25354708 NR Description: unknown protein F23N20.1
  misc_feature (222)..(602): NCBI GI NO: 15219996 NR Description: unknown protein; protein id: At1g23030.1
  misc_feature (222)..(602): NCBI GI NO: 27311825 NR Description: unknown protein [Arabidopsis thaliana]
GTRTGASCWLCRGGSGSSAPSPRSCGRHAGGSAEQEEQERALAPLADALEKALDLLQLGRDGSRIFLVLDRDEVMKKFHESIAQLEQALCDFPYDKLDISDEAREQVELVHAQLKRAKERVDMPDDEFYNELCSLYNKSHDPSAELDILGRLSEKLHLTTIADLTQESLALHEMVASGGGNDPGEHIEKMSMLLKKIKDFVQTQNPETGPLVTAKPMGSNGKPRPVNVPDEFRCPISLELMKDPVIVATGQTYERALIEKWLASGHHTCPSTQQRMPNTTLTPNYVLRSLITQWCEANGIDPPKRPTQQPDRPTSSCSSSERASIDALLSKLCSADPEEQRSAAAELRLLAKRNANNRICIAEAGAIPLLLSLLSSSDLQTQEHAVTALLNLSIHEDNKASIILSGAVPGIVHVLKNGSMEARENAAATLFSLSVVDEYKVTIGGTGAIPALVVLLSEGRQRGKKDAAAALFNLCIYQGNKGRAIRAGLVPLVMGLVTNPTGALLDEAMAILSILSSHPEGKAAIGAAEPVPVLVEMIAGGSPRNRENAAAVMLHLSASVRQSAHLAPAQECGIMAPLRELALNGTGRGKRKAVQLLERMSRFLVQQQEDAVDPRVQELEEIERQLAAFGPGVTEADVLQQLGAL

SEQ ID NO: 27865 - protein, 571 aa, Zea mays subsp. mays
  peptide (1)..(571): Ceres Seq. ID no. 12409206
  misc_feature (154)..(227): Pfam Name: Pfam Description:  U-box domain
  misc_feature (1)..(546): NCBI GI NO: 15231445 NR Description: arm repeat containing protein homolog
  misc_feature (1)..(535): NCBI GI NO: 18401867 NR Description: expressed protein; protein id: At2g28830.1
  misc_feature (1)..(535): NCBI GI NO: 14334730 NR Description: unknown protein [Arabidopsis thaliana]
  misc_feature (1)..(535): NCBI GI NO: 22331792 NR Description: putative protein; protein id: At3g54850
  misc_feature (1)..(535): NCBI GI NO: 7486336 NR Description: hypothetical protein F28P10
  misc_feature (1)..(528): NCBI GI NO: 15238931 NR Description: arm repeat containing protein
  misc_feature (10)..(528): NCBI GI NO: 5902398 NR Description: Unknown protein [Arabidopsis thaliana]
  misc_feature (10)..(528): NCBI GI NO: 25354708 NR Description: unknown protein F23N20.1
  misc_feature (148)..(528): NCBI GI NO: 15219996 NR Description: unknown protein; protein id: At1g23030.1
  misc_feature (148)..(528): NCBI GI NO: 27311825 NR Description: unknown protein [Arabidopsis thaliana]
MKKFHESIAQLEQALCDFPYDKLDISDEAREQVELVHAQLKRAKERVDMPDDEFYNELCSLYNKSHDPSAELDILGRLSEKLHLTTIADLTQESLALHEMVASGGGNDPGEHIEKMSMLLKKIKDFVQTQNPETGPLVTAKPMGSNGKPRPVNVPDEFRCPISLELMKDPVIVATGQTYERALIEKWLASGHHTCPSTQQRMPNTTLTPNYVLRSLITQWCEANGIDPPKRPTQQPDRPTSSCSSSERASIDALLSKLCSADPEEQRSAAAELRLLAKRNANNRICIAEAGAIPLLLSLLSSSDLQTQEHAVTALLNLSIHEDNKASIILSGAVPGIVHVLKNGSMEARENAAATLFSLSVVDEYKVTIGGTGAIPALVVLLSEGRQRGKKDAAAALFNLCIYQGNKGRAIRAGLVPLVMGLVTNPTGALLDEAMAILSILSSHPEGKAAIGAAEPVPVLVEMIAGGSPRNRENAAAVMLHLSASVRQSAHLAPAQECGIMAPLRELALNGTGRGKRKAVQLLERMSRFLVQQQEDAVDPRVQELEEIERQLAAFGPGVTEADVLQQLGAL

SEQ ID NO: 27866 - protein, 523 aa, Zea mays subsp. mays
  peptide (1)..(523): Ceres Seq. ID no. 12409207
  misc_feature (106)..(179): Pfam Name: Pfam Description:  U-box domain
  misc_feature (1)..(498): NCBI GI NO: 15231445 NR Description: arm repeat containing protein homolog
  misc_feature (1)..(487): NCBI GI NO: 18401867 NR Description: expressed protein; protein id: At2g28830.1
  misc_feature (1)..(487): NCBI GI NO: 14334730 NR Description: unknown protein [Arabidopsis thaliana]
  misc_feature (1)..(487): NCBI GI NO: 22331792 NR Description: putative protein; protein id: At3g54850
  misc_feature (1)..(487): NCBI GI NO: 7486336 NR Description: hypothetical protein F28P10
  misc_feature (1)..(480): NCBI GI NO: 15238931 NR Description: arm repeat containing protein
  misc_feature (1)..(480): NCBI GI NO: 5902398 NR Description: Unknown protein [Arabidopsis thaliana]
  misc_feature (1)..(480): NCBI GI NO: 25354708 NR Description: unknown protein F23N20.1
  misc_feature (100)..(480): NCBI GI NO: 15219996 NR Description: unknown protein; protein id: At1g23030.1
  misc_feature (100)..(480): NCBI GI NO: 27311825 NR Description: unknown protein [Arabidopsis thaliana]
MPDDEFYNELCSLYNKSHDPSAELDILGRLSEKLHLTTIADLTQESLALHEMVASGGGNDPGEHIEKMSMLLKKIKDFVQTQNPETGPLVTAKPMGSNGKPRPVNVPDEFRCPISLELMKDPVIVATGQTYERALIEKWLASGHHTCPSTQQRMPNTTLTPNYVLRSLITQWCEANGIDPPKRPTQQPDRPTSSCSSSERASIDALLSKLCSADPEEQRSAAAELRLLAKRNANNRICIAEAGAIPLLLSLLSSSDLQTQEHAVTALLNLSIHEDNKASIILSGAVPGIVHVLKNGSMEARENAAATLFSLSVVDEYKVTIGGTGAIPALVVLLSEGRQRGKKDAAAALFNLCIYQGNKGRAIRAGLVPLVMGLVTNPTGALLDEAMAILSILSSHPEGKAAIGAAEPVPVLVEMIAGGSPRNRENAAAVMLHLSASVRQSAHLAPAQECGIMAPLRELALNGTGRGKRKAVQLLERMSRFLVQQQEDAVDPRVQELEEIERQLAAFGPGVTEADVLQQLGAL

SEQ ID NO: 27867 - DNA, 1237 bp, Zea mays subsp. mays
  misc_feature (1)..(1237): Ceres Seq. ID no. 12349150
atccctgtctctcgctttccctaacccacaccagaataccagatcgagcaccgatctagggttgcacctcttctgctagccggctggcgaggagccgttcggcatctggacgcggccaagggagatgaagctcgcggggctcaagtctgtggacggcgcccacgaggagtccatctgggcggcggcgtgggcgcccgccgctgaccaccgccccacggcggtgctcctcactggcgcgctcgacgagaccgtccgcgcttggctccccgacgacctcgctgccttggggtcccccacacggggccacgcgctcggagtcgtctccctcgccgcccaccccgccggctcgctcgccgccgccgtgtcgctcgacagcttcatccgcgtctttgacgtcgacacgggggcatccgtcgccacgctggaggcgccgccgtccgagatttggggcgtccagttccatcccaagggtaatgctctggccgcagccggtggtggcagtggatcagtgaagctgtgggacacggagaagtggaaggcgatcaccagcctcgccgtcccacgcccggagggagctcgccccgacaagacaggcagcggcaagttcgtcctgtcagtcgcctggagccccgacggaaggctcctagcatgcgggtccatggacggcacgatcgccgtctacgacgcggtccgcatgaagttcctgcaccacctggagggccaccacatgcccggtgcggtccatggtgttctccccggtggacccgcacgtgcttttcacggcctgcgacgactgccacgtccacatctacgacgccagggagaagggcctcgtcggggccatgtcgggccacgcgagctgggtgctgagcatcgacgcgagccccgacggcctggcggtggccacggggtcgagcgaccgcaccgtccggctctgggacctcaacatgaggacctcggtgcagaccatgagcaaccactccgatcaggtgtgggccgtggccttcaggccaccaggcggtgccggagtccgagcagggcgtctggctagcgcgtcggatgacaagagcgtctccctgtacgattactcgtaggtttttgtttccttataaaccgttgcaaatgcctctgttgtaccgaccagagatttgaattcgggcatggtggttggaagaattgttgtacgcagcacagtagtcgaggtgttaaattgcaaggaaagagtttatttcgtgtt

SEQ ID NO: 27868 - protein, 308 aa, Zea mays subsp. mays
  peptide (1)..(308): Ceres Seq. ID no. 12349151
  misc_feature (1)..(220): NCBI GI NO: 15233721 NR Description: G-protein beta family; protein id: At4g29830
  misc_feature (12)..(203): NCBI GI NO: 38541742 NR Description: Unknown (protein for MGC:77675) [Danio rerio]
  misc_feature (12)..(203): NCBI GI NO: 37590940 NR Description: Unknown (protein for MGC:75826)
  misc_feature (12)..(203): NCBI GI NO: 13376840 NR Description: recombination protein REC14 [Homo sapiens]
  misc_feature (12)..(203): NCBI GI NO: 13277350 NR Description: meiotic recombination protein REC14 [Mus musculus]
  misc_feature (12)..(203): NCBI GI NO: 12849020 NR Description: unnamed protein product [Mus musculus]
  misc_feature (12)..(203): NCBI GI NO: 33150742 NR Description: G protein beta subunit-like protein [Homo sapiens]
  misc_feature (29)..(203): NCBI GI NO: 21356075 NR Description: CG3909-PA [Drosophila melanogaster]
  misc_feature (12)..(203): NCBI GI NO: 26345856 NR Description: unnamed protein product [Mus musculus]
  misc_feature (34)..(202): NCBI GI NO: 13173173 NR Description: unknown protein i8 [Aedes aegypti]
MKLAGLKSVDGAHEESIWAAAWAPAADHRPTAVLLTGALDETVRAWLPDDLAALGSPTRGHALGVVSLAAHPAGSLAAAVSLDSFIRVFDVDTGASVATLEAPPSEIWGVQFHPKGNALAAAGGGSGSVKLWDTEKWKAITSLAVPRPEGARPDKTGSGKFVLSVAWSPDGRLLACGSMDGTIAVYDAVRMKFLHHLEGHHMPGAVHGVLPGGPARAFHGLRRLPRPHLRRQGEGPRRGHVGPRELGAEHRREPRRPGGGHGVERPHRPALGPQHEDLGADHEQPLRSGVGRGLQATRRCRSPSRASG

SEQ ID NO: 27869 - DNA, 1106 bp, Zea mays subsp. mays
  misc_feature (1)..(1106): Ceres Seq. ID no. 13493222
aacggaggtgctttgagaaatattgagaaagagtatgaagatttcaacagaattttatcttctcagactatagacccattgagagcaatggctatgggtggacccctggaagatgctcgtggtcttgcacagcgctatagcaggatgagacatgaagctgagatcctctctactgaaattgctagaagaaaggcacgggtaagagaagctccaattgctgagcacactacaaagcttcagcaatcagaagctagaatgatagagcacaaagcaagcatggccgtgttagggaaggaagcagcagctgcacttgcagctgtcgagtctcaacagcaacgagtgacccttcagaggctggttggcacggcggaagcagaaaagttattccatctgagattagctgctatacttgatgacgttgaggcagagatgtcctctgagaagcaaaggagagaatctgcaccacctatcatatcttcacataagcgtgctgagaaagctcagtacttccttgctgaggtaatgcataatttcaatggaaccacggagaaggaactgagcttaattgttggcgattatgttgttgttcgtcagattgctcccaacggctgggcggaaggagaatgccgagggaaggctggctggtttccggctgcctatgttgagaggcgcgagaatatccccccgaataaagttttccctcaagtataagatcataagaggggtcatctgtttccactgataagcagtttggtttggcattgaggagctgcaaggctgtatctaacttctgattggtttgatgctccgtatggcgtatcttgtgcatcctatgttcttgtggtggtctagacttggaataagatatgtcggcacgtgctctgcgcctgtgcctgcgcgcacattgatgaagatgtcgctttgcatgtgtccgcagtgtgctactgcttgcggcagcgtaggtcatgttgaatgagctttcctttactgacagatttcgagtgtaaattggttcttgcacttttttttcgttagggtgtatcagtagttctgtacaatatgtttttaatgagaccattcggccatcagagctttgatctgtctcc

SEQ ID NO: 27870 - protein, 236 aa, Zea mays subsp. mays
  peptide (1)..(236): Ceres Seq. ID no. 13493223
  misc_feature (170)..(224): Pfam Name: Pfam Description:  SH3 domain
  misc_feature (2)..(235): NCBI GI NO: 22093679 NR Description: putative SH3
  misc_feature (2)..(236): NCBI GI NO: 21928139 NR Description: AT4g18060/F15J5_30 [Arabidopsis thaliana]
  misc_feature (2)..(236): NCBI GI NO: 22328762 NR Description: SH3 domain-containing protein 3
  misc_feature (2)..(236): NCBI GI NO: 16974680 NR Description: SH3 domain-containing protein 3
  misc_feature (3)..(160): NCBI GI NO: 38344978 NR Description: OSJNBa0011L07.8
  misc_feature (169)..(236): NCBI GI NO: 38344978 NR Description: OSJNBa0011L07.8
  misc_feature (30)..(156): NCBI GI NO: 37535998 NR Description: unknown protein
  misc_feature (165)..(232): NCBI GI NO: 37535998 NR Description: unknown protein
  misc_feature (2)..(161): NCBI GI NO: 15221714 NR Description: SH3 domain-containing protein 1
  misc_feature (164)..(232): NCBI GI NO: 15221714 NR Description: SH3 domain-containing protein 1
NGGALRNIEKEYEDFNRILSSQTIDPLRAMAMGGPLEDARGLAQRYSRMRHEAEILSTEIARRKARVREAPIAEHTTKLQQSEARMIEHKASMAVLGKEAAAALAAVESQQQRVTLQRLVGTAEAEKLFHLRLAAILDDVEAEMSSEKQRRESAPPIISSHKRAEKAQYFLAEVMHNFNGTTEKELSLIVGDYVVVRQIAPNGWAEGECRGKAGWFPAAYVERRENIPPNKVFPQV

SEQ ID NO: 27871 - protein, 207 aa, Zea mays subsp. mays
  peptide (1)..(207): Ceres Seq. ID no. 13493224
  misc_feature (141)..(195): Pfam Name: Pfam Description:  SH3 domain
  misc_feature (1)..(206): NCBI GI NO: 22093679 NR Description: putative SH3
  misc_feature (1)..(207): NCBI GI NO: 21928139 NR Description: AT4g18060/F15J5_30 [Arabidopsis thaliana]
  misc_feature (1)..(207): NCBI GI NO: 22328762 NR Description: SH3 domain-containing protein 3
  misc_feature (1)..(207): NCBI GI NO: 16974680 NR Description: SH3 domain-containing protein 3
  misc_feature (1)..(131): NCBI GI NO: 38344978 NR Description: OSJNBa0011L07.8
  misc_feature (140)..(207): NCBI GI NO: 38344978 NR Description: OSJNBa0011L07.8
  misc_feature (1)..(127): NCBI GI NO: 37535998 NR Description: unknown protein
  misc_feature (136)..(203): NCBI GI NO: 37535998 NR Description: unknown protein
  misc_feature (1)..(132): NCBI GI NO: 15221714 NR Description: SH3 domain-containing protein 1
  misc_feature (135)..(203): NCBI GI NO: 15221714 NR Description: SH3 domain-containing protein 1
MAMGGPLEDARGLAQRYSRMRHEAEILSTEIARRKARVREAPIAEHTTKLQQSEARMIEHKASMAVLGKEAAAALAAVESQQQRVTLQRLVGTAEAEKLFHLRLAAILDDVEAEMSSEKQRRESAPPIISSHKRAEKAQYFLAEVMHNFNGTTEKELSLIVGDYVVVRQIAPNGWAEGECRGKAGWFPAAYVERRENIPPNKVFPQV

SEQ ID NO: 27872 - protein, 205 aa, Zea mays subsp. mays
  peptide (1)..(205): Ceres Seq. ID no. 13493225
  misc_feature (139)..(193): Pfam Name: Pfam Description:  SH3 domain
  misc_feature (1)..(204): NCBI GI NO: 22093679 NR Description: putative SH3
  misc_feature (1)..(205): NCBI GI NO: 21928139 NR Description: AT4g18060/F15J5_30 [Arabidopsis thaliana]
  misc_feature (1)..(205): NCBI GI NO: 22328762 NR Description: SH3 domain-containing protein 3
  misc_feature (1)..(205): NCBI GI NO: 16974680 NR Description: SH3 domain-containing protein 3
  misc_feature (1)..(129): NCBI GI NO: 38344978 NR Description: OSJNBa0011L07.8
  misc_feature (138)..(205): NCBI GI NO: 38344978 NR Description: OSJNBa0011L07.8
  misc_feature (1)..(125): NCBI GI NO: 37535998 NR Description: unknown protein
  misc_feature (134)..(201): NCBI GI NO: 37535998 NR Description: unknown protein
  misc_feature (1)..(130): NCBI GI NO: 15221714 NR Description: SH3 domain-containing protein 1
  misc_feature (133)..(201): NCBI GI NO: 15221714 NR Description: SH3 domain-containing protein 1
MGGPLEDARGLAQRYSRMRHEAEILSTEIARRKARVREAPIAEHTTKLQQSEARMIEHKASMAVLGKEAAAALAAVESQQQRVTLQRLVGTAEAEKLFHLRLAAILDDVEAEMSSEKQRRESAPPIISSHKRAEKAQYFLAEVMHNFNGTTEKELSLIVGDYVVVRQIAPNGWAEGECRGKAGWFPAAYVERRENIPPNKVFPQV

SEQ ID NO: 27873 - DNA, 1506 bp, Zea mays subsp. mays
  misc_feature (1)..(1506): Ceres Seq. ID no. 12386913
actacataggtgccggactcgtcccagcgaagaaccggacgagcgagcaagaggcctcctcctcaagcttcgaatcctccccttccgcgctttccctccccctcctcctcctcccctttccagtccccaccccagcgaagcttccaaagccgccccaaccccaacggccgcccggcctgatcgagcagacagctgccgcggccctccccgccccgcacgcgacctcggagccatggagaagtacgagctgctgaaggacatcggcgccggcaacttcggcgtggcgcggctcatgcggaacaaggagaccaaggagctggtcgccatgaagtacatcccccggggccaaaagatcgacgagaatgtggcgagggagatcatcaaccaccgctcgctgcgccaccccaacatcatccggttcaaggaggtggtgctgacgccgacgcacctggcgatcgtgatggagtacgccgccggcggcgagctgttcgaccggatctgcaacgccgggaggttcagcgaggacgaggcgaggtacttcttccagcagctgatttgtggcgtcagctactgccactccatgcaaatctgccaccgagacttgaagctggagaacacgctgctggacggcagcccggcgcctcgcctcaagatctgcgacttcggttactccaagtcgtcgctgctgcactcgaagcccaagtcgacggtcggcacgccgggcgtacatcgcccccgaggtgctctcccgccggggaatacgacggcaagacagccgatgtgtggtcctgtggagtcactctttatgtgatgctggtcggtggttacccttttgaggacccagacgacccaaagaatttcagaaagacgatcgggaggatcatgtcaatccaatacaaaataccagagtatgtgcacgtgtcgcaagactgcaaggagctgctttcaaggatctttgttgcaaactctgcaaagagaataacgatcagggagatcaggaaccacccctggttcctgaagaacctgcccagagagctcacggaggctgcgcaggccatgtactacaagaaagacaacagcgccccgacctactccgtccagtccgtggaggagatcatgaagatcgtggagaaggcgcggacgccgcctccttcctccacccctgtggctggcttcggttgggcggaggaggacgagcaggaggacagcaaggaaccagacgaggaacacgaggacggcgaggacgagtacgagaagcaggtgaagcaagtccacgccagcggggagtttcatctcagctgctgatggttttcgccggcctgctagtctgtggtaccagccgatgatggacctgctagtctgtggtcttgtttccaagttttctttcattttttctttcttttgctgtggtgccgcaagactgcaacagttgtaaattattgaagggggttccagcgttgcccttgtattgactgattcaaactagcatggggaacatgattatgg

SEQ ID NO: 27874 - protein, 269 aa, Zea mays subsp. mays
  peptide (1)..(269): Ceres Seq. ID no. 12386914
  misc_feature (81)..(245): Pfam Name: Pfam Description:  Protein kinase domain
  misc_feature (78)..(245): NCBI GI NO: 19568098 NR Description: osmotic stress-activated protein kinase
  misc_feature (78)..(245): NCBI GI NO: 1362051 NR Description: protein kinase SPK-3 (EC 2.7.1.-) - soybean
  misc_feature (78)..(245): NCBI GI NO: 2129803 NR Description: probable serine/threonine-specific protein kinase
  misc_feature (78)..(245): NCBI GI NO: 1362026 NR Description: probable serine/threonine-specific protein kinase
  misc_feature (78)..(245): NCBI GI NO: 15220251 NR Description: Ser/Thr kinase; protein id: At1g10940
  misc_feature (78)..(245): NCBI GI NO: 1161254 NR Description: protein kinase [Glycine max]
  misc_feature (78)..(245): NCBI GI NO: 21593536 NR Description: serine/threonine-protein kinase
  misc_feature (78)..(245): NCBI GI NO: 7434329 NR Description: protein kinase PK1 (EC 2
  misc_feature (78)..(245): NCBI GI NO: 15242858 NR Description: serine/threonine-protein kinase
  misc_feature (78)..(245): NCBI GI NO: 21618062 NR Description: putative serine/threonine-protein kinase
LHRCRTRPSEEPDERARGLLLKLRILPFRAFPPPPPPPLSSPHPSEASKAAPTPTAARPDRADSCRGPPRPARDLGAMEKYELLKDIGAGNFGVARLMRNKETKELVAMKYIPRGQKIDENVAREIINHRSLRHPNIIRFKEVVLTPTHLAIVMEYAAGGELFDRICNAGRFSEDEARYFFQQLICGVSYCHSMQICHRDLKLENTLLDGSPAPRLKICDFGYSKSSLLHSKPKSTVGTPGVHRPRGALPPGNTTARQPMCGPVESLFM

SEQ ID NO: 27875 - protein, 192 aa, Zea mays subsp. mays
  peptide (1)..(192): Ceres Seq. ID no. 12386915
  misc_feature (4)..(168): Pfam Name: Pfam Description:  Protein kinase domain
  misc_feature (1)..(168): NCBI GI NO: 19568098 NR Description: osmotic stress-activated protein kinase
  misc_feature (1)..(168): NCBI GI NO: 1362051 NR Description: protein kinase SPK-3 (EC 2.7.1.-) - soybean
  misc_feature (1)..(168): NCBI GI NO: 2129803 NR Description: probable serine/threonine-specific protein kinase
  misc_feature (1)..(168): NCBI GI NO: 1362026 NR Description: probable serine/threonine-specific protein kinase
  misc_feature (1)..(168): NCBI GI NO: 15220251 NR Description: Ser/Thr kinase; protein id: At1g10940
  misc_feature (1)..(168): NCBI GI NO: 1161254 NR Description: protein kinase [Glycine max]
  misc_feature (1)..(168): NCBI GI NO: 21593536 NR Description: serine/threonine-protein kinase
  misc_feature (1)..(168): NCBI GI NO: 7434329 NR Description: protein kinase PK1 (EC 2
  misc_feature (1)..(168): NCBI GI NO: 15242858 NR Description: serine/threonine-protein kinase
  misc_feature (1)..(168): NCBI GI NO: 21618062 NR Description: putative serine/threonine-protein kinase
MEKYELLKDIGAGNFGVARLMRNKETKELVAMKYIPRGQKIDENVAREIINHRSLRHPNIIRFKEVVLTPTHLAIVMEYAAGGELFDRICNAGRFSEDEARYFFQQLICGVSYCHSMQICHRDLKLENTLLDGSPAPRLKICDFGYSKSSLLHSKPKSTVGTPGVHRPRGALPPGNTTARQPMCGPVESLFM

SEQ ID NO: 27876 - protein, 172 aa, Zea mays subsp. mays
  peptide (1)..(172): Ceres Seq. ID no. 12386916
  misc_feature (1)..(148): Pfam Name: Pfam Description:  Protein kinase domain
  misc_feature (1)..(148): NCBI GI NO: 19568098 NR Description: osmotic stress-activated protein kinase
  misc_feature (1)..(148): NCBI GI NO: 1362051 NR Description: protein kinase SPK-3 (EC 2.7.1.-) - soybean
  misc_feature (1)..(148): NCBI GI NO: 2129803 NR Description: probable serine/threonine-specific protein kinase
  misc_feature (1)..(148): NCBI GI NO: 1362026 NR Description: probable serine/threonine-specific protein kinase
  misc_feature (1)..(148): NCBI GI NO: 15220251 NR Description: Ser/Thr kinase; protein id: At1g10940
  misc_feature (1)..(148): NCBI GI NO: 1161254 NR Description: protein kinase [Glycine max]
  misc_feature (1)..(148): NCBI GI NO: 21593536 NR Description: serine/threonine-protein kinase
  misc_feature (1)..(148): NCBI GI NO: 7434329 NR Description: protein kinase PK1 (EC 2
  misc_feature (1)..(148): NCBI GI NO: 15242858 NR Description: serine/threonine-protein kinase
  misc_feature (1)..(148): NCBI GI NO: 21618062 NR Description: putative serine/threonine-protein kinase
MRNKETKELVAMKYIPRGQKIDENVAREIINHRSLRHPNIIRFKEVVLTPTHLAIVMEYAAGGELFDRICNAGRFSEDEARYFFQQLICGVSYCHSMQICHRDLKLENTLLDGSPAPRLKICDFGYSKSSLLHSKPKSTVGTPGVHRPRGALPPGNTTARQPMCGPVESLFM

SEQ ID NO: 27877 - DNA, 1336 bp, Zea mays subsp. mays
  misc_feature (1)..(1336): Ceres Seq. ID no. 12365588
aaaaaaccctagcccgacccctcctcctccacctgcgccaccgcccaccatgagctccgccgccgcgccagctgccgtcggcagcggcaaggagcttgccaacccgcccgccgacgggatcaccaacctccgcttctccaaccacagcaacaacctcctcgtctcctcatgggacaagacggtgcggctctacgacgccgacgccaacgtgctcaagggggagttcatgcaccccggggccgtcctcgactgctgcttccacgacgactcctcgggctttagcgccggagccgaccacaccgtgcggaggttggtatttagctcgtccaaggaagatgttttggggcggcatgatggtccagttcgttgcgtggaatactcttatgctgcaggtcaagtcatcaccggcagctgggataaaactgtaaaatgctgggatccaagaggagttagtggaccagagcgcacccttgttgggacatatgctcaacctgaacgtgtatattctctttcgttagtaggaaataggttggttgttgcaacagctggaagacatgtaaatatttatgatctgcgcaatatgtctcaacctgagcaaaaaagagactcttctttgaaatatcaaacacgatgtgttcgatgttttcccaacggaacaggatatgctcttagttctgttgaagggcgagtttctatggaattctttgatctatctgagtctgctcaatctaaaaagtatgctttcaagtgtcatcggaaatctgaggccggcagggacaccgtctatcctgtcaatgcaattgctttccatcccatatatggaacatttgccaccggagggtgtgatggatttgtgaatgtgtgggatggcattaacaagaaaagactatatcagtactcgaagtacgcatcaagcatcgctgctctatcattcagtaaggatgggcatctgcttgctgtggcatccagctacacttatgaagagggagaaaaaacgcatgagcctgacgctatatttatccggacagtgaatgaagtcgaggtgaagccgaagcccaaggcactggcagccccccagtagtgctgtgacctgttctggaggctagatgacccgtacttctctgcgttgatgtcaattacattagttgaccgagtgcttgtttgtgttgaaagagctgaaacgcctgtttcttaatctggaaccctcttctcccgttttacttgtccgtggaaacatttcatgttccagctggttgtatattccgaaacagaccatgtttaagttcattcggttcttcgttgacttaagttatttatcaaatatttaagtatcgtg

SEQ ID NO: 27878 - protein, 359 aa, Zea mays subsp. mays
  peptide (1)..(359): Ceres Seq. ID no. 12365589
  misc_feature (28)..(358): NCBI GI NO: 18402300 NR Description: mitotic checkpoint protein, putative
  misc_feature (29)..(358): NCBI GI NO: 15222841 NR Description: mitotic checkpoint protein, putative
  misc_feature (9)..(353): NCBI GI NO: 28564814 NR Description: putative mitotic checkpoint protein
  misc_feature (29)..(271): NCBI GI NO: 12323596 NR Description: mitotic checkpoint protein, 3' partial
  misc_feature (27)..(351): NCBI GI NO: 4757880 NR Description: BUB3 budding uninhibited by benzimidazoles 3 homolog
  misc_feature (27)..(351): NCBI GI NO: 3986296 NR Description: mitotic checkpoint [Xenopus laevis]
  misc_feature (27)..(351): NCBI GI NO: 13122448 NR Description: WD repeat protein Bub3 [Xenopus laevis]
  misc_feature (31)..(351): NCBI GI NO: 37362190 NR Description: BUB3 budding uninhibited by benzimidazoles 3-like
  misc_feature (35)..(351): NCBI GI NO: 39591225 NR Description: Hypothetical protein CBG20696
  misc_feature (31)..(278): NCBI GI NO: 21428470 NR Description: LD23540p [Drosophila melanogaster]
KNPSPTPPPPPAPPPTMSSAAAPAAVGSGKELANPPADGITNLRFSNHSNNLLVSSWDKTVRLYDADANVLKGEFMHPGAVLDCCFHDDSSGFSAGADHTVRRLVFSSSKEDVLGRHDGPVRCVEYSYAAGQVITGSWDKTVKCWDPRGVSGPERTLVGTYAQPERVYSLSLVGNRLVVATAGRHVNIYDLRNMSQPEQKRDSSLKYQTRCVRCFPNGTGYALSSVEGRVSMEFFDLSESAQSKKYAFKCHRKSEAGRDTVYPVNAIAFHPIYGTFATGGCDGFVNVWDGINKKRLYQYSKYASSIAALSFSKDGHLLAVASSYTYEEGEKTHEPDAIFIRTVNEVEVKPKPKALAAPQ

SEQ ID NO: 27879 - protein, 343 aa, Zea mays subsp. mays; identical to SEQ ID NO: 26424
  peptide (1)..(343): Ceres Seq. ID no. 12365590
  misc_feature (12)..(342): NCBI GI NO: 18402300 NR Description: mitotic checkpoint protein, putative
  misc_feature (13)..(342): NCBI GI NO: 15222841 NR Description: mitotic checkpoint protein, putative
  misc_feature (1)..(337): NCBI GI NO: 28564814 NR Description: putative mitotic checkpoint protein
  misc_feature (13)..(255): NCBI GI NO: 12323596 NR Description: mitotic checkpoint protein, 3' partial
  misc_feature (11)..(335): NCBI GI NO: 4757880 NR Description: BUB3 budding uninhibited by benzimidazoles 3 homolog
  misc_feature (11)..(335): NCBI GI NO: 3986296 NR Description: mitotic checkpoint [Xenopus laevis]
  misc_feature (11)..(335): NCBI GI NO: 13122448 NR Description: WD repeat protein Bub3 [Xenopus laevis]
  misc_feature (15)..(335): NCBI GI NO: 37362190 NR Description: BUB3 budding uninhibited by benzimidazoles 3-like
  misc_feature (19)..(335): NCBI GI NO: 39591225 NR Description: Hypothetical protein CBG20696
  misc_feature (15)..(262): NCBI GI NO: 21428470 NR Description: LD23540p [Drosophila melanogaster]

SEQ ID NO: 27880 - protein, 284 aa, Zea mays subsp. mays; identical to SEQ ID NO: 26425
  peptide (1)..(284): Ceres Seq. ID no. 12365591
  misc_feature (1)..(283): NCBI GI NO: 18402300 NR Description: mitotic checkpoint protein, putative
  misc_feature (1)..(283): NCBI GI NO: 15222841 NR Description: mitotic checkpoint protein, putative
  misc_feature (1)..(278): NCBI GI NO: 28564814 NR Description: putative mitotic checkpoint protein
  misc_feature (1)..(196): NCBI GI NO: 12323596 NR Description: mitotic checkpoint protein, 3' partial
  misc_feature (1)..(276): NCBI GI NO: 4757880 NR Description: BUB3 budding uninhibited by benzimidazoles 3 homolog
  misc_feature (1)..(276): NCBI GI NO: 3986296 NR Description: mitotic checkpoint [Xenopus laevis]
  misc_feature (1)..(276): NCBI GI NO: 13122448 NR Description: WD repeat protein Bub3 [Xenopus laevis]
  misc_feature (1)..(276): NCBI GI NO: 37362190 NR Description: BUB3 budding uninhibited by benzimidazoles 3-like
  misc_feature (1)..(276): NCBI GI NO: 39591225 NR Description: Hypothetical protein CBG20696
  misc_feature (1)..(203): NCBI GI NO: 21428470 NR Description: LD23540p [Drosophila melanogaster]

SEQ ID NO: 27881 - DNA, 814 bp, Zea mays subsp. mays
  misc_feature (1)..(814): Ceres Seq. ID no. 12594699
aacaacaagacagagagatacccgatcgccaccgccgaccggactcccctcaaaggcggccacagcacagcgagcatgggagaccggcatcagcatgggcctggcagcggcgtggaggacccggcgacgctggtgcggcggggtgcagacccgcgcgcccaactcgacgcaggtggtggggttcctgacgctgctcgtctctggcgccgtgctgctgctgctgacgggggtgacgctgacgggcgccgtggtggcgctcgtcttcctgggccccatcgcgctgctcaccagccccatctgggtgcccgtcgccgtcgtgatctccgccatcgtcgccgccgcgctccccgtggccacctggatgtaccgctacttcacgggccgccaccccgtgggcgccgaccgggtggactacgcgcgcagccggatcgccgacaccgccagccacgtcaaggactacgcgcgcgagtacggcggatacctgcgcacccgcgccaaggacgccgcgcccggcgcgtaggcgcgcgccgcccggcgtgcatgtgctgcaacccccgtccgtggtgccgctagctataggtcatcgctgctgtcgtcgtcgtcgtcttagttcctcttgcattgcgtgtgcgtactctgctccaatcatcccccgcccgtgtcgtcaagcaatttctggtcctcttgcttgctttctctaggagatgctgttcatttcgatctcttggcgcaatttgatctttcgcttggtgtaattaggtcattagttaaatcataagagagactcgtgttcgtggtctttctcacaaccttg

SEQ ID NO: 27882 - protein, 190 aa, Zea mays subsp. mays
  peptide (1)..(190): Ceres Seq. ID no. 12594700
NNKTERYPIATADRTPLKGGHSTASMGDRHQHGPGSGVEDPATLVRRGADPRAQLDAGGGVPDAARLWRRAAAADGGDADGRRGGARLPGPHRAAHQPHLGARRRRDLRHRRRRAPRGHLDVPLLHGPPPRGRRPGGLRAQPDRRHRQPRQGLRARVRRIPAHPRQGRRARRVGARRPACMCCNPRPWCR

SEQ ID NO: 27883 - protein, 172 aa, Zea mays subsp. mays
  peptide (1)..(172): Ceres Seq. ID no. 12594701
  misc_feature (55)..(160): Pfam Name: Pfam Description:  Oleosin
  misc_feature (48)..(172): NCBI GI NO: 15229674 NR Description: oleosin; protein id: At3g18570.1
  misc_feature (48)..(172): NCBI GI NO: 15222021 NR Description: oleosin; protein id: At1g48990.1
  misc_feature (52)..(172): NCBI GI NO: 21311555 NR Description: 15.8 kDa oleosin [Theobroma cacao]
  misc_feature (52)..(153): NCBI GI NO: 15225211 NR Description: oleosin; protein id: At2g25890.1
  misc_feature (52)..(153): NCBI GI NO: 27754701 NR Description: putative oleosin protein [Arabidopsis thaliana]
  misc_feature (48)..(158): NCBI GI NO: 7442009 NR Description: oleosin-like protein
  misc_feature (53)..(158): NCBI GI NO: 29170509 NR Description: oleosin [Corylus avellana]
  misc_feature (49)..(157): NCBI GI NO: 5381321 NR Description: 15 kDa oleosin [Sesamum indicum]
  misc_feature (46)..(158): NCBI GI NO: 2119749 NR Description: oleosin - almond
  misc_feature (46)..(158): NCBI GI NO: 3914199 NR Description: OLEOSIN 1
TTRQRDTRSPPPTGLPSKAATAQRAWETGISMGLAAAWRTRRRWCGGVQTRAPNSTQVVGFLTLLVSGAVLLLLTGVTLTGAVVALVFLGPIALLTSPIWVPVAVVISAIVAAALPVATWMYRYFTGRHPVGADRVDYARSRIADTASHVKDYAREYGGYLRTRAKDAAPGA

SEQ ID NO: 27884 - protein, 165 aa, Zea mays subsp. mays
  peptide (1)..(165): Ceres Seq. ID no. 12594702
MGDRHQHGPGSGVEDPATLVRRGADPRAQLDAGGGVPDAARLWRRAAAADGGDADGRRGGARLPGPHRAAHQPHLGARRRRDLRHRRRRAPRGHLDVPLLHGPPPRGRRPGGLRAQPDRRHRQPRQGLRARVRRIPAHPRQGRRARRVGARRPACMCCNPRPWCR

SEQ ID NO: 27885 - protein, 141 aa, Zea mays subsp. mays
  peptide (1)..(141): Ceres Seq. ID no. 12594703
  misc_feature (24)..(129): Pfam Name: Pfam Description:  Oleosin
  misc_feature (17)..(141): NCBI GI NO: 15229674 NR Description: oleosin; protein id: At3g18570.1
  misc_feature (17)..(141): NCBI GI NO: 15222021 NR Description: oleosin; protein id: At1g48990.1
  misc_feature (21)..(141): NCBI GI NO: 21311555 NR Description: 15.8 kDa oleosin [Theobroma cacao]
  misc_feature (21)..(122): NCBI GI NO: 15225211 NR Description: oleosin; protein id: At2g25890.1
  misc_feature (21)..(122): NCBI GI NO: 27754701 NR Description: putative oleosin protein [Arabidopsis thaliana]
  misc_feature (17)..(127): NCBI GI NO: 7442009 NR Description: oleosin-like protein
  misc_feature (22)..(127): NCBI GI NO: 29170509 NR Description: oleosin [Corylus avellana]
  misc_feature (18)..(126): NCBI GI NO: 5381321 NR Description: 15 kDa oleosin [Sesamum indicum]
  misc_feature (15)..(127): NCBI GI NO: 2119749 NR Description: oleosin - almond
  misc_feature (15)..(127): NCBI GI NO: 3914199 NR Description: OLEOSIN 1
MGLAAAWRTRRRWCGGVQTRAPNSTQVVGFLTLLVSGAVLLLLTGVTLTGAVVALVFLGPIALLTSPIWVPVAVVISAIVAAALPVATWMYRYFTGRHPVGADRVDYARSRIADTASHVKDYAREYGGYLRTRAKDAAPGA

SEQ ID NO: 27886 - DNA, 971 bp, Zea mays subsp. mays
  misc_feature (1)..(971): Ceres Seq. ID no. 12363847
attccatccccgctgccccatccggccatcccacagcgaatctcccaaaccccggctccctcgattcccaatcccacccctgccacgaagagatcagatgacggcgagctgctgctgatcgagtgcagtggaatcggaggcgatgcgggctagccggccggcggtgcaccctgtggaagcggcccctccgccgccggccgcggcggcggaggggccggaggcccaggtggagggtgccgcgcacccgcgcggggtgcggatgaaggatccgcctggggcaccagggacacctgcggggcttggtctacgccttgcgcaggccttcttcgcagccgctgcgctcgccgtcatggcgtccaccaacgacttcccgtccgtctctgccttcagctaccttgtcgcagcagccattttgcagtgcttgtggagccttttgctagcctttgtcgacatttatgcacttcttgtcaagcgatcgttgagaaatgcccgagctgtatgtatatttactatcggagatgggatcacaggtacaataaccttgggcgcggcatgtgcttcagcaggaatcactgttctcatcggtaatgatctcaacatatgtgcagagaatcactgtgcaagtttcgagaccgccacagcattggcttttataagctggtttgcgctggcgccatcctgtatcttgaatttctggtcgatggcctccagatgataaatataggatgttataaaacatagtatttttgaatggtttctggacaaggtcgctgcttatggtagcagcaaagcaacgcggtgccgtaaagctaattgtaatacccagaaattgttgaatggctgtggaatgtagcacgtgtcgaattgtctgtacaaaatacggagaggccttctttggatctgaaaaaggcttctgaatcttgccagtccttcctttttacgttaacatgtttctcctgtgtggtttgttg

SEQ ID NO: 27887 - protein, 190 aa, Zea mays subsp. mays
  peptide (1)..(190): Ceres Seq. ID no. 12363848
  misc_feature (47)..(173): Pfam Name: DUF588 Pfam Description: Domain of unknown function
  misc_feature (1)..(190): NCBI GI NO: 18401722 NR Description: expressed protein; protein id: At2g28370
  misc_feature (47)..(173): NCBI GI NO: 26006486 NR Description: Unknown protein
  misc_feature (1)..(189): NCBI GI NO: 25408537 NR Description: hypothetical protein At2g37200
  misc_feature (1)..(189): NCBI GI NO: 30687069 NR Description: expressed protein [Arabidopsis thaliana]
  misc_feature (75)..(189): NCBI GI NO: 11357817 NR Description: hypothetical protein F5K20
  misc_feature (40)..(84): NCBI GI NO: 11357817 NR Description: hypothetical protein F5K20
  misc_feature (40)..(189): NCBI GI NO: 18409932 NR Description: putative protein; protein id: At3g53850
  misc_feature (40)..(189): NCBI GI NO: 30686969 NR Description: expressed protein [Arabidopsis thaliana]
  misc_feature (40)..(185): NCBI GI NO: 15241672 NR Description: putative protein; protein id: At5g02060.1
  misc_feature (40)..(189): NCBI GI NO: 22330130 NR Description: hypothetical protein; protein id: At1g49405.1
MRASRPAVHPVEAAPPPPAAAAEGPEAQVEGAAHPRGVRMKDPPGAPGTPAGLGLRLAQAFFAAAALAVMASTNDFPSVSAFSYLVAAAILQCLWSLLLAFVDIYALLVKRSLRNARAVCIFTIGDGITGTITLGAACASAGITVLIGNDLNICAENHCASFETATALAFISWFALAPSCILNFWSMASR

SEQ ID NO: 27888 - protein, 151 aa, Zea mays subsp. mays
  peptide (1)..(151): Ceres Seq. ID no. 12363849
  misc_feature (8)..(134): Pfam Name: DUF588 Pfam Description: Domain of unknown function
  misc_feature (1)..(151): NCBI GI NO: 18401722 NR Description: expressed protein; protein id: At2g28370
  misc_feature (8)..(134): NCBI GI NO: 26006486 NR Description: Unknown protein
  misc_feature (1)..(150): NCBI GI NO: 25408537 NR Description: hypothetical protein At2g37200
  misc_feature (1)..(150): NCBI GI NO: 30687069 NR Description: expressed protein [Arabidopsis thaliana]
  misc_feature (36)..(150): NCBI GI NO: 11357817 NR Description: hypothetical protein F5K20
  misc_feature (1)..(45): NCBI GI NO: 11357817 NR Description: hypothetical protein F5K20
  misc_feature (1)..(150): NCBI GI NO: 18409932 NR Description: putative protein; protein id: At3g53850
  misc_feature (1)..(150): NCBI GI NO: 30686969 NR Description: expressed protein [Arabidopsis thaliana]
  misc_feature (1)..(146): NCBI GI NO: 15241672 NR Description: putative protein; protein id: At5g02060.1
  misc_feature (1)..(150): NCBI GI NO: 22330130 NR Description: hypothetical protein; protein id: At1g49405.1
MKDPPGAPGTPAGLGLRLAQAFFAAAALAVMASTNDFPSVSAFSYLVAAAILQCLWSLLLAFVDIYALLVKRSLRNARAVCIFTIGDGITGTITLGAACASAGITVLIGNDLNICAENHCASFETATALAFISWFALAPSCILNFWSMASR

SEQ ID NO: 27889 - protein, 121 aa, Zea mays subsp. mays
  peptide (1)..(121): Ceres Seq. ID no. 12363850
  misc_feature (1)..(104): Pfam Name: DUF588 Pfam Description: Domain of unknown function
  misc_feature (1)..(121): NCBI GI NO: 18401722 NR Description: expressed protein; protein id: At2g28370
  misc_feature (1)..(104): NCBI GI NO: 26006486 NR Description: Unknown protein
  misc_feature (1)..(120): NCBI GI NO: 25408537 NR Description: hypothetical protein At2g37200
  misc_feature (1)..(120): NCBI GI NO: 30687069 NR Description: expressed protein [Arabidopsis thaliana]
  misc_feature (6)..(120): NCBI GI NO: 11357817 NR Description: hypothetical protein F5K20
  misc_feature (1)..(15): NCBI GI NO: 11357817 NR Description: hypothetical protein F5K20
  misc_feature (1)..(120): NCBI GI NO: 18409932 NR Description: putative protein; protein id: At3g53850
  misc_feature (1)..(120): NCBI GI NO: 30686969 NR Description: expressed protein [Arabidopsis thaliana]
  misc_feature (1)..(116): NCBI GI NO: 15241672 NR Description: putative protein; protein id: At5g02060.1
  misc_feature (1)..(120): NCBI GI NO: 22330130 NR Description: hypothetical protein; protein id: At1g49405.1
MASTNDFPSVSAFSYLVAAAILQCLWSLLLAFVDIYALLVKRSLRNARAVCIFTIGDGITGTITLGAACASAGITVLIGNDLNICAENHCASFETATALAFISWFALAPSCILNFWSMASR

SEQ ID NO: 27890 - DNA, 1548 bp, Zea mays subsp. mays
  misc_feature (1)..(1548): Ceres Seq. ID no. 12358336
acggaccagcagatcgcgcgcgggagtgagagggcgacagggcgtggccgcgaggtgggcatgggatcggagggacgggtctggaatggcgcgggcgtggccgccggcagcggctatggcggcatcgtcgaggcgaaagcgaccaccgcggcgcccgcggacgttcccacgtcggcggcctccgtcgacatctcgctgccgctcccggagatgtcgcctcacatcataggtctctgcaaggagttggtcaaagggtggtcgtcgattgacagctcgcgcttctccatcgagaccgtgtctgggggcatcaccaatctattgctcaaggtttctgtcaaaggaaacaatggcaatgagtcttctgttactgttcggttgtatggaccaaatacagacttggtgattgatcggaaaagggaattgcaggcgataccgtatctctcagctgcagggttcggggctcggctgcttggaatgtttgaaaatggagtagttcagtcattcatctatgctcgaacactgtcacctgcagacatgaaagaacctaaaatagcagctgaaattgccaaggagctacgcaaatttcatcaagtagatataccagggtctaaagaaccacaattgtggaatgatatattcaagtttttgaagaaagctgcagcattgaagtttgaggataatgagcagcaaaagagatatgtaaagatctcatttagagaaatacaagatgaagttaaagaacttaaggatctcttggacattctgcatgcacctgtggtttatgcacacaatgacttgctttcaggaaatctgatgctcaatgatttggaagggaagctatattttattgattttgagtatgggtcatacagctaccgtgggtatgacattgcaaatcatttcaatgagtatgcaggatttgactgtgactataatttgtacccagataaagatgcccagtatcacttctttaggaattatctgcaccctgatagacctagtgaggtgcaggcacaagatatggaagtactttatgtggaaacaaacactttcagactagcatcgcacatttactgggcattatgggctcttattcaggcaaaggtatccccaattgactttgactatcttggatacttcttcttacggtatggtgagtacaagaaacaaagggactcctgcttcgccttggcacaaagtttcctctccgggctaagaaatggctagagcctgagaatctggtcaagggtttgcactgttgtacgcatactcggggcgggtacgcgttgtgatcatcgtctgctactcagaaactctactatagtggtggtagcagcctcattttgttgtatctgatggtagtttcgtcatcgcctgataggaaagtctcatgatcgccctcgggaacgcagggtggcgagatctgtacttatatttgtaataaacacaatccggatgggttctgtcctgtgcaatttgttgtgcgcataagcattccgtgtttttatacattattgtgaggaattgcataagtttttttgtttttcg

SEQ ID NO: 27891 - protein, 408 aa, Zea mays subsp. mays
  peptide (1)..(408): Ceres Seq. ID no. 12358337
  misc_feature (119)..(389): Pfam Name: Pfam Description:  Choline/ethanolamine kinase
  misc_feature (45)..(403): NCBI GI NO: 15225800 NR Description: putative choline kinase; protein id: At2g26830
  misc_feature (45)..(403): NCBI GI NO: 21593269 NR Description: putative choline kinase [Arabidopsis thaliana]
  misc_feature (77)..(392): NCBI GI NO: 28829950 NR Description: similar to Arabidopsis thaliana (Mouse-ear cress)
  misc_feature (76)..(397): NCBI GI NO: 10092615 NR Description: ethanolamine kinase [Homo sapiens]
  misc_feature (76)..(397): NCBI GI NO: 26328955 NR Description: unnamed protein product [Mus musculus]
  misc_feature (76)..(397): NCBI GI NO: 26340554 NR Description: unnamed protein product [Mus musculus]
  misc_feature (76)..(397): NCBI GI NO: 14194720 NR Description: ETHANOLAMINE KINASE (EKI)
  misc_feature (45)..(397): NCBI GI NO: 14603244 NR Description: Similar to hypothetical protein FLJ10761
  misc_feature (68)..(387): NCBI GI NO: 7488654 NR Description: choline kinase (EC 2
  misc_feature (102)..(397): NCBI GI NO: 37786753 NR Description: putative ethanolamine kinase [Mus musculus]
TDQQIARGSERATGRGREVGMGSEGRVWNGAGVAAGSGYGGIVEAKATTAAPADVPTSAASVDISLPLPEMSPHIIGLCKELVKGWSSIDSSRFSIETVSGGITNLLLKVSVKGNNGNESSVTVRLYGPNTDLVIDRKRELQAIPYLSAAGFGARLLGMFENGVVQSFIYARTLSPADMKEPKIAAEIAKELRKFHQVDIPGSKEPQLWNDIFKFLKKAAALKFEDNEQQKRYVKISFREIQDEVKELKDLLDILHAPVVYAHNDLLSGNLMLNDLEGKLYFIDFEYGSYSYRGYDIANHFNEYAGFDCDYNLYPDKDAQYHFFRNYLHPDRPSEVQAQDMEVLYVETNTFRLASHIYWALWALIQAKVSPIDFDYLGYFFLRYGEYKKQRDSCFALAQSFLSGLRNG

SEQ ID NO: 27892 - protein, 388 aa, Zea mays subsp. mays
  peptide (1)..(388): Ceres Seq. ID no. 12358338
  misc_feature (99)..(369): Pfam Name: Pfam Description:  Choline/ethanolamine kinase
  misc_feature (25)..(383): NCBI GI NO: 15225800 NR Description: putative choline kinase; protein id: At2g26830
  misc_feature (25)..(383): NCBI GI NO: 21593269 NR Description: putative choline kinase [Arabidopsis thaliana]
  misc_feature (57)..(372): NCBI GI NO: 28829950 NR Description: similar to Arabidopsis thaliana (Mouse-ear cress)
  misc_feature (56)..(377): NCBI GI NO: 10092615 NR Description: ethanolamine kinase [Homo sapiens]
  misc_feature (56)..(377): NCBI GI NO: 26328955 NR Description: unnamed protein product [Mus musculus]
  misc_feature (56)..(377): NCBI GI NO: 26340554 NR Description: unnamed protein product [Mus musculus]
  misc_feature (56)..(377): NCBI GI NO: 14194720 NR Description: ETHANOLAMINE KINASE (EKI)
  misc_feature (25)..(377): NCBI GI NO: 14603244 NR Description: Similar to hypothetical protein FLJ10761
  misc_feature (48)..(367): NCBI GI NO: 7488654 NR Description: choline kinase (EC 2
  misc_feature (82)..(377): NCBI GI NO: 37786753 NR Description: putative ethanolamine kinase [Mus musculus]
MGSEGRVWNGAGVAAGSGYGGIVEAKATTAAPADVPTSAASVDISLPLPEMSPHIIGLCKELVKGWSSIDSSRFSIETVSGGITNLLLKVSVKGNNGNESSVTVRLYGPNTDLVIDRKRELQAIPYLSAAGFGARLLGMFENGVVQSFIYARTLSPADMKEPKIAAEIAKELRKFHQVDIPGSKEPQLWNDIFKFLKKAAALKFEDNEQQKRYVKISFREIQDEVKELKDLLDILHAPVVYAHNDLLSGNLMLNDLEGKLYFIDFEYGSYSYRGYDIANHFNEYAGFDCDYNLYPDKDAQYHFFRNYLHPDRPSEVQAQDMEVLYVETNTFRLASHIYWALWALIQAKVSPIDFDYLGYFFLRYGEYKKQRDSCFALAQSFLSGLRNG

SEQ ID NO: 27893 - protein, 338 aa, Zea mays subsp. mays
  peptide (1)..(338): Ceres Seq. ID no. 12358339
  misc_feature (49)..(319): Pfam Name: Pfam Description:  Choline/ethanolamine kinase
  misc_feature (1)..(333): NCBI GI NO: 15225800 NR Description: putative choline kinase; protein id: At2g26830
  misc_feature (1)..(333): NCBI GI NO: 21593269 NR Description: putative choline kinase [Arabidopsis thaliana]
  misc_feature (7)..(322): NCBI GI NO: 28829950 NR Description: similar to Arabidopsis thaliana (Mouse-ear cress)
  misc_feature (6)..(327): NCBI GI NO: 10092615 NR Description: ethanolamine kinase [Homo sapiens]
  misc_feature (6)..(327): NCBI GI NO: 26328955 NR Description: unnamed protein product [Mus musculus]
  misc_feature (6)..(327): NCBI GI NO: 26340554 NR Description: unnamed protein product [Mus musculus]
  misc_feature (6)..(327): NCBI GI NO: 14194720 NR Description: ETHANOLAMINE KINASE (EKI)
  misc_feature (1)..(327): NCBI GI NO: 14603244 NR Description: Similar to hypothetical protein FLJ10761
  misc_feature (1)..(317): NCBI GI NO: 7488654 NR Description: choline kinase (EC 2
  misc_feature (32)..(327): NCBI GI NO: 37786753 NR Description: putative ethanolamine kinase [Mus musculus]
MSPHIIGLCKELVKGWSSIDSSRFSIETVSGGITNLLLKVSVKGNNGNESSVTVRLYGPNTDLVIDRKRELQAIPYLSAAGFGARLLGMFENGVVQSFIYARTLSPADMKEPKIAAEIAKELRKFHQVDIPGSKEPQLWNDIFKFLKKAAALKFEDNEQQKRYVKISFREIQDEVKELKDLLDILHAPVVYAHNDLLSGNLMLNDLEGKLYFIDFEYGSYSYRGYDIANHFNEYAGFDCDYNLYPDKDAQYHFFRNYLHPDRPSEVQAQDMEVLYVETNTFRLASHIYWALWALIQAKVSPIDFDYLGYFFLRYGEYKKQRDSCFALAQSFLSGLRNG

SEQ ID NO: 27894 - DNA, 1681 bp, Zea mays subsp. mays
  misc_feature (1)..(1681): Ceres Seq. ID no. 12349121
ctgcacttttctaccaccgaaggcgagggcgagggggccaaagacgagcgctttttcgtgcccgcctgcctgcctgctggtcattgccgctgctcacgagcctcccgccccgtgccgccctgccctctacggctctgccccaacgagccccaggggagccaggaaaaggagccgtcaaaagccgccgccgaggagagcgcgcaggtcaggcatggcatcaaccgttaccttcaacccagtgagcgcccaagctgcgctgatccaaaagccaaggaaccttggagccataagctatgctggcttaaagatgccggcatctgttagctctggctcagagtcgtcattcctgggctggaatgcatcccttcgggcagctgttactccaaggattgtgcccaaggcaaagtctggatctcagatatctccacaggcatcttacaaggtggcagtgctgggtgctgccggtggcatcggtcaacccttgggcctgttggttaagatgtctcctcttgtccgagctgcatctgtatgatattgctaatgtcaagggagttgctgcagatctcagccactgcaacacgcctgctcaggttcttgacttcactggaccctcagagttagccaactgcttgaaaggtgtggatgtcgttgtcatccctgccggggtcccaaggaagcctgggatgactcgcgatgacctttttaacatcaacgcaagcatcgtcaagacacttgttgaggctgttgcagacagttgcccagaggcgttcatccatatcatcagcaacccggtgaattccacggtgccaattgcagctgaggttctgaagcagaagggtgtctacaatcccaagaagctttttggggttaccaccttggatgttgtcagggccaacacatttgtggcgcagaagaagaaccttaagctcatcgatgttgatgtcccagttgttggtggccatgctggaatcacaattctgccactgttatcgaagacgaggccatctgtcaccttcacagatgaggaaactgaggagctgacaaagaggatacagaatgccgggacagaggtggtggatgccaaggctggtgctgggtctgctaccctgtccatggcctatgccgctgctagattcgttgagtcgtctctccgtgcgctggctggcgatccggatgtttatgagtgcacatttgttcagtctgagataactgacctgccattcttcgcatcaagagtcaagttgggcaagaacggtgttgagtctgtcatttctgccgacctccagggagtgactgagtatgaggccaaggcacttgaggcgctgaaggccgagttgaaggcaagcattgagaagggtattgctttcgtgaacaaacagcgggaagctgctgcatctgtttgaggcgaagcaagtgaaacggaaggaacaatcgtcttgaatggcttttaagttttgcagcctagagtttttttgttgtcggcatgtaggaagatgttccagatggttgctgtttgtttctaattgctacatgggggctgaacatccatcccccaagttatcgccggtttctgaaccaggccttatttacacataaattttgccccttctgtatcgtggtccagtttgtagcttgttggagtctacaaactacaaagaggctaataaaccacttttatttg

SEQ ID NO: 27895 - protein, 348 aa, Zea mays subsp. mays
  peptide (1)..(348): Ceres Seq. ID no. 12349122
  misc_feature (172)..(338): Pfam Name: Pfam Description:  lactate/malate dehydrogenase
  misc_feature (51)..(347): NCBI GI NO: 34907952 NR Description: putative NAD-malate dehydrogenase
  misc_feature (51)..(345): NCBI GI NO: 5123836 NR Description: NAD-malate dehydrogenase [Nicotiana tabacum]
  misc_feature (51)..(345): NCBI GI NO: 7431178 NR Description: malate dehydrogenase (EC 1
  misc_feature (51)..(347): NCBI GI NO: 15232820 NR Description: chloroplast NAD-dependent malate dehydrogenase
  misc_feature (51)..(347): NCBI GI NO: 25283601 NR Description: malate dehydrogenase (EC 1.1.1.37), chloroplast
  misc_feature (51)..(345): NCBI GI NO: 7488830 NR Description: probable malate dehydrogenase (EC 1
  misc_feature (51)..(345): NCBI GI NO: 7431173 NR Description: malate dehydrogenase (EC 1
  misc_feature (51)..(346): NCBI GI NO: 34913248 NR Description: putative malate dehydrogenase
  misc_feature (51)..(340): NCBI GI NO: 3183079 NR Description: MALATE DEHYDROGENASE, GLYOXYSOMAL PRECURSOR
  misc_feature (51)..(340): NCBI GI NO: 31241465 NR Description: ENSANGP00000020184 [Anopheles gambiae]
MHPFGQLLLQGLCPRQSLDLRYLHRHLTRWQCWVLPVASVNPWACWLRCLLLSELHLYDIANVKGVAADLSHCNTPAQVLDFTGPSELANCLKGVDVVVIPAGVPRKPGMTRDDLFNINASIVKTLVEAVADSCPEAFIHIISNPVNSTVPIAAEVLKQKGVYNPKKLFGVTTLDVVRANTFVAQKKNLKLIDVDVPVVGGHAGITILPLLSKTRPSVTFTDEETEELTKRIQNAGTEVVDAKAGAGSATLSMAYAAARFVESSLRALAGDPDVYECTFVQSEITDLPFFASRVKLGKNGVESVISADLQGVTEYEAKALEALKAELKASIEKGIAFVNKQREAAASV

SEQ ID NO: 27896 - protein, 239 aa, Zea mays subsp. mays
  peptide (1)..(239): Ceres Seq. ID no. 12349123
  misc_feature (63)..(229): Pfam Name: Pfam Description:  lactate/malate dehydrogenase
  misc_feature (1)..(238): NCBI GI NO: 34907952 NR Description: putative NAD-malate dehydrogenase
  misc_feature (1)..(236): NCBI GI NO: 5123836 NR Description: NAD-malate dehydrogenase [Nicotiana tabacum]
  misc_feature (1)..(236): NCBI GI NO: 7431178 NR Description: malate dehydrogenase (EC 1
  misc_feature (1)..(238): NCBI GI NO: 15232820 NR Description: chloroplast NAD-dependent malate dehydrogenase
  misc_feature (1)..(238): NCBI GI NO: 25283601 NR Description: malate dehydrogenase (EC 1.1.1.37), chloroplast
  misc_feature (1)..(236): NCBI GI NO: 7488830 NR Description: probable malate dehydrogenase (EC 1
  misc_feature (1)..(236): NCBI GI NO: 7431173 NR Description: malate dehydrogenase (EC 1
  misc_feature (1)..(237): NCBI GI NO: 34913248 NR Description: putative malate dehydrogenase
  misc_feature (1)..(231): NCBI GI NO: 3183079 NR Description: MALATE DEHYDROGENASE, GLYOXYSOMAL PRECURSOR
  misc_feature (1)..(231): NCBI GI NO: 31241465 NR Description: ENSANGP00000020184 [Anopheles gambiae]
MTRDDLFNINASIVKTLVEAVADSCPEAFIHIISNPVNSTVPIAAEVLKQKGVYNPKKLFGVTTLDVVRANTFVAQKKNLKLIDVDVPVVGGHAGITILPLLSKTRPSVTFTDEETEELTKRIQNAGTEVVDAKAGAGSATLSMAYAAARFVESSLRALAGDPDVYECTFVQSEITDLPFFASRVKLGKNGVESVISADLQGVTEYEAKALEALKAELKASIEKGIAFVNKQREAAASV

SEQ ID NO: 27897 - protein, 176 aa, Zea mays subsp. mays
  peptide (1)..(176): Ceres Seq. ID no. 12349124
  misc_feature (70)..(173): NCBI GI NO: 34907952 NR Description: putative NAD-malate dehydrogenase
  misc_feature (97)..(171): NCBI GI NO: 5123836 NR Description: NAD-malate dehydrogenase [Nicotiana tabacum]
  misc_feature (97)..(171): NCBI GI NO: 7431178 NR Description: malate dehydrogenase (EC 1
  misc_feature (97)..(171): NCBI GI NO: 15232820 NR Description: chloroplast NAD-dependent malate dehydrogenase
  misc_feature (97)..(171): NCBI GI NO: 25283601 NR Description: malate dehydrogenase (EC 1.1.1.37), chloroplast
  misc_feature (72)..(171): NCBI GI NO: 7488830 NR Description: probable malate dehydrogenase (EC 1
  misc_feature (97)..(171): NCBI GI NO: 7431173 NR Description: malate dehydrogenase (EC 1
  misc_feature (71)..(173): NCBI GI NO: 34913248 NR Description: putative malate dehydrogenase
  misc_feature (146)..(171): NCBI GI NO: 3183079 NR Description: MALATE DEHYDROGENASE, GLYOXYSOMAL PRECURSOR
  misc_feature (134)..(176): NCBI GI NO: 31241465 NR Description: ENSANGP00000020184 [Anopheles gambiae]
CTFLPPKARARGPKTSAFSCPPACLLVIAAAHEPPAPCRPALYGSAPTSPRGARKRSRQKPPPRRARRSGMASTVTFNPVSAQAALIQKPRNLGAISYAGLKMPASVSSGSESSFLGWNASLRAAVTPRIVPKAKSGSQISPQASYKVAVLGAAGGIGQPLGLLVKMSPLVRAASV

SEQ ID NO: 27898 - DNA, 878 bp, Zea mays subsp. mays
  misc_feature (1)..(878): Ceres Seq. ID no. 12402552
atctcccacctcgatccctgcactgcaagcaacaaagttctactctgtccatctagctcccaagaaaccaatccgtaccagcgctatccggccggccatggcggcggcgcgccggctctccctgcccctcgtcctgctggtcgtcctggccgtcgccgggcgcgcggcggcgcaggactacgacttcttctacctcgtgctgcagtggccgggggcctactgcgacaccaagcagagctgctgctaccccaagtccggcaagccggcggcggacttcgggatccacggcctctggcccaaccgcgacgacggcacgtacccgcagaactgcagccccgacaacgccttcaacccgtcgaaggtgagcgacctgctgagcagcctccgcgccaagtggccgacgctggcgtgcccgtccaacgacgggctgcgcttctggggccacgagtgggagaagcacggcacctgcgcagccgacgtcttcgacgagcacggctacttccaggccgcgctgcgcctccgcgaccagctgggagtcctcggcgcgctcacctccgccggcgtcaagcccgacggcggctactacacgctgagccagatcaagggcgccatccgccagggcaccggcttcgagccctacgtggagtgcaaccgcgacgaggccggcaacagccagctctaccagctctacttctgcgtcgacgccgccggcgacagcttcgtcgactgccccgtcctccccagcggcaggccctgcggcaaccggatcgagttcccggctttctaagctaactcactcttcacgtcagttgctgcaatatactgctagtccttttgcttgcattctatgcaagaggataatggaatgttcattcccc

SEQ ID NO: 27899 - protein, 263 aa, Zea mays subsp. mays
  peptide (1)..(263): Ceres Seq. ID no. 12402553
ISHLDPCTASNKVLLCPSSSQETNPYQRYPAGHGGGAPALPAPRPAGRPGRRRARGGAGLRLLLPRAAVAGGLLRHQAELLLPQVRQAGGGLRDPRPLAQPRRRHVPAELQPRQRLQPVEGERPAEQPPRQVADAGVPVQRRAALLGPRVGEARHLRSRRLRRARLLPGRAAPPRPAGSPRRAHLRRRQARRRLLHAEPDQGRHPPGHRLRALRGVQPRRGRQQPALPALLLRRRRRRQLRRLPRPPQRQALRQPDRVPGFLS

SEQ ID NO: 27900 - protein, 261 aa, Zea mays subsp. mays
  peptide (1)..(261): Ceres Seq. ID no. 12402554
  misc_feature (60)..(249): Pfam Name: Pfam Description:  Ribonuclease T2 family
  misc_feature (33)..(261): NCBI GI NO: 11990466 NR Description: ribonuclease [Oryza sativa]
  misc_feature (37)..(261): NCBI GI NO: 7435265 NR Description: ribonuclease (EC 3.1.-.-) - barley
  misc_feature (33)..(250): NCBI GI NO: 11990470 NR Description: ribonuclease
  misc_feature (33)..(261): NCBI GI NO: 7435266 NR Description: ribonuclease M5 (EC 3
  misc_feature (33)..(261): NCBI GI NO: 7768564 NR Description: RNase [Nicotiana tabacum]
  misc_feature (40)..(261): NCBI GI NO: 9081845 NR Description: S-like ribonuclease [Prunus dulcis]
  misc_feature (33)..(261): NCBI GI NO: 532754 NR Description: RNase NE [Nicotiana alata]
  misc_feature (45)..(261): NCBI GI NO: 2148018 NR Description: ribonuclease II (EC 3
  misc_feature (57)..(261): NCBI GI NO: 34810726 NR Description: Chain A
  misc_feature (40)..(261): NCBI GI NO: 2148017 NR Description: ribonuclease I (EC 3
SPTSIPALQATKFYSVHLAPKKPIRTSAIRPAMAAARRLSLPLVLLVVLAVAGRAAAQDYDFFYLVLQWPGAYCDTKQSCCYPKSGKPAADFGIHGLWPNRDDGTYPQNCSPDNAFNPSKVSDLLSSLRAKWPTLACPSNDGLRFWGHEWEKHGTCAADVFDEHGYFQAALRLRDQLGVLGALTSAGVKPDGGYYTLSQIKGAIRQGTGFEPYVECNRDEAGNSQLYQLYFCVDAAGDSFVDCPVLPSGRPCGNRIEFPAF

SEQ ID NO: 27901 - protein, 229 aa, Zea mays subsp. mays
  peptide (1)..(229): Ceres Seq. ID no. 12402555
  misc_feature (28)..(217): Pfam Name: Pfam Description:  Ribonuclease T2 family
  misc_feature (1)..(229): NCBI GI NO: 11990466 NR Description: ribonuclease [Oryza sativa]
  misc_feature (5)..(229): NCBI GI NO: 7435265 NR Description: ribonuclease (EC 3.1.-.-) - barley
  misc_feature (1)..(218): NCBI GI NO: 11990470 NR Description: ribonuclease
  misc_feature (1)..(229): NCBI GI NO: 7435266 NR Description: ribonuclease M5 (EC 3
  misc_feature (1)..(229): NCBI GI NO: 7768564 NR Description: RNase [Nicotiana tabacum]
  misc_feature (8)..(229): NCBI GI NO: 9081845 NR Description: S-like ribonuclease [Prunus dulcis]
  misc_feature (1)..(229): NCBI GI NO: 532754 NR Description: RNase NE [Nicotiana alata]
  misc_feature (13)..(229): NCBI GI NO: 2148018 NR Description: ribonuclease II (EC 3
  misc_feature (25)..(229): NCBI GI NO: 34810726 NR Description: Chain A
  misc_feature (8)..(229): NCBI GI NO: 2148017 NR Description: ribonuclease I (EC 3
MAAARRLSLPLVLLVVLAVAGRAAAQDYDFFYLVLQWPGAYCDTKQSCCYPKSGKPAADFGIHGLWPNRDDGTYPQNCSPDNAFNPSKVSDLLSSLRAKWPTLACPSNDGLRFWGHEWEKHGTCAADVFDEHGYFQAALRLRDQLGVLGALTSAGVKPDGGYYTLSQIKGAIRQGTGFEPYVECNRDEAGNSQLYQLYFCVDAAGDSFVDCPVLPSGRPCGNRIEFPAF

SEQ ID NO: 27902 - DNA, 1082 bp, Zea mays subsp. mays
  misc_feature (1)..(1082): Ceres Seq. ID no. 12401972
  misc_feature (583)..(583): n is a, c, t, g, unknown, or other
  misc_feature (630)..(630): n is a, c, t, g, unknown, or other
  misc_feature (582)..(582): n is a, c, t, g, unknown, or other
  misc_feature (590)..(590): n is a, c, t, g, unknown, or other
  misc_feature (589)..(589): n is a, c, t, g, unknown, or other
  misc_feature (668)..(668): n is a, c, t, g, unknown, or other
  misc_feature (581)..(581): n is a, c, t, g, unknown, or other
  misc_feature (584)..(584): n is a, c, t, g, unknown, or other
  misc_feature (493)..(493): n is a, c, t, g, unknown, or other
ccatcagcgatccttctctcttgagtgtcctcccatctcatccaatccatccccgccaccacaggcaaaggcaacccaaaaggagccgccatgggctcccgctacgaggtggaggtgacggtggggtcggcgagcaacctgaagaacgtcaactggcgcaacggcgacctccggccctacgccgtgctgtgggtggacgacgggcccaagtgctccacccgcgtcgaccccgacaacggcgaggaccccgtgtgggacgagaaggtggtggtccccgtcccgcccgcctccgccgcgcgcctgggcgacgccgtcctccacatcgacgtcgtccacgccgccggcgacgacgccgacgccgtcaagccgctcgtgggctccgcgcgcctcccgctccgcgacgtcctcgatgacgccggcggcgtcggcggcgccagggtctcgcgcacgctcaggctgaagcggccctcgggccgcccgcagggccggctcnaggcccgcgtcgccgtccgcgaggccgcgccgccgccgcgctactacgacccgaacccgtacccggcgcccgcgtacgggaaccccgnnnncgccnncgacccgtactacgcggcgccgccggcgtacggcggacangccgccgtacgccgcgccgccggtggggtacccggccnacgctcctcctcctacggcggtggttatggctacggagctgctgctccgacggcgtacggcgctgaggctgctccactacctgcccagcagcagaagagcagcaagatggggatggggacggggctggccgtgggcgccgcggcggggctgctgggcggcctcgcgctggcggaaggggcgagctacgtggaggacaagttcgaggatcgcgtcgccgagagggtggaggaggagacgttcggcgacggagattacgatgacgattactagaatgaagcaggtcggagaggagatcatgatcatgcatacggaaccgaaatccaggcaacaagtcgaagtcgagtagctcaaatgtattcaaataataagtgagatcaccccagtcgagaaaaaaaatcaaaacttgaaccatg

SEQ ID NO: 27903 - protein, 282 aa, Zea mays subsp. mays
  peptide (1)..(282): Ceres Seq. ID no. 12401973
  misc_feature (7)..(98): Pfam Name: Pfam Description:  C2 domain
  misc_feature (1)..(268): NCBI GI NO: 34908388 NR Description: P0529E05.20
  misc_feature (6)..(188): NCBI GI NO: 10176862 NR Description: emb|CAB80929
  misc_feature (6)..(188): NCBI GI NO: 30689212 NR Description: C2 domain-containing protein
  misc_feature (6)..(175): NCBI GI NO: 18390752 NR Description: extensin-related; protein id: At1g07310
  misc_feature (135)..(135): Xaa is any aa, unknown or other
  misc_feature (164)..(164): Xaa is any aa, unknown or other
  misc_feature (165)..(165): Xaa is any aa, unknown or other
  misc_feature (167)..(167): Xaa is any aa, unknown or other
  misc_feature (180)..(180): Xaa is any aa, unknown or other
  misc_feature (193)..(193): Xaa is any aa, unknown or other
MGSRYEVEVTVGSASNLKNVNWRNGDLRPYAVLWVDDGPKCSTRVDPDNGEDPVWDEKVVVPVPPASAARLGDAVLHIDVVHAAGDDADAVKPLVGSARLPLRDVLDDAGGVGGARVSRTLRLKRPSGRPQGRLXARVAVREAAPPPRYYDPNPYPAPAYGNPXXAXDPYYAAPPAYGGXAAVRRAAGGVPGXRSSSYGGGYGYGAAAPTAYGAEAAPLPAQQQKSSKMGMGTGLAVGAAAGLLGGLALAEGASYVEDKFEDRVAERVEEETFGDGDYDDDY

SEQ ID NO: 27904 - DNA, 1060 bp, Zea mays subsp. mays
  misc_feature (1)..(1060): Ceres Seq. ID no. 12350534
gcaaaccgcgtctcgcgcgaagaatccgcatttccccttccccgcaccgcaccgcaccgcacccaacccccgtcggagagagagatggcatcggtggcggagatgcagcccctcgcgccggcggggtaccgccgcgcgccggagatgaaggagaaggtggaggcgtcggtggtggacctggaggccgggaccggggagacgctgtacccggggatctcgcgcggggagagcgccctccgatggggcttcgtccgcaaggtctacggcatcctcgctgcgcagctgctcctcaccaccgccgtctccgccctcaccgttctccaccccaccctcaacgccacgctctccgactccccgggcctcgcgctcgtgctcgccgtcctgcccttcatcctgatgatcccattgtaccattatcagcacaagcacccacacaatttcgttttcctgggtctgttcacgttgtgcttgagcttcagcatcggcgtggcttgtgctaacacccaaggaaaaatcgttctggaggctttagtgctgacggctggcgtggtggtttctctgactgcgtatgctttctgggcgtcaaagaagggcaaggaatttgggtacctggggcctatcctgtcttccgcgcttactatcctcgtcctaactagctttcttcaggttttcttcccactgggacccgtgtcggtgggcttgttcggtggtctaggggctctggtcttctcaggcttcatcctgtacgacaccgagaacctgatcaagcgccacacctacgacgagtacatctgggcgtcggttgggctgtacctcgacatcctgaacctgttcctctccatcctgaacatgctcaggagcatgcaatccgacaactagcctcttgatcgaacacggtatacccccatggtaaatgcggtcctgtgctctggttgttagaggacgggatcgacgtgcgacatatgtattgtgtgagcccactcgtgtcaacactgcaaacaattgtggtcatgtcaccttgtatgttcttggtcacttttcaaacaattgtaagtacctc

SEQ ID NO: 27905 - protein, 292 aa, Zea mays subsp. mays
  peptide (1)..(292): Ceres Seq. ID no. 12350535
  misc_feature (76)..(286): Pfam Name: Pfam Description:  Uncharacterised protein family UPF0005
  misc_feature (58)..(292): NCBI GI NO: 18414455 NR Description: Expressed protein; protein id: At4g15470
  misc_feature (58)..(250): NCBI GI NO: 15810201 NR Description: AT4g15470/dl3775w [Arabidopsis thaliana]
  misc_feature (59)..(287): NCBI GI NO: 34393841 NR Description: putative z-protein
  misc_feature (59)..(290): NCBI GI NO: 15229411 NR Description: putative protein; protein id: At3g63310.1
  misc_feature (59)..(289): NCBI GI NO: 15218701 NR Description: putative glutamate/aspartate-binding peptide
  misc_feature (59)..(289): NCBI GI NO: 15235466 NR Description: putative glutamate-/aspartate-binding peptide
  misc_feature (68)..(290): NCBI GI NO: 14626300 NR Description: putative receptor-associated protein
  misc_feature (58)..(133): NCBI GI NO: 7485070 NR Description: hypothetical protein - Arabidopsis thaliana
  misc_feature (170)..(241): NCBI GI NO: 7485070 NR Description: hypothetical protein - Arabidopsis thaliana
  misc_feature (130)..(170): NCBI GI NO: 7485070 NR Description: hypothetical protein - Arabidopsis thaliana
ANRVSREESAFPLPRTAPHRTQPPSEREMASVAEMQPLAPAGYRRAPEMKEKVEASVVDLEAGTGETLYPGISRGESALRWGFVRKVYGILAAQLLLTTAVSALTVLHPTLNATLSDSPGLALVLAVLPFILMIPLYHYQHKHPHNFVFLGLFTLCLSFSIGVACANTQGKIVLEALVLTAGVVVSLTAYAFWASKKGKEFGYLGPILSSALTILVLTSFLQVFFPLGPVSVGLFGGLGALVFSGFILYDTENLIKRHTYDEYIWASVGLYLDILNLFLSILNMLRSMQSDN

SEQ ID NO: 27906 - protein, 264 aa, Zea mays subsp. mays; identical to SEQ ID NO: 26850
  peptide (1)..(264): Ceres Seq. ID no. 12350536
  misc_feature (48)..(258): Pfam Name: Pfam Description:  Uncharacterised protein family UPF0005
  misc_feature (30)..(264): NCBI GI NO: 18414455 NR Description: Expressed protein; protein id: At4g15470
  misc_feature (30)..(222): NCBI GI NO: 15810201 NR Description: AT4g15470/dl3775w [Arabidopsis thaliana]
  misc_feature (31)..(259): NCBI GI NO: 34393841 NR Description: putative z-protein
  misc_feature (31)..(262): NCBI GI NO: 15229411 NR Description: putative protein; protein id: At3g63310.1
  misc_feature (31)..(261): NCBI GI NO: 15218701 NR Description: putative glutamate/aspartate-binding peptide
  misc_feature (31)..(261): NCBI GI NO: 15235466 NR Description: putative glutamate-/aspartate-binding peptide
  misc_feature (40)..(262): NCBI GI NO: 14626300 NR Description: putative receptor-associated protein
  misc_feature (30)..(105): NCBI GI NO: 7485070 NR Description: hypothetical protein - Arabidopsis thaliana
  misc_feature (142)..(213): NCBI GI NO: 7485070 NR Description: hypothetical protein - Arabidopsis thaliana
  misc_feature (102)..(142): NCBI GI NO: 7485070 NR Description: hypothetical protein - Arabidopsis thaliana

SEQ ID NO: 27907 - protein, 258 aa, Zea mays subsp. mays; identical to SEQ ID NO: 26851
  peptide (1)..(258): Ceres Seq. ID no. 12350537
  misc_feature (42)..(252): Pfam Name: Pfam Description:  Uncharacterised protein family UPF0005
  misc_feature (24)..(258): NCBI GI NO: 18414455 NR Description: Expressed protein; protein id: At4g15470
  misc_feature (24)..(216): NCBI GI NO: 15810201 NR Description: AT4g15470/dl3775w [Arabidopsis thaliana]
  misc_feature (25)..(253): NCBI GI NO: 34393841 NR Description: putative z-protein
  misc_feature (25)..(256): NCBI GI NO: 15229411 NR Description: putative protein; protein id: At3g63310.1
  misc_feature (25)..(255): NCBI GI NO: 15218701 NR Description: putative glutamate/aspartate-binding peptide
  misc_feature (25)..(255): NCBI GI NO: 15235466 NR Description: putative glutamate-/aspartate-binding peptide
  misc_feature (34)..(256): NCBI GI NO: 14626300 NR Description: putative receptor-associated protein
  misc_feature (24)..(99): NCBI GI NO: 7485070 NR Description: hypothetical protein - Arabidopsis thaliana
  misc_feature (136)..(207): NCBI GI NO: 7485070 NR Description: hypothetical protein - Arabidopsis thaliana
  misc_feature (96)..(136): NCBI GI NO: 7485070 NR Description: hypothetical protein - Arabidopsis thaliana

SEQ ID NO: 27908 - DNA, 1251 bp, Zea mays subsp. mays
  misc_feature (1)..(1251): Ceres Seq. ID no. 12402548
aatctagcatcagcgcgcggggtctgagagcagagcggcagggcgccatggcggcatcggtggcgctgagcagcgggcaccggatgccggcggtggggctgggcgtgtggcggatggagaaggcggacatccgcggcctcatccacacagcgctccgcgtcggctaccgccacctggactgcgccgctgactaccagaacgaagctgaagttggtgacgcgctcgcagaggcattccagaccggactcgtcaagcgggaggacctgttcatcacaaccaagctgtggaactcagaccatgggcatgtgcttgaagcctgcaaggacagcctgaagaagctgcagctagactatctcgacctctacctcatccatttcccagtagccactcggcacaccggagtcggcacgacttctagcgctctgggtgacgatggcgtgctggacatcgacaccactatctccctggaaacgacatggcacgcgatggaagagcttgtttccatggggctggtgcgcagcattggaatcagcaactacgacatcttcctcaccagagactgcctggcctacgccaagataaagccggcggtgaaccagatcgagacgcacccctacttccagcgcgactcacttgtcaagttctgccagaagcacgggatctgcgtgaccgcgcacaccccgctgggtggctccaccgccaacgccgagtggttcgggacggtctcgtgcctggacgaccctgtcatcaagagcttggctgataagtacggcaagacgccggcgcagctcgtcctccgctggggtctgcagcgggacacggtggtgatccccaagacctccaaggtggagaggctgcaggagaactttgacgtcttcggtttcgacatctccggcgaggacatggagaggatgaaggccatcgaccggaagtaccggactaaccagcctgccaagttctggggcatcgacctctatgcttagcttttagttcggttgcgttgcgtcgcgtactcgcgtgctgcgtctctcggcccccccagacaagacagcatcaataatgaggataccctcagacggcatcagtcaaagtcatgaggatctcagacagcatcttccatcacatgtgacggtgtgaggttgatggtagggtttggtatccccacgtgtccctctctctttcagctcagctaatcatcaccatgtagactacgcagtgtttgcctccgattatttactgtttttcttcctt

SEQ ID NO: 27909 - protein, 326 aa, Zea mays subsp. mays
  peptide (1)..(326): Ceres Seq. ID no. 12402549
  misc_feature (20)..(326): NCBI GI NO: 15226489 NR Description: mannose 6-phosphate reductase
  misc_feature (20)..(326): NCBI GI NO: 21592829 NR Description: putative NADPH dependent mannose 6-phosphatereductase
  misc_feature (20)..(326): NCBI GI NO: 15226502 NR Description: mannose 6-phosphate reductase
  misc_feature (20)..(326): NCBI GI NO: 10334991 NR Description: NADPH-dependent mannose 6-phosphate reductase
  misc_feature (20)..(326): NCBI GI NO: 21554266 NR Description: putative NADPH dependent mannose 6-phosphatereductase
  misc_feature (19)..(326): NCBI GI NO: 1835701 NR Description: NADPH-dependent mannose 6-phosphate reductase
  misc_feature (18)..(326): NCBI GI NO: 134153 NR Description: NADP-dependent D-sorbitol-6-phosphate dehydrogenase
  misc_feature (62)..(326): NCBI GI NO: 19310926 NR Description: NADP dependent sorbitol 6-phosphate dehydrogenase
  misc_feature (62)..(326): NCBI GI NO: 19310928 NR Description: NADP dependent sorbitol 6-phosphate dehydrogenase
  misc_feature (62)..(326): NCBI GI NO: 19310934 NR Description: NADP dependent sorbitol 6-phosphate dehydrogenase
SSISARGLRAERQGAMAASVALSSGHRMPAVGLGVWRMEKADIRGLIHTALRVGYRHLDCAADYQNEAEVGDALAEAFQTGLVKREDLFITTKLWNSDHGHVLEACKDSLKKLQLDYLDLYLIHFPVATRHTGVGTTSSALGDDGVLDIDTTISLETTWHAMEELVSMGLVRSIGISNYDIFLTRDCLAYAKIKPAVNQIETHPYFQRDSLVKFCQKHGICVTAHTPLGGSTANAEWFGTVSCLDDPVIKSLADKYGKTPAQLVLRWGLQRDTVVIPKTSKVERLQENFDVFGFDISGEDMERMKAIDRKYRTNQPAKFWGIDLYA

SEQ ID NO: 27910 - protein, 311 aa, Zea mays subsp. mays
  peptide (1)..(311): Ceres Seq. ID no. 12402550
  misc_feature (5)..(311): NCBI GI NO: 15226489 NR Description: mannose 6-phosphate reductase
  misc_feature (5)..(311): NCBI GI NO: 21592829 NR Description: putative NADPH dependent mannose 6-phosphatereductase
  misc_feature (5)..(311): NCBI GI NO: 15226502 NR Description: mannose 6-phosphate reductase
  misc_feature (5)..(311): NCBI GI NO: 10334991 NR Description: NADPH-dependent mannose 6-phosphate reductase
  misc_feature (5)..(311): NCBI GI NO: 21554266 NR Description: putative NADPH dependent mannose 6-phosphatereductase
  misc_feature (4)..(311): NCBI GI NO: 1835701 NR Description: NADPH-dependent mannose 6-phosphate reductase
  misc_feature (3)..(311): NCBI GI NO: 134153 NR Description: NADP-dependent D-sorbitol-6-phosphate dehydrogenase
  misc_feature (47)..(311): NCBI GI NO: 19310926 NR Description: NADP dependent sorbitol 6-phosphate dehydrogenase
  misc_feature (47)..(311): NCBI GI NO: 19310928 NR Description: NADP dependent sorbitol 6-phosphate dehydrogenase
  misc_feature (47)..(311): NCBI GI NO: 19310934 NR Description: NADP dependent sorbitol 6-phosphate dehydrogenase
MAASVALSSGHRMPAVGLGVWRMEKADIRGLIHTALRVGYRHLDCAADYQNEAEVGDALAEAFQTGLVKREDLFITTKLWNSDHGHVLEACKDSLKKLQLDYLDLYLIHFPVATRHTGVGTTSSALGDDGVLDIDTTISLETTWHAMEELVSMGLVRSIGISNYDIFLTRDCLAYAKIKPAVNQIETHPYFQRDSLVKFCQKHGICVTAHTPLGGSTANAEWFGTVSCLDDPVIKSLADKYGKTPAQLVLRWGLQRDTVVIPKTSKVERLQENFDVFGFDISGEDMERMKAIDRKYRTNQPAKFWGIDLYA

SEQ ID NO: 27911 - protein, 299 aa, Zea mays subsp. mays
  peptide (1)..(299): Ceres Seq. ID no. 12402551
  misc_feature (1)..(299): NCBI GI NO: 15226489 NR Description: mannose 6-phosphate reductase
  misc_feature (1)..(299): NCBI GI NO: 21592829 NR Description: putative NADPH dependent mannose 6-phosphatereductase
  misc_feature (1)..(299): NCBI GI NO: 15226502 NR Description: mannose 6-phosphate reductase
  misc_feature (1)..(299): NCBI GI NO: 10334991 NR Description: NADPH-dependent mannose 6-phosphate reductase
  misc_feature (1)..(299): NCBI GI NO: 21554266 NR Description: putative NADPH dependent mannose 6-phosphatereductase
  misc_feature (1)..(299): NCBI GI NO: 1835701 NR Description: NADPH-dependent mannose 6-phosphate reductase
  misc_feature (1)..(299): NCBI GI NO: 134153 NR Description: NADP-dependent D-sorbitol-6-phosphate dehydrogenase
  misc_feature (35)..(299): NCBI GI NO: 19310926 NR Description: NADP dependent sorbitol 6-phosphate dehydrogenase
  misc_feature (35)..(299): NCBI GI NO: 19310928 NR Description: NADP dependent sorbitol 6-phosphate dehydrogenase
  misc_feature (35)..(299): NCBI GI NO: 19310934 NR Description: NADP dependent sorbitol 6-phosphate dehydrogenase
MPAVGLGVWRMEKADIRGLIHTALRVGYRHLDCAADYQNEAEVGDALAEAFQTGLVKREDLFITTKLWNSDHGHVLEACKDSLKKLQLDYLDLYLIHFPVATRHTGVGTTSSALGDDGVLDIDTTISLETTWHAMEELVSMGLVRSIGISNYDIFLTRDCLAYAKIKPAVNQIETHPYFQRDSLVKFCQKHGICVTAHTPLGGSTANAEWFGTVSCLDDPVIKSLADKYGKTPAQLVLRWGLQRDTVVIPKTSKVERLQENFDVFGFDISGEDMERMKAIDRKYRTNQPAKFWGIDLYA

SEQ ID NO: 27912 - DNA, 629 bp, Zea mays subsp. mays
  misc_feature (1)..(629): Ceres Seq. ID no. 12372485
atgatggtgtcaagctttgggatcttcggaaattaagaaattttaggaccttctctccctatgattcagatacgccaacaaatactgtggaatttgattttagtggaaactatcttgccattggtggttcagatataagggtctaccaagtagctaatgttaaggccgaatggaatctcatcaagacattaccagatttatctggaacagggaaagtaacttcggtaaagttcggagcagatgctaagtacatagccgtaggttctatggaccgcaatctacggatatttggcctccctggagacgaccaaatggaggaatcaaccacagcggcagagtgaggaaaatccatggttatcagcattcattgtctatttggccactgtcgagaggtaatccacggagacacaccgctggcgcccgtgacacttggcctgtttggttacttgctaaaaattgctacacatttttgtgccacacttgtttaagcacacttgtttaaggtgtttaaggttatacgctcaaattccgcgtcacagcttgtttgtcactcataagagaatattgcctgtaaaatgagagtctgaacgacttgcccgtaaaatgagatggaaaatcagttagctgct

SEQ ID NO: 27913 - protein, 112 aa, Zea mays subsp. mays
  peptide (1)..(112): Ceres Seq. ID no. 12372486
  misc_feature (1)..(112): NCBI GI NO: 37535206 NR Description: putative WD-repeat containing protein
  misc_feature (1)..(107): NCBI GI NO: 18390401 NR Description: putative pre-mRNA splicing factor PRP19
  misc_feature (1)..(92): NCBI GI NO: 30685653 NR Description: transducin / WD-40 repeat protein family
  misc_feature (1)..(92): NCBI GI NO: 25408261 NR Description: probable PRP19-like spliceosomal protein
  misc_feature (1)..(92): NCBI GI NO: 30685651 NR Description: transducin / WD-40 repeat protein family
  misc_feature (47)..(107): NCBI GI NO: 25406791 NR Description: hypothetical protein
  misc_feature (1)..(32): NCBI GI NO: 25406791 NR Description: hypothetical protein
  misc_feature (3)..(98): NCBI GI NO: 28278498 NR Description: Similar to nuclear matrix protein NMP200 related tosplicing factor PRP19
  misc_feature (3)..(97): NCBI GI NO: 29841245 NR Description: similar to NM_079059 GTP-binding-protein inDrosophila melanogaster
  misc_feature (3)..(98): NCBI GI NO: 17647459 NR Description: GTP-binding-protein CG5519-PA
DGVKLWDLRKLRNFRTFSPYDSDTPTNTVEFDFSGNYLAIGGSDIRVYQVANVKAEWNLIKTLPDLSGTGKVTSVKFGADAKYIAVGSMDRNLRIFGLPGDDQMEESTTAAE

SEQ ID NO: 27914 - DNA, 888 bp, Zea mays subsp. mays
  misc_feature (1)..(888): Ceres Seq. ID no. 12402297
acaaaataagttctgcggcggcgatggcgctctcctcctcccggccgaagcacctcctgcgccccctcctgcggggtttccacgcctcagcgcgggccctggcgcgggtggagccgcacgagttctccaagcccagcgagtacctgggcagctgggagcccgcggcggagcctcgggaggcgtgggcgcggctggaccggctgcgcaaggggtacgcgagcgaggtgcgggagctgcggcggcagtacgcctacgaggtgcagctgttgcaggccgagcggcagcggaaggccgacgccagagccgaggccgcccgcgccgccaaccaggagcgcaaggccgccaagctcgccgccgcccagacgcgcgccgccgagcgccgcgcgttcgaggaggacttccgccagaccctcatgaaagaaagagctgagaagctggagagctggcggaagaaggagaagcgcaaagaggagaagaaggcaataaagaaggagctcctgcgcaggaagagcagcatgtggctttctgaagataagattgaagaacaaatacaaactgctatcatgcaaaccactcctctatgaggttggttctgcgaggaaagctgataatagtagcttgcgaatcatgaggaggggggtggacatcacatggacgtgctcgtcgttacctgtgagaagctaataagaacggacctggtatttggcgtggaaaaggccgtgtgtttatttagttagacttgatcacaccaaaagctgtgcctggagagatggctgaatctgctgtgccttcctttttcacgatccatttgttgttctcgtctgcttaaactcttggcgtgatctggacggaacatatttttggcaattttcttgacgaagaatgacc

SEQ ID NO: 27915 - protein, 193 aa, Zea mays subsp. mays
  peptide (1)..(193): Ceres Seq. ID no. 12402298
  misc_feature (77)..(182): Pfam Name: Pfam Description:  Troponin
  misc_feature (23)..(193): NCBI GI NO: 18423002 NR Description: expressed protein; protein id: At5g49210
  misc_feature (23)..(193): NCBI GI NO: 21618271 NR Description: unknown [Arabidopsis thaliana]
  misc_feature (23)..(138): NCBI GI NO: 10177150 NR Description: gene_id:K21P3.8~unknown protein
KISSAAAMALSSSRPKHLLRPLLRGFHASARALARVEPHEFSKPSEYLGSWEPAAEPREAWARLDRLRKGYASEVRELRRQYAYEVQLLQAERQRKADARAEAARAANQERKAAKLAAAQTRAAERRAFEEDFRQTLMKERAEKLESWRKKEKRKEEKKAIKKELLRRKSSMWLSEDKIEEQIQTAIMQTTPL

SEQ ID NO: 27916 - protein, 186 aa, Zea mays subsp. mays
  peptide (1)..(186): Ceres Seq. ID no. 12402299
  misc_feature (70)..(175): Pfam Name: Pfam Description:  Troponin
  misc_feature (16)..(186): NCBI GI NO: 18423002 NR Description: expressed protein; protein id: At5g49210
  misc_feature (16)..(186): NCBI GI NO: 21618271 NR Description: unknown [Arabidopsis thaliana]
  misc_feature (16)..(131): NCBI GI NO: 10177150 NR Description: gene_id:K21P3.8~unknown protein
MALSSSRPKHLLRPLLRGFHASARALARVEPHEFSKPSEYLGSWEPAAEPREAWARLDRLRKGYASEVRELRRQYAYEVQLLQAERQRKADARAEAARAANQERKAAKLAAAQTRAAERRAFEEDFRQTLMKERAEKLESWRKKEKRKEEKKAIKKELLRRKSSMWLSEDKIEEQIQTAIMQTTPL

SEQ ID NO: 27917 - protein, 142 aa, Zea mays subsp. mays
  peptide (1)..(142): Ceres Seq. ID no. 12402300
  misc_feature (12)..(133): NCBI GI NO: 37533904 NR Description: Red chlorophyll catabolite reductase
  misc_feature (12)..(133): NCBI GI NO: 14018063 NR Description: Putative red chlorophyll catabolite reductase
QNKFCGGDGALLLPAEAPPAPPPAGFPRLSAGPGAGGAARVLQAQRVPGQLGARGGASGGVGAAGPAAQGVRERGAGAAAAVRLRGAAVAGRAAAEGRRQSRGRPRRQPGAQGRQARRRPDARRRAPRVRGGLPPDPHERKS

SEQ ID NO: 27918 - DNA, 1401 bp, Zea mays subsp. mays
  misc_feature (1)..(1401): Ceres Seq. ID no. 12409176
aaccaccaccatagatcgatccttgagttgacgaaaacatacacagctgctagctaatcctgccgtgagtgcaatgcatgcgaagatgacgaagcccgcagccatcgttgttgctgctatcgccgtcctctccgtcagcctgctggctggggtcgtcgtgccttgcccttgcgcggcccagcggcgacttctccatcgtgggctactcagaggaggacctgtcgtcgcacgagagcctggcggagctgttcgagcgctggctgtcccgccaccgcagggcgtacgccagcctggaggagaagctccggcggttccaggtgttcaaggacaacctgcaccacatcgacgagaccaaccgcaaggtgagcagctactggctgggcctcaacgagttcgccgacctcacgcacgacgagttcaaggccacctacctcggcctacggagcagtgttggcgatggtggtagtggtatcgatgacgacgacgagccggaggaggaggagggctacgagggtgtggacggggcgagcctccccaagtcggtggactggcggagcaagggcgcggtgacgggggtaaagaaccagggccagtgcggcagctgctgggccttctccacggtggccgccgtcgagggcatcaaccagatcgtcacgggcaacctcacggcgctgtcggagcaggagctcatcgactgcgacacggacggcaacaacggctgcaacggcggcctcatggactacgccttctcctacatcgcacacaacggcggcctccacacggaggaggcctacccgtacctcatggaggaaggcacctgccagcgcagcagcagcagcgagaagaagtggccgggatcgtcggaggacgccaacgacgatgccgcggtggtcaccatctccgggtacgaggacgtgccgaggaacaacgagcaggcgctgctcaaagcgctggcgcaacagcccgtcagcgtcgccatcgaggcctccggcaggaacttccagttctacagcggcggcgtcttcgatgggccctgcggcacgcagctggaccacggggtagcggccgtcggctacgggacggcggccaagggccatgactacatcatcgtcaagaactcgtgggggcccagctggggcgagaaggggtacatccgcatgaggaggggcaccggcaagcgccagggcctctgcggcatcaacaagatggcctcctacccaaccaagaactgaactcagatcatcgattcatcgtcaagcagcagctggctgattactcccactgctggcgctccacgcttcactagttcttcgtcgttctccttcacttccattgttttcaagattggacgatctttcgttgtttgaaatgaaataataatgatgatggaattagtgttcc

SEQ ID NO: 27919 - protein, 165 aa, Zea mays subsp. mays
  peptide (1)..(165): Ceres Seq. ID no. 12409177
  misc_feature (1)..(163): Pfam Name: Pfam Description:  Papain family cysteine protease
  misc_feature (1)..(165): NCBI GI NO: 34905996 NR Description: putative cysteine proteinase
  misc_feature (1)..(165): NCBI GI NO: 14719319 NR Description: putative cysteine proteinase [Oryza sativa]
  misc_feature (1)..(164): NCBI GI NO: 37780041 NR Description: cysteine protease 14 [Trifolium repens]
  misc_feature (1)..(164): NCBI GI NO: 37780039 NR Description: cysteine protease 14 [Trifolium repens]
  misc_feature (1)..(164): NCBI GI NO: 18394919 NR Description: cysteine proteinase XCP2; protein id: At1g20850
  misc_feature (1)..(164): NCBI GI NO: 22759715 NR Description: cysteine proteinase [Zinnia elegans]
  misc_feature (1)..(164): NCBI GI NO: 30141025 NR Description: cysteine protease-4 [Helianthus annuus]
  misc_feature (1)..(164): NCBI GI NO: 18418684 NR Description: cysteine protease XCP1; protein id: At4g35350
  misc_feature (1)..(151): NCBI GI NO: 7435773 NR Description: cysteine proteinase (EC 3
  misc_feature (1)..(125): NCBI GI NO: 8886940 NR Description: F2D10.37 [Arabidopsis thaliana]
MDYAFSYIAHNGGLHTEEAYPYLMEEGTCQRSSSSEKKWPGSSEDANDDAAVVTISGYEDVPRNNEQALLKALAQQPVSVAIEASGRNFQFYSGGVFDGPCGTQLDHGVAAVGYGTAAKGHDYIIVKNSWGPSWGEKGYIRMRRGTGKRQGLCGINKMASYPTKN

SEQ ID NO: 27920 - protein, 142 aa, Zea mays subsp. mays
  peptide (1)..(142): Ceres Seq. ID no. 12409178
  misc_feature (1)..(140): Pfam Name: Pfam Description:  Papain family cysteine protease
  misc_feature (1)..(142): NCBI GI NO: 34905996 NR Description: putative cysteine proteinase
  misc_feature (1)..(142): NCBI GI NO: 14719319 NR Description: putative cysteine proteinase [Oryza sativa]
  misc_feature (1)..(141): NCBI GI NO: 37780041 NR Description: cysteine protease 14 [Trifolium repens]
  misc_feature (1)..(141): NCBI GI NO: 37780039 NR Description: cysteine protease 14 [Trifolium repens]
  misc_feature (1)..(141): NCBI GI NO: 18394919 NR Description: cysteine proteinase XCP2; protein id: At1g20850
  misc_feature (1)..(141): NCBI GI NO: 22759715 NR Description: cysteine proteinase [Zinnia elegans]
  misc_feature (1)..(141): NCBI GI NO: 30141025 NR Description: cysteine protease-4 [Helianthus annuus]
  misc_feature (1)..(141): NCBI GI NO: 18418684 NR Description: cysteine protease XCP1; protein id: At4g35350
  misc_feature (1)..(128): NCBI GI NO: 7435773 NR Description: cysteine proteinase (EC 3
  misc_feature (1)..(102): NCBI GI NO: 8886940 NR Description: F2D10.37 [Arabidopsis thaliana]
MEEGTCQRSSSSEKKWPGSSEDANDDAAVVTISGYEDVPRNNEQALLKALAQQPVSVAIEASGRNFQFYSGGVFDGPCGTQLDHGVAAVGYGTAAKGHDYIIVKNSWGPSWGEKGYIRMRRGTGKRQGLCGINKMASYPTKN

SEQ ID NO: 27921 - protein, 130 aa, Zea mays subsp. mays
  peptide (1)..(130): Ceres Seq. ID no. 12409179
MHAKMTKPAAIVVAAIAVLSVSLLAGVVVPCPCAAQRRLLHRGLLRGGPVVAREPGGAVRALAVPPPQGVRQPGGEAPAVPGVQGQPAPHRRDQPQGEQLLAGPQRVRRPHARRVQGHLPRPTEQCWRWW

SEQ ID NO: 27922 - DNA, 912 bp, Zea mays subsp. mays
  misc_feature (1)..(912): Ceres Seq. ID no. 12414036
gcacgagaccattacctagaacatcctaatcgaaaaatcagccctcacgcatgtggcacgcgatgggccggatctgaggttgagtgtgcgatcccgttggcatatcgacaaagtttggtgggtcccaccgcagatcccggcccggtaggtactagttccgccgtcccccctccctagtctccggggaggaccgtctcggccgcgagagtgcgctcgtcgactccactcagctctctcgctccctctcctcccccaaggccccagagacaggcagccggcgaggcccgccgccgcgaagcaatggatttcaaggggttctgggagtccagattcgggggcaagaaggaacccgagccggagcagaacgggcacgccaacggggtccagaaccagaagaggacctccgatctggcggtctacgagcagttcgagcagcaggccaggcagacccaggtccgagccgccgcgattcgcgacggagacgctgatgtcataagccccttctaccttcatttgagtcagctgaaatgcgtaatctcgcagagacattgttgagggatattattcgcgggagcccagatgtgaaatgggagagcatcaaaggactggaaaatgcaaaacgccttctaaaagaggctgttgtcatgcccataaagtacccaaaatacttcactggtctcctttctccatggaaaggcatcttactttttggccccccagggacaggaaagacaatgctggcaaaagcggtcgctactgagtgcaaaaccaccttcttcaacatttcagcatcatcaattgtcagcaaatggcgtggagattcagagaagcttgtcaaagttctgtttgagcttgctaggcatcatgcaccatccacaatattccttgatgaaatagatgctatcatcagcc

SEQ ID NO: 27923 - protein, 128 aa, Zea mays subsp. mays
  peptide (1)..(128): Ceres Seq. ID no. 12414037
  misc_feature (57)..(127): Pfam Name: AAA Pfam Description: ATPase family associated with various cellular activities
  misc_feature (1)..(127): NCBI GI NO: 34909678 NR Description: katanin p60 subunit A 1-like
  misc_feature (1)..(127): NCBI GI NO: 18403587 NR Description: putative katanin; protein id: At2g34560
  misc_feature (1)..(127): NCBI GI NO: 25408335 NR Description: probable katanin [imported] - Arabidopsis thaliana
  misc_feature (1)..(127): NCBI GI NO: 11071772 NR Description: probable AAA ATPase [Leishmania major]
  misc_feature (1)..(127): NCBI GI NO: 34911050 NR Description: putative katanin
  misc_feature (1)..(127): NCBI GI NO: 21313044 NR Description: RIKEN cDNA 4933439B08 [Mus musculus]
  misc_feature (1)..(127): NCBI GI NO: 34190544 NR Description: Unknown (protein for MGC:33211) [Homo sapiens]
  misc_feature (43)..(127): NCBI GI NO: 34932450 NR Description: similar to RIKEN cDNA 4933439B08
  misc_feature (1)..(44): NCBI GI NO: 34932450 NR Description: similar to RIKEN cDNA 4933439B08
  misc_feature (1)..(126): NCBI GI NO: 32478841 NR Description: katanin [Gossypium hirsutum]
MRNLAETLLRDIIRGSPDVKWESIKGLENAKRLLKEAVVMPIKYPKYFTGLLSPWKGILLFGPPGTGKTMLAKAVATECKTTFFNISASSIVSKWRGDSEKLVKVLFELARHHAPSTIFLDEIDAIIS

SEQ ID NO: 27924 - protein, 89 aa, Zea mays subsp. mays
  peptide (1)..(89): Ceres Seq. ID no. 12414038
  misc_feature (18)..(88): Pfam Name: AAA Pfam Description: ATPase family associated with various cellular activities
  misc_feature (1)..(88): NCBI GI NO: 34909678 NR Description: katanin p60 subunit A 1-like
  misc_feature (1)..(88): NCBI GI NO: 18403587 NR Description: putative katanin; protein id: At2g34560
  misc_feature (1)..(88): NCBI GI NO: 25408335 NR Description: probable katanin [imported] - Arabidopsis thaliana
  misc_feature (1)..(88): NCBI GI NO: 11071772 NR Description: probable AAA ATPase [Leishmania major]
  misc_feature (1)..(88): NCBI GI NO: 34911050 NR Description: putative katanin
  misc_feature (1)..(88): NCBI GI NO: 21313044 NR Description: RIKEN cDNA 4933439B08 [Mus musculus]
  misc_feature (1)..(88): NCBI GI NO: 34190544 NR Description: Unknown (protein for MGC:33211) [Homo sapiens]
  misc_feature (4)..(88): NCBI GI NO: 34932450 NR Description: similar to RIKEN cDNA 4933439B08
  misc_feature (1)..(87): NCBI GI NO: 32478841 NR Description: katanin [Gossypium hirsutum]
  misc_feature (1)..(87): NCBI GI NO: 32478843 NR Description: katanin [Gossypium barbadense]
MPIKYPKYFTGLLSPWKGILLFGPPGTGKTMLAKAVATECKTTFFNISASSIVSKWRGDSEKLVKVLFELARHHAPSTIFLDEIDAIIS

SEQ ID NO: 27925 - protein, 84 aa, Zea mays subsp. mays
  peptide (1)..(84): Ceres Seq. ID no. 12414039
  misc_feature (1)..(46): NCBI GI NO: 34909678 NR Description: katanin p60 subunit A 1-like
  misc_feature (46)..(65): NCBI GI NO: 34909678 NR Description: katanin p60 subunit A 1-like
MDFKGFWESRFGGKKEPEPEQNGHANGVQNQKRTSDLAVYEQFEQQARQTQVRAAAIRDGDADVISPFYLHLSQLKCVISQRHC

SEQ ID NO: 27926 - DNA, 1621 bp, Zea mays subsp. mays
  misc_feature (1)..(1621): Ceres Seq. ID no. 12384203
  misc_feature (628)..(628): n is a, c, t, g, unknown, or other
  misc_feature (739)..(739): n is a, c, t, g, unknown, or other
  misc_feature (654)..(654): n is a, c, t, g, unknown, or other
  misc_feature (655)..(655): n is a, c, t, g, unknown, or other
  misc_feature (534)..(534): n is a, c, t, g, unknown, or other
  misc_feature (657)..(657): n is a, c, t, g, unknown, or other
  misc_feature (678)..(678): n is a, c, t, g, unknown, or other
  misc_feature (658)..(658): n is a, c, t, g, unknown, or other
gcacgagaccattacctagaacatcctaatcgaaaagcatacttgcagctcgcacatctcatggtgtcgcaggaacgacaagagccagctgtgcctagcagcagcagcagcagcgccaagcgcgcagccacgtccatggacgccagcccggccccgccgctcctcctccgcgcccccactcccagccccagcattgacctccccgctggcaaggacaaggccgacgcggcggccagcaaggccggcgcggccgtgttcgacctgcgccgggagcccaagatccccgcgccattcctgtggccgcaggaagaggcgcggccgtcctcggccgcggagctggaggtgccgatggtggacgtgggcgtgctgcgcaatggcgaccgcgcggggctgcggcgcgccgcggcgcaggtggccgcggcgtgcgcgacgcacgggttcttccaggtgtgcgggcacggcgtggacgcggcgctggggcgcgccgcgctggacggcgccagcgacttcttccggctgccgctcgccgagaancagcgcgcccggcgcgtccccggcaccgtgtccgggtacaagagcgcgcacgccgaccggttcgcggccaagctcccctggaaggagaccctgncgttcggctaccacgacggcgccgcnncnnctgtcgtcgtggactacttngtcggcaccctcggccaggatttcgagccaatggggtgggtgtaccagaggtactgcgagnagatgaaggagctgtcgctgacgatcatggagctgctggagctgagcctgggcgtggagctgcgcggctactaccgggagttcttcgaggacagccggtccatcatgcggtgcaactactacccgccgtgcccggagccggagcgcacgctgggcacgggcccgcactgcgaccccacggcgctgaccatcctcctgcaggacgacgtgggcgggctggaggtgctggtggacggtgagtggcgccccgtccggcccgtcccgggcgccatggtcatcaacatcggcgacaccttcatggcgctgtcgaacgggaggtacaagagctgcctgcaccgcgcggtggtgaaccagcggcgggcgcggcggtcgctggccttcttcctgtgcccgcgcgaggaccgggtggtgcgcccgccggccagtgctgcgccgcggcgctacccggacttcacctgggccgacctcatgcgcttcacgcagcgccactaccgcgccgacacccgcacgctggacgccttcacccgctggctctcccacggcccggcccaggcggcggcgcctccctgcacctagcgagccgggccaaggccgtctctttcgccccacgtgcgcgcccagctgggcaggtgggcagacacgcggcccgcgggccccgcgccgccttgccattttttgacgctggccctactgctgtgctactagtgtacatatgcaagagtacatatatatatatatatacgtattttctatatattatatataaaagcaaggcggcccggtgcccttctcttgttttgtccacaactgtttgatcccattattctatggaccatggatacttcaatgtttgtactaagaccgtgaacgtgggattcttttc

SEQ ID NO: 27927 - protein, 437 aa, Zea mays subsp. mays
  peptide (1)..(437): Ceres Seq. ID no. 12384204
  misc_feature (278)..(377): Pfam Name: II Pfam Description: 2OG-Fe
  misc_feature (50)..(433): NCBI GI NO: 19422259 NR Description: gibberellin-20 oxidase [Oryza sativa]
  misc_feature (85)..(424): NCBI GI NO: 8919865 NR Description: gibberellin 20-oxidase
  misc_feature (85)..(424): NCBI GI NO: 7433210 NR Description: gibberellin 20-oxidase (EC 1
  misc_feature (85)..(424): NCBI GI NO: 18496057 NR Description: gibberellin 20-oxidase 1 [Fagus sylvatica]
  misc_feature (85)..(437): NCBI GI NO: 13625525 NR Description: gibberellin 20-oxidase [Lolium perenne]
  misc_feature (85)..(424): NCBI GI NO: 7433209 NR Description: gibberellin 20-oxidase (EC 1
  misc_feature (61)..(424): NCBI GI NO: 12231168 NR Description: gibberellin 20-oxidase [Malus x domestica]
  misc_feature (73)..(424): NCBI GI NO: 4164141 NR Description: gibberelin 20-oxidase [Lactuca sativa]
  misc_feature (85)..(437): NCBI GI NO: 13625519 NR Description: gibberellin 20-oxidase [Lolium perenne]
  misc_feature (73)..(424): NCBI GI NO: 6855711 NR Description: gibberellin c20-oxidase [Pisum sativum]
  misc_feature (178)..(178): Xaa is any aa, unknown or other
  misc_feature (210)..(210): Xaa is any aa, unknown or other
  misc_feature (218)..(218): Xaa is any aa, unknown or other
  misc_feature (219)..(219): Xaa is any aa, unknown or other
  misc_feature (220)..(220): Xaa is any aa, unknown or other
  misc_feature (226)..(226): Xaa is any aa, unknown or other
  misc_feature (247)..(247): Xaa is any aa, unknown or other
ARDHYLEHPNRKAYLQLAHLMVSQERQEPAVPSSSSSSAKRAATSMDASPAPPLLLRAPTPSPSIDLPAGKDKADAAASKAGAAVFDLRREPKIPAPFLWPQEEARPSSAAELEVPMVDVGVLRNGDRAGLRRAAAQVAAACATHGFFQVCGHGVDAALGRAALDGASDFFRLPLAEXQRARRVPGTVSGYKSAHADRFAAKLPWKETLXFGYHDGAXXXVVVDYXVGTLGQDFEPMGWVYQRYCEXMKELSLTIMELLELSLGVELRGYYREFFEDSRSIMRCNYYPPCPEPERTLGTGPHCDPTALTILLQDDVGGLEVLVDGEWRPVRPVPGAMVINIGDTFMALSNGRYKSCLHRAVVNQRRARRSLAFFLCPREDRVVRPPASAAPRRYPDFTWADLMRFTQRHYRADTRTLDAFTRWLSHGPAQAAAPPCT

SEQ ID NO: 27928 - protein, 417 aa, Zea mays subsp. mays
  peptide (1)..(417): Ceres Seq. ID no. 12384205
  misc_feature (258)..(357): Pfam Name: II Pfam Description: 2OG-Fe
  misc_feature (30)..(413): NCBI GI NO: 19422259 NR Description: gibberellin-20 oxidase [Oryza sativa]
  misc_feature (65)..(404): NCBI GI NO: 8919865 NR Description: gibberellin 20-oxidase
  misc_feature (65)..(404): NCBI GI NO: 7433210 NR Description: gibberellin 20-oxidase (EC 1
  misc_feature (65)..(404): NCBI GI NO: 18496057 NR Description: gibberellin 20-oxidase 1 [Fagus sylvatica]
  misc_feature (65)..(417): NCBI GI NO: 13625525 NR Description: gibberellin 20-oxidase [Lolium perenne]
  misc_feature (65)..(404): NCBI GI NO: 7433209 NR Description: gibberellin 20-oxidase (EC 1
  misc_feature (41)..(404): NCBI GI NO: 12231168 NR Description: gibberellin 20-oxidase [Malus x domestica]
  misc_feature (53)..(404): NCBI GI NO: 4164141 NR Description: gibberelin 20-oxidase [Lactuca sativa]
  misc_feature (65)..(417): NCBI GI NO: 13625519 NR Description: gibberellin 20-oxidase [Lolium perenne]
  misc_feature (53)..(404): NCBI GI NO: 6855711 NR Description: gibberellin c20-oxidase [Pisum sativum]
  misc_feature (158)..(158): Xaa is any aa, unknown or other
  misc_feature (190)..(190): Xaa is any aa, unknown or other
  misc_feature (198)..(198): Xaa is any aa, unknown or other
  misc_feature (199)..(199): Xaa is any aa, unknown or other
  misc_feature (200)..(200): Xaa is any aa, unknown or other
  misc_feature (206)..(206): Xaa is any aa, unknown or other
  misc_feature (227)..(227): Xaa is any aa, unknown or other
MVSQERQEPAVPSSSSSSAKRAATSMDASPAPPLLLRAPTPSPSIDLPAGKDKADAAASKAGAAVFDLRREPKIPAPFLWPQEEARPSSAAELEVPMVDVGVLRNGDRAGLRRAAAQVAAACATHGFFQVCGHGVDAALGRAALDGASDFFRLPLAEXQRARRVPGTVSGYKSAHADRFAAKLPWKETLXFGYHDGAXXXVVVDYXVGTLGQDFEPMGWVYQRYCEXMKELSLTIMELLELSLGVELRGYYREFFEDSRSIMRCNYYPPCPEPERTLGTGPHCDPTALTILLQDDVGGLEVLVDGEWRPVRPVPGAMVINIGDTFMALSNGRYKSCLHRAVVNQRRARRSLAFFLCPREDRVVRPPASAAPRRYPDFTWADLMRFTQRHYRADTRTLDAFTRWLSHGPAQAAAPPCT

SEQ ID NO: 27929 - protein, 392 aa, Zea mays subsp. mays
  peptide (1)..(392): Ceres Seq. ID no. 12384206
  misc_feature (233)..(332): Pfam Name: II Pfam Description: 2OG-Fe
  misc_feature (5)..(388): NCBI GI NO: 19422259 NR Description: gibberellin-20 oxidase [Oryza sativa]
  misc_feature (40)..(379): NCBI GI NO: 8919865 NR Description: gibberellin 20-oxidase
  misc_feature (40)..(379): NCBI GI NO: 7433210 NR Description: gibberellin 20-oxidase (EC 1
  misc_feature (40)..(379): NCBI GI NO: 18496057 NR Description: gibberellin 20-oxidase 1 [Fagus sylvatica]
  misc_feature (40)..(392): NCBI GI NO: 13625525 NR Description: gibberellin 20-oxidase [Lolium perenne]
  misc_feature (40)..(379): NCBI GI NO: 7433209 NR Description: gibberellin 20-oxidase (EC 1
  misc_feature (16)..(379): NCBI GI NO: 12231168 NR Description: gibberellin 20-oxidase [Malus x domestica]
  misc_feature (28)..(379): NCBI GI NO: 4164141 NR Description: gibberelin 20-oxidase [Lactuca sativa]
  misc_feature (40)..(392): NCBI GI NO: 13625519 NR Description: gibberellin 20-oxidase [Lolium perenne]
  misc_feature (28)..(379): NCBI GI NO: 6855711 NR Description: gibberellin c20-oxidase [Pisum sativum]
  misc_feature (133)..(133): Xaa is any aa, unknown or other
  misc_feature (165)..(165): Xaa is any aa, unknown or other
  misc_feature (173)..(173): Xaa is any aa, unknown or other
  misc_feature (174)..(174): Xaa is any aa, unknown or other
  misc_feature (175)..(175): Xaa is any aa, unknown or other
  misc_feature (181)..(181): Xaa is any aa, unknown or other
  misc_feature (202)..(202): Xaa is any aa, unknown or other
MDASPAPPLLLRAPTPSPSIDLPAGKDKADAAASKAGAAVFDLRREPKIPAPFLWPQEEARPSSAAELEVPMVDVGVLRNGDRAGLRRAAAQVAAACATHGFFQVCGHGVDAALGRAALDGASDFFRLPLAEXQRARRVPGTVSGYKSAHADRFAAKLPWKETLXFGYHDGAXXXVVVDYXVGTLGQDFEPMGWVYQRYCEXMKELSLTIMELLELSLGVELRGYYREFFEDSRSIMRCNYYPPCPEPERTLGTGPHCDPTALTILLQDDVGGLEVLVDGEWRPVRPVPGAMVINIGDTFMALSNGRYKSCLHRAVVNQRRARRSLAFFLCPREDRVVRPPASAAPRRYPDFTWADLMRFTQRHYRADTRTLDAFTRWLSHGPAQAAAPPCT

SEQ ID NO: 27930 - DNA, 1112 bp, Zea mays subsp. mays
  misc_feature (1)..(1112): Ceres Seq. ID no. 12379356
aacacgcatccgcagcactccctcctcggtccctcctctgcttcacacagaccagtgcgcgctcaattcccccctctagcgcctccaccgcaccaaaccggtccaacgggacctatgctctagcctcagagcaaaccaccgcctgaattgggcggcaattgggggaggattcgcggcaggcagggcgcggatccgttggcgggatgattgcggctgtcaacagagtgccggcgggctggggcgaggatgagatgtccgtgctgccgcggcacaccaaggtggtggtcaccggcaacaaccgcaccaagtcggtgctcgtgggattgcacggggtcgtgaagaaagccgtcggcctcggaggatggcattggctggtccttactaatggaatagaggtaaagctgcagcggaatgctttaagtgtgatagaacctccgactggcaacgaggatgatgataaatttgattgtgaaaacatgcagtggaatagttcagatatggcctccgatgatgcactatcaccaaagccacagcggtcacggagcaggcagcataggggtttccacagaaaatccatcagccgttcaatgtcatgtgactcccactccaagacgtctgtttcatcttcctcaagagctcacacgaaagttgacctaagcaagctagaactgactgcactgctgagatattggcgtcacttcaatctcgatgcatgtcctaatccatccagagagcagttagttgatgctgttcaaaggcacttcacagcccagcaattggatgagttgcaggtcattgtcggctttgtgcaagctgcaaagaggctaaagacgactatgaaagtggcctgactgtgaagcctgaacttcaactaacagattcaagagaggatgtagcatgtttgatgaatgttgccgtgctatgtaatatatatgcatgaagttctttagattcaggtggctaggttaatggacaactagactatgttagcctcatctgatgtagatatgcagtatcctgtctaaagatgtttcaacctctagctcagttctttcctgctgactggatgtggattgaaatgacaagtttaaaacaagttattttgtcatccc

SEQ ID NO: 27931 - protein, 215 aa, Zea mays subsp. mays
  peptide (1)..(215): Ceres Seq. ID no. 12379357
  misc_feature (1)..(215): NCBI GI NO: 18767383 NR Description: Hypothetical protein [Oryza sativa]
  misc_feature (1)..(215): NCBI GI NO: 37533376 NR Description: hypothetical protein
  misc_feature (14)..(213): NCBI GI NO: 25372870 NR Description: protein F18O14.5 [imported] - Arabidopsis thaliana
  misc_feature (14)..(213): NCBI GI NO: 18394724 NR Description: expressed protein; protein id: At1g19330
  misc_feature (14)..(214): NCBI GI NO: 15222092 NR Description: hypothetical protein; protein id: At1g75060.1
  misc_feature (13)..(210): NCBI GI NO: 38346468 NR Description: OSJNBa0019G23.16
  misc_feature (13)..(84): NCBI GI NO: 38567956 NR Description: OSJNBb0115I21.12
  misc_feature (190)..(210): NCBI GI NO: 38567956 NR Description: OSJNBb0115I21.12
MIAAVNRVPAGWGEDEMSVLPRHTKVVVTGNNRTKSVLVGLHGVVKKAVGLGGWHWLVLTNGIEVKLQRNALSVIEPPTGNEDDDKFDCENMQWNSSDMASDDALSPKPQRSRSRQHRGFHRKSISRSMSCDSHSKTSVSSSSRAHTKVDLSKLELTALLRYWRHFNLDACPNPSREQLVDAVQRHFTAQQLDELQVIVGFVQAAKRLKTTMKVA

SEQ ID NO: 27932 - protein, 199 aa, Zea mays subsp. mays
  peptide (1)..(199): Ceres Seq. ID no. 12379358
  misc_feature (1)..(199): NCBI GI NO: 18767383 NR Description: Hypothetical protein [Oryza sativa]
  misc_feature (1)..(199): NCBI GI NO: 37533376 NR Description: hypothetical protein
  misc_feature (1)..(197): NCBI GI NO: 25372870 NR Description: protein F18O14.5 [imported] - Arabidopsis thaliana
  misc_feature (1)..(197): NCBI GI NO: 18394724 NR Description: expressed protein; protein id: At1g19330
  misc_feature (1)..(198): NCBI GI NO: 15222092 NR Description: hypothetical protein; protein id: At1g75060.1
  misc_feature (1)..(194): NCBI GI NO: 38346468 NR Description: OSJNBa0019G23.16
  misc_feature (1)..(68): NCBI GI NO: 38567956 NR Description: OSJNBb0115I21.12
  misc_feature (174)..(194): NCBI GI NO: 38567956 NR Description: OSJNBb0115I21.12
MSVLPRHTKVVVTGNNRTKSVLVGLHGVVKKAVGLGGWHWLVLTNGIEVKLQRNALSVIEPPTGNEDDDKFDCENMQWNSSDMASDDALSPKPQRSRSRQHRGFHRKSISRSMSCDSHSKTSVSSSSRAHTKVDLSKLELTALLRYWRHFNLDACPNPSREQLVDAVQRHFTAQQLDELQVIVGFVQAAKRLKTTMKVA

SEQ ID NO: 27933 - protein, 124 aa, Zea mays subsp. mays
  peptide (1)..(124): Ceres Seq. ID no. 12379359
  misc_feature (1)..(124): NCBI GI NO: 18767383 NR Description: Hypothetical protein [Oryza sativa]
  misc_feature (1)..(124): NCBI GI NO: 37533376 NR Description: hypothetical protein
  misc_feature (1)..(122): NCBI GI NO: 25372870 NR Description: protein F18O14.5 [imported] - Arabidopsis thaliana
  misc_feature (1)..(122): NCBI GI NO: 18394724 NR Description: expressed protein; protein id: At1g19330
  misc_feature (1)..(123): NCBI GI NO: 15222092 NR Description: hypothetical protein; protein id: At1g75060.1
  misc_feature (1)..(119): NCBI GI NO: 38346468 NR Description: OSJNBa0019G23.16
  misc_feature (99)..(119): NCBI GI NO: 38567956 NR Description: OSJNBb0115I21.12
MQWNSSDMASDDALSPKPQRSRSRQHRGFHRKSISRSMSCDSHSKTSVSSSSRAHTKVDLSKLELTALLRYWRHFNLDACPNPSREQLVDAVQRHFTAQQLDELQVIVGFVQAAKRLKTTMKVA

SEQ ID NO: 27934 - DNA, 1012 bp, Zea mays subsp. mays
  misc_feature (1)..(1012): Ceres Seq. ID no. 12434780
gcacgagaccattacctagaacatcctaatcgaaaaagacttcgctcggtaagagtcctacctcaaggacgatagacatgttgaacagcctttgccgcgacaggaacaacatggtcttccttgtgagcgcaaagagccggatgactctgaacgaatggttcttaccatgtgagagccttggactagcagctgaacacggctgcttcctcaggctgagaagagacgcagaatgggagacatgcgttccggtgatagactgcagctggaagcagatcgcagagcctgtgatgaagacctataccgagactacggacgggtcgactattgaggacaaggagactgccatcgtgtggtgctacgaggacgccgatccagatttcggatcctgccaggccaaggagctccacgaccatctggagagcgtgcttgcaaacgagccggtctcagtgaaagctggacccaacctcgtcgaggtgaagccacagggcgtaagcaagggcctggtggcgaagcggatcctgtcgacgacgcaggagcggggcgacgccgacgacgacctgccggacttcgtgctgtgcgtgggcgacgaccggtccgacgaggacatgttcgaggtgatcgcggcggcggcggccgcgaggggcgtgtcctccctgcaggcggaggcggaggtgttcgcgtgcacggtggggcgcaagcccagcaaggccaagtactacctggacgaccccgcggacatcgtgcgcctcgtccagggcctcgccagcgtctccgacgacgaccagacgcacgccccaccgccgccgcctccctcggcggcgacgacggcggcggacaccgtgccgaggtgaaccgtgtcggcgtgcgggggtgcggtgcagttagctctaggcggcatgagaccttgtggttgtggtggaactagtggaagggaccgtcgctcgcgactgttcgcaggtggtgtacaaaatgctctaggaatgttgtggtctgggaatgtccttgttcgtgc

SEQ ID NO: 27935 - protein, 257 aa, Zea mays subsp. mays
  peptide (1)..(257): Ceres Seq. ID no. 12434781
  misc_feature (1)..(217): Pfam Name: Pfam Description:  Trehalose-phosphatase
  misc_feature (1)..(233): NCBI GI NO: 25347119 NR Description: hypothetical protein T23K23.13
  misc_feature (1)..(242): NCBI GI NO: 34902280 NR Description: Putative trehalose-6-phosphate synthase
  misc_feature (1)..(244): NCBI GI NO: 7488400 NR Description: trehalose-6-phosphate synthase homolog DL4920W -Arabidopsis thaliana
  misc_feature (1)..(244): NCBI GI NO: 18414960 NR Description: trehalose-6-phosphate synthase like protein
  misc_feature (1)..(255): NCBI GI NO: 15219002 NR Description: trehalose-6-phosphate synthase, putative
  misc_feature (1)..(232): NCBI GI NO: 7488401 NR Description: trehalose-6-phosphate synthase homolog F17O7
  misc_feature (1)..(232): NCBI GI NO: 30698024 NR Description: alpha
  misc_feature (1)..(242): NCBI GI NO: 19568935 NR Description: putative trehalose synthase [Solanum tuberosum]
  misc_feature (1)..(235): NCBI GI NO: 34909526 NR Description: putative trehalose-6-phosphate synthase homolog
  misc_feature (1)..(236): NCBI GI NO: 15220891 NR Description: trehalose 6-phosphate synthase, putative
MLNSLCRDRNNMVFLVSAKSRMTLNEWFLPCESLGLAAEHGCFLRLRRDAEWETCVPVIDCSWKQIAEPVMKTYTETTDGSTIEDKETAIVWCYEDADPDFGSCQAKELHDHLESVLANEPVSVKAGPNLVEVKPQGVSKGLVAKRILSTTQERGDADDDLPDFVLCVGDDRSDEDMFEVIAAAAAARGVSSLQAEAEVFACTVGRKPSKAKYYLDDPADIVRLVQGLASVSDDDQTHAPPPPPPSAATTAADTVPR

SEQ ID NO: 27936 - protein, 246 aa, Zea mays subsp. mays
  peptide (1)..(246): Ceres Seq. ID no. 12434782
  misc_feature (1)..(206): Pfam Name: Pfam Description:  Trehalose-phosphatase
  misc_feature (1)..(222): NCBI GI NO: 25347119 NR Description: hypothetical protein T23K23.13
  misc_feature (1)..(231): NCBI GI NO: 34902280 NR Description: Putative trehalose-6-phosphate synthase
  misc_feature (1)..(233): NCBI GI NO: 7488400 NR Description: trehalose-6-phosphate synthase homolog DL4920W -Arabidopsis thaliana
  misc_feature (1)..(233): NCBI GI NO: 18414960 NR Description: trehalose-6-phosphate synthase like protein
  misc_feature (1)..(244): NCBI GI NO: 15219002 NR Description: trehalose-6-phosphate synthase, putative
  misc_feature (1)..(221): NCBI GI NO: 7488401 NR Description: trehalose-6-phosphate synthase homolog F17O7
  misc_feature (1)..(221): NCBI GI NO: 30698024 NR Description: alpha
  misc_feature (1)..(231): NCBI GI NO: 19568935 NR Description: putative trehalose synthase [Solanum tuberosum]
  misc_feature (1)..(224): NCBI GI NO: 34909526 NR Description: putative trehalose-6-phosphate synthase homolog
  misc_feature (1)..(225): NCBI GI NO: 15220891 NR Description: trehalose 6-phosphate synthase, putative
MVFLVSAKSRMTLNEWFLPCESLGLAAEHGCFLRLRRDAEWETCVPVIDCSWKQIAEPVMKTYTETTDGSTIEDKETAIVWCYEDADPDFGSCQAKELHDHLESVLANEPVSVKAGPNLVEVKPQGVSKGLVAKRILSTTQERGDADDDLPDFVLCVGDDRSDEDMFEVIAAAAAARGVSSLQAEAEVFACTVGRKPSKAKYYLDDPADIVRLVQGLASVSDDDQTHAPPPPPPSAATTAADTVPR

SEQ ID NO: 27937 - protein, 236 aa, Zea mays subsp. mays
  peptide (1)..(236): Ceres Seq. ID no. 12434783
  misc_feature (1)..(196): Pfam Name: Pfam Description:  Trehalose-phosphatase
  misc_feature (1)..(212): NCBI GI NO: 25347119 NR Description: hypothetical protein T23K23.13
  misc_feature (1)..(221): NCBI GI NO: 34902280 NR Description: Putative trehalose-6-phosphate synthase
  misc_feature (1)..(223): NCBI GI NO: 7488400 NR Description: trehalose-6-phosphate synthase homolog DL4920W -Arabidopsis thaliana
  misc_feature (1)..(223): NCBI GI NO: 18414960 NR Description: trehalose-6-phosphate synthase like protein
  misc_feature (1)..(234): NCBI GI NO: 15219002 NR Description: trehalose-6-phosphate synthase, putative
  misc_feature (1)..(211): NCBI GI NO: 7488401 NR Description: trehalose-6-phosphate synthase homolog F17O7
  misc_feature (1)..(211): NCBI GI NO: 30698024 NR Description: alpha
  misc_feature (1)..(221): NCBI GI NO: 19568935 NR Description: putative trehalose synthase [Solanum tuberosum]
  misc_feature (1)..(214): NCBI GI NO: 34909526 NR Description: putative trehalose-6-phosphate synthase homolog
  misc_feature (1)..(215): NCBI GI NO: 15220891 NR Description: trehalose 6-phosphate synthase, putative
MTLNEWFLPCESLGLAAEHGCFLRLRRDAEWETCVPVIDCSWKQIAEPVMKTYTETTDGSTIEDKETAIVWCYEDADPDFGSCQAKELHDHLESVLANEPVSVKAGPNLVEVKPQGVSKGLVAKRILSTTQERGDADDDLPDFVLCVGDDRSDEDMFEVIAAAAAARGVSSLQAEAEVFACTVGRKPSKAKYYLDDPADIVRLVQGLASVSDDDQTHAPPPPPPSAATTAADTVPR

SEQ ID NO: 27938 - DNA, 610 bp, Zea mays subsp. mays
  misc_feature (1)..(610): Ceres Seq. ID no. 12594280
cggtcagcgctgactagcaaggagccaagcaggacataatactgaagcaggctgcggctgcggctgcagcaacaagtcaaggaggttgaaggcgaattagagagaagaggaagatgttggcggcgacggatccgatgctgtggcacaaggtggccgccgtctccggggttgccgctttggggctcggcacctacggcgcgcacatgttccgccccaagaaccccgcgtacaaagaggtttggcacacggcgtccctgtaccatctcgtccacaccgcggcgctgctcggggcgcccatcaccaagcgccccaacgttttcggagggctcctcactgctggaattgtgctcttctctggaacgtgctacaccgtggcttatcttgaagacaggaagttttcttcaccggcaccattggggggctttgcgtttattgctgcttgggccagcctcctcttctgattaaattgtgcttttccaagaaaacaaaaaaagtcataaacctctctatatggtgttttatcaggttgtgaaaaatatacttgtaaagtgtatacagtggacagtatgcgcctctgtttaataattcaatctgtgattcctatgtttct

SEQ ID NO: 27939 - protein, 115 aa, Zea mays subsp. mays
  peptide (1)..(115): Ceres Seq. ID no. 12594281
  misc_feature (10)..(106): Pfam Name: DUF423 Pfam Description: Protein of unknown function
  misc_feature (2)..(115): NCBI GI NO: 40538985 NR Description: expressed protein
  misc_feature (1)..(106): NCBI GI NO: 7963702 NR Description: unknown [Agropyron cristatum]
  misc_feature (1)..(106): NCBI GI NO: 7963659 NR Description: unknown [Leymus cinereus]
  misc_feature (1)..(115): NCBI GI NO: 18395895 NR Description: expressed protein; protein id: At2g04900
  misc_feature (6)..(115): NCBI GI NO: 17065460 NR Description: Unknown protein [Arabidopsis thaliana]
  misc_feature (8)..(100): NCBI GI NO: 7963699 NR Description: unknown [Leymus triticoides]
  misc_feature (8)..(100): NCBI GI NO: 7963694 NR Description: unknown [Psathyrostachys juncea]
  misc_feature (8)..(96): NCBI GI NO: 7963697 NR Description: unknown [Haynaldia villosa]
  misc_feature (19)..(115): NCBI GI NO: 25411133 NR Description: hypothetical protein At2g04900
  misc_feature (14)..(93): NCBI GI NO: 7963689 NR Description: unknown [Hordeum vulgare]
MLAATDPMLWHKVAAVSGVAALGLGTYGAHMFRPKNPAYKEVWHTASLYHLVHTAALLGAPITKRPNVFGGLLTAGIVLFSGTCYTVAYLEDRKFSSPAPLGGFAFIAAWASLLF

SEQ ID NO: 27940 - protein, 108 aa, Zea mays subsp. mays
  peptide (1)..(108): Ceres Seq. ID no. 12594282
  misc_feature (3)..(99): Pfam Name: DUF423 Pfam Description: Protein of unknown function
  misc_feature (1)..(108): NCBI GI NO: 40538985 NR Description: expressed protein
  misc_feature (1)..(99): NCBI GI NO: 7963702 NR Description: unknown [Agropyron cristatum]
  misc_feature (1)..(99): NCBI GI NO: 7963659 NR Description: unknown [Leymus cinereus]
  misc_feature (1)..(108): NCBI GI NO: 18395895 NR Description: expressed protein; protein id: At2g04900
  misc_feature (1)..(108): NCBI GI NO: 17065460 NR Description: Unknown protein [Arabidopsis thaliana]
  misc_feature (1)..(93): NCBI GI NO: 7963699 NR Description: unknown [Leymus triticoides]
  misc_feature (1)..(93): NCBI GI NO: 7963694 NR Description: unknown [Psathyrostachys juncea]
  misc_feature (1)..(89): NCBI GI NO: 7963697 NR Description: unknown [Haynaldia villosa]
  misc_feature (12)..(108): NCBI GI NO: 25411133 NR Description: hypothetical protein At2g04900
  misc_feature (7)..(86): NCBI GI NO: 7963689 NR Description: unknown [Hordeum vulgare]
MLWHKVAAVSGVAALGLGTYGAHMFRPKNPAYKEVWHTASLYHLVHTAALLGAPITKRPNVFGGLLTAGIVLFSGTCYTVAYLEDRKFSSPAPLGGFAFIAAWASLLF

SEQ ID NO: 27941 - protein, 85 aa, Zea mays subsp. mays
  peptide (1)..(85): Ceres Seq. ID no. 12594283
  misc_feature (1)..(76): Pfam Name: DUF423 Pfam Description: Protein of unknown function
  misc_feature (1)..(85): NCBI GI NO: 40538985 NR Description: expressed protein
  misc_feature (1)..(76): NCBI GI NO: 7963702 NR Description: unknown [Agropyron cristatum]
  misc_feature (1)..(76): NCBI GI NO: 7963659 NR Description: unknown [Leymus cinereus]
  misc_feature (1)..(85): NCBI GI NO: 18395895 NR Description: expressed protein; protein id: At2g04900
  misc_feature (1)..(85): NCBI GI NO: 17065460 NR Description: Unknown protein [Arabidopsis thaliana]
  misc_feature (1)..(70): NCBI GI NO: 7963699 NR Description: unknown [Leymus triticoides]
  misc_feature (1)..(70): NCBI GI NO: 7963694 NR Description: unknown [Psathyrostachys juncea]
  misc_feature (1)..(66): NCBI GI NO: 7963697 NR Description: unknown [Haynaldia villosa]
  misc_feature (1)..(85): NCBI GI NO: 25411133 NR Description: hypothetical protein At2g04900
  misc_feature (1)..(63): NCBI GI NO: 7963689 NR Description: unknown [Hordeum vulgare]
MFRPKNPAYKEVWHTASLYHLVHTAALLGAPITKRPNVFGGLLTAGIVLFSGTCYTVAYLEDRKFSSPAPLGGFAFIAAWASLLF

SEQ ID NO: 27942 - DNA, 728 bp, Zea mays subsp. mays
  misc_feature (1)..(728): Ceres Seq. ID no. 12351303
aaataattggccgctcagcgcttcgggtgaacgggttcccttgcaagcgtgaggcgaacgtgacggcggacgacttcttcttcggcgggctcgccgcggccgccgacgtgtactcgggcaacccgatggggtcggcggcgacggcggcggacgtgtcggtgctcccgggtctcaacaccctgggcgtgtccatggcgcgcacggacttcgcgccgtcgggcggcgtcagcccgccgcacgtgcacccgcgcgccacggagatcctcttcgtcgtggagggcaccctcgaggtgggcttcgtcacctcggcaaaccgcctcttcagccgcgccgtcggcaagggagaggtgttcgtgttcccccgcggcctcgtgcacttccagcgcatcgtcggggcggcgcccgccgtggcgatctcggctttcaacgcccagctgcctggcacgcagacggtcgccggggcactgttcggcgctgcgccggcggtgccgacggacgtgctggcgcgggcgttacagatcgacggtggagcgatcgagtacatcaagtccaagtttgcgcccaactagggcatgtctcgaattgcaaatgctcaggtgatcgaaaagagggtacgaacgaacataactactaaactaggtgtgtgcccgtgcgttgcaacgggaacgtataataccacggtaatttatgtacaaatgtgtgttatattgttatgaaaaaagttttgt

SEQ ID NO: 27943 - protein, 188 aa, Zea mays subsp. mays
  peptide (1)..(188): Ceres Seq. ID no. 12351304
  misc_feature (29)..(179): Pfam Name: Pfam Description:  Cupin
  misc_feature (7)..(185): NCBI GI NO: 34906614 NR Description: germin(oxalate oxidase)-like protein
  misc_feature (4)..(187): NCBI GI NO: 34906612 NR Description: germin(oxalate oxidase)-like protein
  misc_feature (4)..(187): NCBI GI NO: 31712108 NR Description: germin-like protein
  misc_feature (5)..(185): NCBI GI NO: 34902528 NR Description: probable germin protein 4
  misc_feature (5)..(187): NCBI GI NO: 34904670 NR Description: putative germin protein
  misc_feature (5)..(187): NCBI GI NO: 1934730 NR Description: germin-like protein [Arabidopsis thaliana]
  misc_feature (5)..(187): NCBI GI NO: 15228673 NR Description: germin-like protein (GLP10); protein id:At3g62020
  misc_feature (5)..(187): NCBI GI NO: 15217561 NR Description: germin-like protein; protein id: At1g09560
  misc_feature (8)..(186): NCBI GI NO: 18202917 NR Description: Germin-like protein subfamily 2 member 2 precursor
  misc_feature (8)..(186): NCBI GI NO: 26449711 NR Description: putative germin [Arabidopsis thaliana]
IIGRSALRVNGFPCKREANVTADDFFFGGLAAAADVYSGNPMGSAATAADVSVLPGLNTLGVSMARTDFAPSGGVSPPHVHPRATEILFVVEGTLEVGFVTSANRLFSRAVGKGEVFVFPRGLVHFQRIVGAAPAVAISAFNAQLPGTQTVAGALFGAAPAVPTDVLARALQIDGGAIEYIKSKFAPN

SEQ ID NO: 27944 - protein, 147 aa, Zea mays subsp. mays
  peptide (1)..(147): Ceres Seq. ID no. 12351305
  misc_feature (1)..(138): Pfam Name: Pfam Description:  Cupin
  misc_feature (1)..(144): NCBI GI NO: 34906614 NR Description: germin(oxalate oxidase)-like protein
  misc_feature (1)..(146): NCBI GI NO: 34906612 NR Description: germin(oxalate oxidase)-like protein
  misc_feature (1)..(146): NCBI GI NO: 31712108 NR Description: germin-like protein
  misc_feature (1)..(144): NCBI GI NO: 34902528 NR Description: probable germin protein 4
  misc_feature (1)..(146): NCBI GI NO: 34904670 NR Description: putative germin protein
  misc_feature (1)..(146): NCBI GI NO: 1934730 NR Description: germin-like protein [Arabidopsis thaliana]
  misc_feature (1)..(146): NCBI GI NO: 15228673 NR Description: germin-like protein (GLP10); protein id:At3g62020
  misc_feature (1)..(146): NCBI GI NO: 15217561 NR Description: germin-like protein; protein id: At1g09560
  misc_feature (1)..(145): NCBI GI NO: 18202917 NR Description: Germin-like protein subfamily 2 member 2 precursor
  misc_feature (1)..(145): NCBI GI NO: 26449711 NR Description: putative germin [Arabidopsis thaliana]
MGSAATAADVSVLPGLNTLGVSMARTDFAPSGGVSPPHVHPRATEILFVVEGTLEVGFVTSANRLFSRAVGKGEVFVFPRGLVHFQRIVGAAPAVAISAFNAQLPGTQTVAGALFGAAPAVPTDVLARALQIDGGAIEYIKSKFAPN

SEQ ID NO: 27945 - protein, 125 aa, Zea mays subsp. mays
  peptide (1)..(125): Ceres Seq. ID no. 12351306
  misc_feature (1)..(116): Pfam Name: Pfam Description:  Cupin
  misc_feature (1)..(122): NCBI GI NO: 34906614 NR Description: germin(oxalate oxidase)-like protein
  misc_feature (1)..(124): NCBI GI NO: 34906612 NR Description: germin(oxalate oxidase)-like protein
  misc_feature (1)..(124): NCBI GI NO: 31712108 NR Description: germin-like protein
  misc_feature (1)..(122): NCBI GI NO: 34902528 NR Description: probable germin protein 4
  misc_feature (1)..(124): NCBI GI NO: 34904670 NR Description: putative germin protein
  misc_feature (1)..(124): NCBI GI NO: 1934730 NR Description: germin-like protein [Arabidopsis thaliana]
  misc_feature (1)..(124): NCBI GI NO: 15228673 NR Description: germin-like protein (GLP10); protein id:At3g62020
  misc_feature (1)..(124): NCBI GI NO: 15217561 NR Description: germin-like protein; protein id: At1g09560
  misc_feature (1)..(123): NCBI GI NO: 18202917 NR Description: Germin-like protein subfamily 2 member 2 precursor
  misc_feature (1)..(123): NCBI GI NO: 26449711 NR Description: putative germin [Arabidopsis thaliana]
MARTDFAPSGGVSPPHVHPRATEILFVVEGTLEVGFVTSANRLFSRAVGKGEVFVFPRGLVHFQRIVGAAPAVAISAFNAQLPGTQTVAGALFGAAPAVPTDVLARALQIDGGAIEYIKSKFAPN

SEQ ID NO: 27946 - DNA, 1053 bp, Zea mays subsp. mays
  misc_feature (1)..(1053): Ceres Seq. ID no. 12350538
acagagcgaaacaatccgcagagactcggaagtcggaaagaatccctcctgttcttcgtcaaccctccagaacctgctctctcttcctctacgagactacgaccgtgtaaggacatggccgtcgagcgcttgaagaccgggttcgagcagttcaaggccgacgtctacgacaagaagccggagctgttcgagccactcaaggcgcaccagtcgcccaagtacatggtgttcgcctgctccgactcccgcgtgtgcccgtcggtgaccctgggcctgcaccccggcgaggcctttgccgtccgcaacatcgccagcatggtgccgccctacgacaagaccaagtacgccggcgtcggctccgccatcgagtacgccgtctgcgccctcaaggtggaggtcatcgtggtcataggccacagccgctgcggcgggatcaaggcgctcctctccctcgaggacggcgcgcccgacaagttccacttcgtggaggaatgggtcagggtcggcgccccggcgaagtccaaggtgctggccgaccacgcctcggtgcctttcgaagaccaatgctccatcctggagaaggaggccgtcaacgtgtcccttgagaacctcaagtcctacccgttcgtcaaggaagggctggagaaagggaccctcaagctggtcggcggccattacgacttcgtcaatggaaagttcgagacatgggaaccctaagtgaccatacgtacaaatacgccccaccggacttatttgccgcgtggagtgcttaattatttgccgatatatatatacacatatacaggaaatgaccggtgagaactatactgttgtaataataatagcgaggaaaaaaatatttgcatccgggatataaaaaacacttctttacaaatagaagaaaaataaattactaagagattaatttataaatttgatatgtttttgtgggcctgcctctaggtagtagatgtgaggggctttaaaagagtgtttgtatcccgaatgcaaagaattttttccagaaaggaatacatgtgttctttgacttcg

SEQ ID NO: 27947 - protein, 238 aa, Zea mays subsp. mays
  peptide (1)..(238): Ceres Seq. ID no. 12350539
  misc_feature (16)..(238): NCBI GI NO: 7489810 NR Description: probable carbonate dehydratase (EC 4
  misc_feature (22)..(238): NCBI GI NO: 7489809 NR Description: probable carbonate dehydratase (EC 4
  misc_feature (38)..(237): NCBI GI NO: 729003 NR Description: CARBONIC ANHYDRASE, CHLOROPLAST PRECURSOR
  misc_feature (38)..(238): NCBI GI NO: 7436816 NR Description: probable carbonate dehydratase (EC 4
  misc_feature (38)..(238): NCBI GI NO: 34911604 NR Description: carbonic anhydrase
  misc_feature (35)..(237): NCBI GI NO: 7489809 NR Description: probable carbonate dehydratase (EC 4
  misc_feature (35)..(237): NCBI GI NO: 7489810 NR Description: probable carbonate dehydratase (EC 4
  misc_feature (35)..(238): NCBI GI NO: 7489810 NR Description: probable carbonate dehydratase (EC 4
  misc_feature (41)..(237): NCBI GI NO: 882246 NR Description: carbonic anhydrase 2
  misc_feature (41)..(237): NCBI GI NO: 882248 NR Description: carbonic anhydrase 1
TERNNPQRLGSRKESLLFFVNPPEPALSSSTRLRPCKDMAVERLKTGFEQFKADVYDKKPELFEPLKAHQSPKYMVFACSDSRVCPSVTLGLHPGEAFAVRNIASMVPPYDKTKYAGVGSAIEYAVCALKVEVIVVIGHSRCGGIKALLSLEDGAPDKFHFVEEWVRVGAPAKSKVLADHASVPFEDQCSILEKEAVNVSLENLKSYPFVKEGLEKGTLKLVGGHYDFVNGKFETWEP

SEQ ID NO: 27948 - protein, 200 aa, Zea mays subsp. mays
  peptide (1)..(200): Ceres Seq. ID no. 12350540
  misc_feature (1)..(200): NCBI GI NO: 7489810 NR Description: probable carbonate dehydratase (EC 4
  misc_feature (1)..(200): NCBI GI NO: 7489809 NR Description: probable carbonate dehydratase (EC 4
  misc_feature (1)..(199): NCBI GI NO: 729003 NR Description: CARBONIC ANHYDRASE, CHLOROPLAST PRECURSOR
  misc_feature (1)..(200): NCBI GI NO: 7436816 NR Description: probable carbonate dehydratase (EC 4
  misc_feature (1)..(200): NCBI GI NO: 34911604 NR Description: carbonic anhydrase
  misc_feature (1)..(199): NCBI GI NO: 7489809 NR Description: probable carbonate dehydratase (EC 4
  misc_feature (1)..(199): NCBI GI NO: 7489810 NR Description: probable carbonate dehydratase (EC 4
  misc_feature (1)..(200): NCBI GI NO: 7489810 NR Description: probable carbonate dehydratase (EC 4
  misc_feature (3)..(199): NCBI GI NO: 882246 NR Description: carbonic anhydrase 2
  misc_feature (3)..(199): NCBI GI NO: 882248 NR Description: carbonic anhydrase 1
MAVERLKTGFEQFKADVYDKKPELFEPLKAHQSPKYMVFACSDSRVCPSVTLGLHPGEAFAVRNIASMVPPYDKTKYAGVGSAIEYAVCALKVEVIVVIGHSRCGGIKALLSLEDGAPDKFHFVEEWVRVGAPAKSKVLADHASVPFEDQCSILEKEAVNVSLENLKSYPFVKEGLEKGTLKLVGGHYDFVNGKFETWEP

SEQ ID NO: 27949 - protein, 164 aa, Zea mays subsp. mays
  peptide (1)..(164): Ceres Seq. ID no. 12350541
  misc_feature (1)..(164): NCBI GI NO: 7489810 NR Description: probable carbonate dehydratase (EC 4
  misc_feature (1)..(164): NCBI GI NO: 7489809 NR Description: probable carbonate dehydratase (EC 4
  misc_feature (1)..(163): NCBI GI NO: 729003 NR Description: CARBONIC ANHYDRASE, CHLOROPLAST PRECURSOR
  misc_feature (1)..(164): NCBI GI NO: 7436816 NR Description: probable carbonate dehydratase (EC 4
  misc_feature (1)..(164): NCBI GI NO: 34911604 NR Description: carbonic anhydrase
  misc_feature (1)..(163): NCBI GI NO: 7489809 NR Description: probable carbonate dehydratase (EC 4
  misc_feature (1)..(163): NCBI GI NO: 7489810 NR Description: probable carbonate dehydratase (EC 4
  misc_feature (1)..(164): NCBI GI NO: 7489810 NR Description: probable carbonate dehydratase (EC 4
  misc_feature (1)..(163): NCBI GI NO: 882246 NR Description: carbonic anhydrase 2
  misc_feature (1)..(163): NCBI GI NO: 882248 NR Description: carbonic anhydrase 1
MVFACSDSRVCPSVTLGLHPGEAFAVRNIASMVPPYDKTKYAGVGSAIEYAVCALKVEVIVVIGHSRCGGIKALLSLEDGAPDKFHFVEEWVRVGAPAKSKVLADHASVPFEDQCSILEKEAVNVSLENLKSYPFVKEGLEKGTLKLVGGHYDFVNGKFETWEP

SEQ ID NO: 27950 - DNA, 936 bp, Zea mays subsp. mays
  misc_feature (1)..(936): Ceres Seq. ID no. 12361812
atccaatccaaagaagcctcctgctgtccacctcattccccatccgtccccgtgggaagcggggcaaagcgacgtacgctaccctttgcgtgcgcgtagcatttaaccaagcaactcccaatccccactcctcccccaccatttcttccctctcgccttcccctccgccggcaatcccacgtccaatcagccgccgctccagccttccatccatccatcccgtagctgctctctattacgccagcgatcgagagaccaagaggagcaggagcgatggcgaggagctcgttcaagctggagcaccccttcgaaaggaggcaagctgaggctaaccgcatcagggagaagtaccccgatagaattcctgtcattgttgagaaggccgagaggagtgacatcccagacatcgacaagaaaaagtaccttgtccccgccgacctcacagtgggacagtttgtgtacgtggtgcggaagcgcatcaagctcagcgccgagaaggcgatcttcatcttcgtgaagaacaccctcccaccaacagctgccctgatgtctgccatctacgaggagaacaaggacgaggacgggttcctctacatgacctacagcggcgagaacacctttgggctgctatgagtggcgccgcgccgccgtggatcgacgtcggacaatgcccctcctcctgtaaatacttaaaaaaaaaataggcgtctcaagaatccgtgtacataataatctggcatgtcttgcatcaaaagcaactcgttgcgtccactgtctgttgaaactattgaagcgtactaaacatttaagcaactcgttgcgtccactgtcagctctgggttgcttcagaagttctgtcacctgctgcgtcctccgtgagcttgtcgatgtggcaaagtaacacagggtgcctgtggtcattccacccgtttaggt

SEQ ID NO: 27951 - protein, 119 aa, Zea mays subsp. mays
  peptide (1)..(119): Ceres Seq. ID no. 12361813
  misc_feature (14)..(117): Pfam Name: Pfam Description:  Microtubule associated protein 1A/1B
  misc_feature (1)..(118): NCBI GI NO: 40253647 NR Description: putative microtubial binding protein
  misc_feature (1)..(119): NCBI GI NO: 38344173 NR Description: OSJNBa0053K19.12
  misc_feature (1)..(117): NCBI GI NO: 34595981 NR Description: microtubule-associated protein 1 light chain 3
  misc_feature (1)..(119): NCBI GI NO: 15220686 NR Description: symbiosis-related protein, putative
  misc_feature (1)..(117): NCBI GI NO: 33146967 NR Description: putative microtubule associated protein
  misc_feature (1)..(118): NCBI GI NO: 21592920 NR Description: putative microtubule-associated protein
  misc_feature (1)..(119): NCBI GI NO: 18415813 NR Description: symbiosis-related like protein
  misc_feature (1)..(119): NCBI GI NO: 21553487 NR Description: symbiosis-related like protein
  misc_feature (1)..(118): NCBI GI NO: 15224577 NR Description: putative microtubule-associated protein
  misc_feature (1)..(118): NCBI GI NO: 7446944 NR Description: hypothetical protein F8K4
MARSSFKLEHPFERRQAEANRIREKYPDRIPVIVEKAERSDIPDIDKKKYLVPADLTVGQFVYVVRKRIKLSAEKAIFIFVKNTLPPTAALMSAIYEENKDEDGFLYMTYSGENTFGLL

SEQ ID NO: 27952 - protein, 107 aa, Zea mays subsp. mays
  peptide (1)..(107): Ceres Seq. ID no. 12361814
PIQRSLLLSTSFPIRPRGKRGKATYATLCVRVAFNQATPNPHSSPTISSLSPSPPPAIPRPISRRSSLPSIHPVAALYYASDRETKRSRSDGEELVQAGAPLRKEAS

SEQ ID NO: 27953 - DNA, 725 bp, Zea mays subsp. mays
  misc_feature (1)..(725): Ceres Seq. ID no. 13580161
  misc_feature (158)..(158): n is a, c, t, g, unknown, or other
  misc_feature (264)..(264): n is a, c, t, g, unknown, or other
  misc_feature (259)..(259): n is a, c, t, g, unknown, or other
  misc_feature (114)..(114): n is a, c, t, g, unknown, or other
  misc_feature (92)..(92): n is a, c, t, g, unknown, or other
acaagctcgacggaactgtgactagaactagtagatccaatccaacactcgggacgaaattaaaggagacgacgcatcatccggccggcagnatccgcacggtcaccaccatgncggcgcaggagggcggcatgaggctggtgtcgcacccgatcgcngcgcacgacgggcggctgccgcggcagtacacggcggaggggcagggcgccaagaaggacatgtcgccgccgctggagtggtacggcgtgcccgagggcgngcggntgctagcgctgctggtgcaggacatcgacgccgaccccgtcgtgccgtggacgcactgggtggtggccaacatcccgcccgccaccaggggcctccccgaggggttctccggcgccgcgggaccggggccggggcgcgagctcggcggcctgcaggagggggtcaacgactggaagcagcccggctggcgcgggcccgtgccgccctcccacggccaccgcatccagttcaagctctacgcgctcgacgacgaggtgcacctcggcaacaaggtgaccagggataagctcatggaggcgatcgacgggcacgtgctggaagaagccgagctgatcgccgtgttccagggagtcgtcgccaacaactaacacactcggagatatctttgttggcgtgctttgtatttgcttgtgtggctaccatgtaattctgatcgaataaaagggaacttcacatgtgcc

SEQ ID NO: 27954 - protein, 209 aa, Zea mays subsp. mays
  peptide (1)..(209): Ceres Seq. ID no. 13580162
  misc_feature (39)..(202): NCBI GI NO: 10799810 NR Description: cold-regulated protein
  misc_feature (39)..(202): NCBI GI NO: 26017213 NR Description: cold regulated protein [Triticum aestivum]
  misc_feature (37)..(198): NCBI GI NO: 15240946 NR Description: expressed protein [Arabidopsis thaliana]
  misc_feature (44)..(203): NCBI GI NO: 15678301 NR Description: conserved protein
  misc_feature (47)..(203): NCBI GI NO: 17548245 NR Description: CONSERVED HYPOTHETICAL PROTEIN
  misc_feature (71)..(202): NCBI GI NO: 30248206 NR Description: conserved hypothetical protein
  misc_feature (47)..(203): NCBI GI NO: 23054005 NR Description: hypothetical protein [Geobacter metallireducens]
  misc_feature (56)..(203): NCBI GI NO: 21673435 NR Description: conserved hypothetical protein
  misc_feature (42)..(203): NCBI GI NO: 14521358 NR Description: hypothetical protein [Pyrococcus abyssi]
  misc_feature (56)..(202): NCBI GI NO: 11499288 NR Description: conserved hypothetical protein
  misc_feature (30)..(30): Xaa is any aa, unknown or other
  misc_feature (38)..(38): Xaa is any aa, unknown or other
  misc_feature (52)..(52): Xaa is any aa, unknown or other
  misc_feature (86)..(86): Xaa is any aa, unknown or other
  misc_feature (88)..(88): Xaa is any aa, unknown or other
KLDGTVTRTSRSNPTLGTKLKETTHHPAGXIRTVTTMXAQEGGMRLVSHPIXAHDGRLPRQYTAEGQGAKKDMSPPLEWYGVPEGXRXLALLVQDIDADPVVPWTHWVVANIPPATRGLPEGFSGAAGPGPGRELGGLQEGVNDWKQPGWRGPVPPSHGHRIQFKLYALDDEVHLGNKVTRDKLMEAIDGHVLEEAELIAVFQGVVANN

SEQ ID NO: 27955 - protein, 173 aa, Zea mays subsp. mays
  peptide (1)..(173): Ceres Seq. ID no. 13580163
  misc_feature (3)..(166): NCBI GI NO: 10799810 NR Description: cold-regulated protein
  misc_feature (3)..(166): NCBI GI NO: 26017213 NR Description: cold regulated protein [Triticum aestivum]
  misc_feature (1)..(162): NCBI GI NO: 15240946 NR Description: expressed protein [Arabidopsis thaliana]
  misc_feature (8)..(167): NCBI GI NO: 15678301 NR Description: conserved protein
  misc_feature (11)..(167): NCBI GI NO: 17548245 NR Description: CONSERVED HYPOTHETICAL PROTEIN
  misc_feature (35)..(166): NCBI GI NO: 30248206 NR Description: conserved hypothetical protein
  misc_feature (11)..(167): NCBI GI NO: 23054005 NR Description: hypothetical protein [Geobacter metallireducens]
  misc_feature (20)..(167): NCBI GI NO: 21673435 NR Description: conserved hypothetical protein
  misc_feature (6)..(167): NCBI GI NO: 14521358 NR Description: hypothetical protein [Pyrococcus abyssi]
  misc_feature (20)..(166): NCBI GI NO: 11499288 NR Description: conserved hypothetical protein
  misc_feature (2)..(2): Xaa is any aa, unknown or other
  misc_feature (16)..(16): Xaa is any aa, unknown or other
  misc_feature (50)..(50): Xaa is any aa, unknown or other
  misc_feature (52)..(52): Xaa is any aa, unknown or other
MXAQEGGMRLVSHPIXAHDGRLPRQYTAEGQGAKKDMSPPLEWYGVPEGXRXLALLVQDIDADPVVPWTHWVVANIPPATRGLPEGFSGAAGPGPGRELGGLQEGVNDWKQPGWRGPVPPSHGHRIQFKLYALDDEVHLGNKVTRDKLMEAIDGHVLEEAELIAVFQGVVANN

SEQ ID NO: 27956 - protein, 166 aa, Zea mays subsp. mays
  peptide (1)..(166): Ceres Seq. ID no. 13580164
  misc_feature (1)..(159): NCBI GI NO: 10799810 NR Description: cold-regulated protein
  misc_feature (1)..(159): NCBI GI NO: 26017213 NR Description: cold regulated protein [Triticum aestivum]
  misc_feature (1)..(155): NCBI GI NO: 15240946 NR Description: expressed protein [Arabidopsis thaliana]
  misc_feature (1)..(160): NCBI GI NO: 15678301 NR Description: conserved protein
  misc_feature (4)..(160): NCBI GI NO: 17548245 NR Description: CONSERVED HYPOTHETICAL PROTEIN
  misc_feature (28)..(159): NCBI GI NO: 30248206 NR Description: conserved hypothetical protein
  misc_feature (4)..(160): NCBI GI NO: 23054005 NR Description: hypothetical protein [Geobacter metallireducens]
  misc_feature (13)..(160): NCBI GI NO: 21673435 NR Description: conserved hypothetical protein
  misc_feature (1)..(160): NCBI GI NO: 14521358 NR Description: hypothetical protein [Pyrococcus abyssi]
  misc_feature (13)..(159): NCBI GI NO: 11499288 NR Description: conserved hypothetical protein
  misc_feature (9)..(9): Xaa is any aa, unknown or other
  misc_feature (43)..(43): Xaa is any aa, unknown or other
  misc_feature (45)..(45): Xaa is any aa, unknown or other
MRLVSHPIXAHDGRLPRQYTAEGQGAKKDMSPPLEWYGVPEGXRXLALLVQDIDADPVVPWTHWVVANIPPATRGLPEGFSGAAGPGPGRELGGLQEGVNDWKQPGWRGPVPPSHGHRIQFKLYALDDEVHLGNKVTRDKLMEAIDGHVLEEAELIAVFQGVVANN

SEQ ID NO: 27957 - DNA, 653 bp, Zea mays subsp. mays
  misc_feature (1)..(653): Ceres Seq. ID no. 12401344
ttatgctgatacagttggagacttgggatatgcatcagagcttggaaactatgcagagtatagtggtgctcctaatgaggaggaggttctgaattattctagagttgttcttgattgtgcaactgctgatcctgatggccgcaagagagcccttctcattggaggtggcatagctaacttcactgatgttgctaccacattcaatggcatcatccgagccttaagggagaaggaatccaagttgaaggcttcaagaatgcacatttatgtccgccgaggtggtccaaattaccaatctggactggctaaaatgcgtaagcttggtgcagaactcggcgttccaattgaggtgtatgggccagaagcgactatgactggaatctgcaaacaagcaattgaatgcatcatggctgcagcgtaatcagagcgtagctctgggtagtttgggatctgcaaacacgcaattgaatgtgtcatggactcagcataaatgagagatggatagtagttgcattatatagttcacacatggtgtttctgttttttgtttcagatatgttgtagcgtgttgtttgaacgaaaccttcacagatcattactgcaaagaaattgctgtgtgttaaaataaattcaaagtctagttttgtgccttt

SEQ ID NO: 27958 - protein, 139 aa, Zea mays subsp. mays
  peptide (1)..(139): Ceres Seq. ID no. 12401345
  misc_feature (1)..(136): NCBI GI NO: 15217510 NR Description: unknown protein; protein id: At1g09430.1
  misc_feature (1)..(139): NCBI GI NO: 15919089 NR Description: ATP citrate lyase b-subunit [Lupinus albus]
  misc_feature (1)..(139): NCBI GI NO: 15219818 NR Description: ATP citrate-lyase, putative; protein id:At1g60810
  misc_feature (1)..(139): NCBI GI NO: 19698853 NR Description: similar to ATP-citrate-lyase
  misc_feature (1)..(139): NCBI GI NO: 15220186 NR Description: ATP citrate-lyase, putative; protein id:At1g10670
  misc_feature (1)..(139): NCBI GI NO: 21593129 NR Description: ATP citrate-lyase, putative [Arabidopsis thaliana]
  misc_feature (1)..(132): NCBI GI NO: 9229902 NR Description: ATP citrate-lyase [Ciona intestinalis]
  misc_feature (1)..(132): NCBI GI NO: 24653988 NR Description: ATP citrate lyase CG8322-PA
  misc_feature (1)..(132): NCBI GI NO: 28372804 NR Description: LD21334p [Drosophila melanogaster]
  misc_feature (1)..(133): NCBI GI NO: 40744985 NR Description: conserved hypothetical protein
YADTVGDLGYASELGNYAEYSGAPNEEEVLNYSRVVLDCATADPDGRKRALLIGGGIANFTDVATTFNGIIRALREKESKLKASRMHIYVRRGGPNYQSGLAKMRKLGAELGVPIEVYGPEATMTGICKQAIECIMAAA

SEQ ID NO: 27959 - DNA, 818 bp, Zea mays subsp. mays
  misc_feature (1)..(818): Ceres Seq. ID no. 12359956
ctgaccacaaatccgatccgtagccgcggtgcctcgctttcgagtacgagcggctactcccagcggctgcggcggcggcggcgatgagcgcggtgaacatcaccaacgtggcggtgctggataaccccaccgccttcctcaatcccttccagtttgagatctcctacgagtgcctcgtgcccctcgacgacgatctggagtggaagcttatatatgttggatcagctgaagatgaaaactacgatcaacagcttgagagcgtgcttgttggccctgtcaatgttgggacctaccgttttgtccttcaggctgacccaccggatccctcaaagatccgtgaggaagacataattggtgtgactgtgctgctattgacatgctcttacatgggccaggagttcatgagagtaggctactacgtgaacaatgattatgacgatgaacaattgagagaagagcctccagcaaaggtgctaattgaccgggtgcaaagaaatatcttggccgacaagccccgagtcaccaagttccctatcaacttccatcctgaacccagtacaggcccggggcagcagcagcagcagcaggaaccccagacgacctcgccagaaaaccacacaggcaatggcgaggccaatggtagcaagcctgaggctgaccaatgaacacagttggcttcagatattttgatgcgtgccccttacaggttgtgctgtaatattacaaacgggattagtggttgtgcattgccctgggatcctgaactctgttctgtaacttgagatgcaaatgctgggtacctggatgttttcttaggc

SEQ ID NO: 27960 - protein, 193 aa, Zea mays subsp. mays
  peptide (1)..(193): Ceres Seq. ID no. 12359957
  misc_feature (1)..(155): Pfam Name: Pfam Description:  Anti-silencing protein, ASF1-like
  misc_feature (1)..(184): NCBI GI NO: 15240842 NR Description: anti-silencing factor 1-like protein
  misc_feature (1)..(190): NCBI GI NO: 15219729 NR Description: hypothetical protein; protein id: At1g66740
  misc_feature (12)..(177): NCBI GI NO: 6069498 NR Description: S-locus protein 7 [Brassica rapa]
  misc_feature (25)..(193): NCBI GI NO: 34911252 NR Description: putative anti-silencing factor 1-like protein
  misc_feature (1)..(192): NCBI GI NO: 17737649 NR Description: anti-silencing factor 1 CG9383-PA
  misc_feature (1)..(162): NCBI GI NO: 31215032 NR Description: ENSANGP00000013594 [Anopheles gambiae]
  misc_feature (1)..(174): NCBI GI NO: 6841514 NR Description: HSPC146 [Homo sapiens]
  misc_feature (1)..(174): NCBI GI NO: 7661592 NR Description: anti-silencing function 1A; DKFZP547E2110 protein
  misc_feature (1)..(159): NCBI GI NO: 21313226 NR Description: RIKEN cDNA 1700003K02 [Mus musculus]
  misc_feature (1)..(153): NCBI GI NO: 33416731 NR Description: Unknown (protein for MGC:69151) [Xenopus laevis]
MSAVNITNVAVLDNPTAFLNPFQFEISYECLVPLDDDLEWKLIYVGSAEDENYDQQLESVLVGPVNVGTYRFVLQADPPDPSKIREEDIIGVTVLLLTCSYMGQEFMRVGYYVNNDYDDEQLREEPPAKVLIDRVQRNILADKPRVTKFPINFHPEPSTGPGQQQQQQEPQTTSPENHTGNGEANGSKPEADQ

SEQ ID NO: 27961 - DNA, 1206 bp, Zea mays subsp. mays
  misc_feature (1)..(1206): Ceres Seq. ID no. 12340792
ctcgccggccttctcagaccacaaacattgcgcttgcggcttgccgcccagctatataagtactctcgggaataggcggtcactcatccatcccatctccatctcggagcaaaggcaatccagcaagagtcgctcctttcccttttcgggatacagccagcagaagcaatccggctaacaagtttcttcttcttcttcttctttcctgtcgcagggctcaccgaagtgacgatggcgtttgcggtctccgacgagctgctgggcaccttcgtgccgattgcggtgtactggctctactcggggctctacgtcgtcctggacgggctggggatggacgactacaggctccatcccaagggggaggaggccaggaacatcgtttccaggtggacggtcgtcaggggcgtccttgttcagcaggcgtttcaaatcgctgtctcccttcttctcttcacggttcttggtgatgataatgggactgtgaggaagcagcctctagctttggtaatggcattgcaatttatcattgcaatgtttgtcatggacacatggcagtacttcatgcacagatacatgcatatcaacagattcttgtacaagcacgtccactctaagcaccacactcttgtcgtcccctacgcctttggagctctttacaaccaccccctggaggggctcatcctggacaccgtcggcggcgcgctctcgttcctcatctctggcatgaccccaaggactggcattttcttcttctcgtttgcgaccatcaagaccgtcgatgaccactgtggtctgtggcttcctggaaacatcctccatgtattcttcagcaacaacagcgcttaccatgacatccaccatcagctctacgggaacaagtacaacttctcgcagcccttctttgtcatgtgggacaagatcctcggaacatacatgccttacactctggagacacgcaagggaggtgggtttgaggcacgcccggttaagctcgaccgagcacagcagatcaaggctgattaagcagcgtggtttctcctgtttgtctactacttcccctggtttttttttccttctgactgcatttgtactgtagaggtattttcctgtccatatagtaaaatcctttaggcagatgacatgttgtacccaaaagatgtagcaaatgaaacatcttgctaatgaagatccattggggtttgtttt

SEQ ID NO: 27962 - protein, 263 aa, Zea mays subsp. mays
  peptide (1)..(263): Ceres Seq. ID no. 12340793
  misc_feature (1)..(253): NCBI GI NO: 22330531 NR Description: acid phosphatase, putative; protein id:At1g69640
  misc_feature (1)..(253): NCBI GI NO: 25404823 NR Description: probable sterol desaturase T6C23.16
  misc_feature (1)..(256): NCBI GI NO: 18394095 NR Description: acid phosphatase, putative; protein id:At1g14290
  misc_feature (1)..(256): NCBI GI NO: 25511716 NR Description: F14L17.5 protein - Arabidopsis thaliana
  misc_feature (10)..(253): NCBI GI NO: 34913184 NR Description: similar to acid phosphatase
  misc_feature (91)..(256): NCBI GI NO: 34911990 NR Description: P0694A04.28
  misc_feature (1)..(82): NCBI GI NO: 34911990 NR Description: P0694A04.28
  misc_feature (31)..(198): NCBI GI NO: 5360721 NR Description: acid phosphatase [Lupinus albus]
  misc_feature (91)..(241): NCBI GI NO: 19113281 NR Description: hypothetical integral membrane protein
  misc_feature (92)..(254): NCBI GI NO: 40746027 NR Description: hypothetical protein AN0640.2
MAFAVSDELLGTFVPIAVYWLYSGLYVVLDGLGMDDYRLHPKGEEARNIVSRWTVVRGVLVQQAFQIAVSLLLFTVLGDDNGTVRKQPLALVMALQFIIAMFVMDTWQYFMHRYMHINRFLYKHVHSKHHTLVVPYAFGALYNHPLEGLILDTVGGALSFLISGMTPRTGIFFFSFATIKTVDDHCGLWLPGNILHVFFSNNSAYHDIHHQLYGNKYNFSQPFFVMWDKILGTYMPYTLETRKGGGFEARPVKLDRAQQIKAD

SEQ ID NO: 27963 - protein, 230 aa, Zea mays subsp. mays
  peptide (1)..(230): Ceres Seq. ID no. 12340794
  misc_feature (1)..(220): NCBI GI NO: 22330531 NR Description: acid phosphatase, putative; protein id:At1g69640
  misc_feature (1)..(220): NCBI GI NO: 25404823 NR Description: probable sterol desaturase T6C23.16
  misc_feature (1)..(223): NCBI GI NO: 18394095 NR Description: acid phosphatase, putative; protein id:At1g14290
  misc_feature (1)..(223): NCBI GI NO: 25511716 NR Description: F14L17.5 protein - Arabidopsis thaliana
  misc_feature (1)..(220): NCBI GI NO: 34913184 NR Description: similar to acid phosphatase
  misc_feature (58)..(223): NCBI GI NO: 34911990 NR Description: P0694A04.28
  misc_feature (1)..(49): NCBI GI NO: 34911990 NR Description: P0694A04.28
  misc_feature (1)..(165): NCBI GI NO: 5360721 NR Description: acid phosphatase [Lupinus albus]
  misc_feature (58)..(208): NCBI GI NO: 19113281 NR Description: hypothetical integral membrane protein
  misc_feature (59)..(221): NCBI GI NO: 40746027 NR Description: hypothetical protein AN0640.2
MDDYRLHPKGEEARNIVSRWTVVRGVLVQQAFQIAVSLLLFTVLGDDNGTVRKQPLALVMALQFIIAMFVMDTWQYFMHRYMHINRFLYKHVHSKHHTLVVPYAFGALYNHPLEGLILDTVGGALSFLISGMTPRTGIFFFSFATIKTVDDHCGLWLPGNILHVFFSNNSAYHDIHHQLYGNKYNFSQPFFVMWDKILGTYMPYTLETRKGGGFEARPVKLDRAQQIKAD

SEQ ID NO: 27964 - protein, 171 aa, Zea mays subsp. mays
  peptide (1)..(171): Ceres Seq. ID no. 12340795
  misc_feature (1)..(161): NCBI GI NO: 22330531 NR Description: acid phosphatase, putative; protein id:At1g69640
  misc_feature (1)..(161): NCBI GI NO: 25404823 NR Description: probable sterol desaturase T6C23.16
  misc_feature (1)..(164): NCBI GI NO: 18394095 NR Description: acid phosphatase, putative; protein id:At1g14290
  misc_feature (1)..(164): NCBI GI NO: 25511716 NR Description: F14L17.5 protein - Arabidopsis thaliana
  misc_feature (1)..(161): NCBI GI NO: 34913184 NR Description: similar to acid phosphatase
  misc_feature (1)..(164): NCBI GI NO: 34911990 NR Description: P0694A04.28
  misc_feature (1)..(106): NCBI GI NO: 5360721 NR Description: acid phosphatase [Lupinus albus]
  misc_feature (1)..(149): NCBI GI NO: 19113281 NR Description: hypothetical integral membrane protein
  misc_feature (1)..(162): NCBI GI NO: 40746027 NR Description: hypothetical protein AN0640.2
  misc_feature (1)..(141): NCBI GI NO: 32411679 NR Description: hypothetical protein [Neurospora crassa]
MALQFIIAMFVMDTWQYFMHRYMHINRFLYKHVHSKHHTLVVPYAFGALYNHPLEGLILDTVGGALSFLISGMTPRTGIFFFSFATIKTVDDHCGLWLPGNILHVFFSNNSAYHDIHHQLYGNKYNFSQPFFVMWDKILGTYMPYTLETRKGGGFEARPVKLDRAQQIKAD

SEQ ID NO: 27965 - DNA, 1358 bp, Zea mays subsp. mays
  misc_feature (1)..(1358): Ceres Seq. ID no. 12352397
agtattctctgtcttttgtcttgagattaagaagtacagaaagcagtccttcgttgttcgtcaggaaaaagaacaatgcagcacgtaatcctttgcctgcaaatctctctgctactctccagcttctcctatttgatgcaagcccagtacacctcgatctttagcttcggcgactcctacaccgacaccggcaacaaggtcatcctctacggcccggcggcggcggatctgtggatcaacaagccgccgttcgggatgaccttcttcggccatccggccgggcgcctctccgacggcagactggtcatagatttcatcgcccaggcactagggctacctctccttccgccctcgctggcgaaggaccagagcttcaagcaaggcgcgaacttcgccgtggctggcgccacggcgctgaagacgagcactacaagcccagcgctctacccgcagctggccgtcgccggcgatgccgtgcctcctccgaacaacatctccctcgctgacgagctgggctggttcgacgccatgaaacccgcgctctgcggctcaccccaagcatgcaaggactacttcgcgaaggcgctgttcgtcgtgggcgagctgggctggaacgactacggggtcatggtggtcggcggcaaaagcgtcgccgaagcgcaatcctacgtgcctcagatcgtcgcaacaatcgtcgctgccacggagaagctgatcaacgacggcgccacgacggtcgtggtgtcggggatctcgccgatgggctgcgcgccggggaatctggtgctgctggcgagccaggacccggccgactatgagcccgacacggggtgcctcaagggaatgaacgagctatccagggaccacaacgcgcagctgagccaggcgctgacgacgctgggcggcaggtaccccggcgcgcgcgtcacctacgccgacctgtacggccccgtcatcgccttcgcggccgcgccggcgcgcttcggcttcgactccgcgctgagggactgctgcggcagtggcggcggcaagtacaacttcaacctgagcgccgcgtgcgggatgcccggcgtggccgcctgcccgaacccgtcggtgtacgtcaactgggacggcgtccacctcaccgaggcggcgtaccaccgcgtcgccgatggctggctcaggggaccctacgccaacccgcccattctcgccacggcgtagcgaactaggcgacgtggatgcgtgtattaattcaatttcttgcggccgggaatcacgtaaataatttgctgagttttctgtctgatcgtctgattcatgaaccacgtacaatttctctatataatacgtataattatattctgtgttcgtgc

SEQ ID NO: 27966 - protein, 376 aa, Zea mays subsp. mays
  peptide (1)..(376): Ceres Seq. ID no. 12352398
  misc_feature (28)..(362): Pfam Name: Pfam Description:  GDSL-like Lipase/Acylhydrolase
  misc_feature (6)..(376): NCBI GI NO: 34903970 NR Description: OSJNBa0038J17.30
  misc_feature (27)..(374): NCBI GI NO: 34903994 NR Description: unnamed protein product
  misc_feature (27)..(376): NCBI GI NO: 34903986 NR Description: unnamed protein product
  misc_feature (3)..(371): NCBI GI NO: 15225872 NR Description: putative lipase; protein id: At2g27360.1
  misc_feature (1)..(370): NCBI GI NO: 15218756 NR Description: lipase; protein id: At1g28670
  misc_feature (1)..(370): NCBI GI NO: 10764854 NR Description: F1K23.13 [Arabidopsis thaliana]
  misc_feature (1)..(370): NCBI GI NO: 10764854 NR Description: F1K23.13 [Arabidopsis thaliana]
  misc_feature (24)..(363): NCBI GI NO: 10764854 NR Description: F1K23.13 [Arabidopsis thaliana]
  misc_feature (217)..(370): NCBI GI NO: 10764854 NR Description: F1K23.13 [Arabidopsis thaliana]
  misc_feature (58)..(189): NCBI GI NO: 10764854 NR Description: F1K23.13 [Arabidopsis thaliana]
MQHVILCLQISLLLSSFSYLMQAQYTSIFSFGDSYTDTGNKVILYGPAAADLWINKPPFGMTFFGHPAGRLSDGRLVIDFIAQALGLPLLPPSLAKDQSFKQGANFAVAGATALKTSTTSPALYPQLAVAGDAVPPPNNISLADELGWFDAMKPALCGSPQACKDYFAKALFVVGELGWNDYGVMVVGGKSVAEAQSYVPQIVATIVAATEKLINDGATTVVVSGISPMGCAPGNLVLLASQDPADYEPDTGCLKGMNELSRDHNAQLSQALTTLGGRYPGARVTYADLYGPVIAFAAAPARFGFDSALRDCCGSGGGKYNFNLSAACGMPGVAACPNPSVYVNWDGVHLTEAAYHRVADGWLRGPYANPPILATA

SEQ ID NO: 27967 - protein, 356 aa, Zea mays subsp. mays
  peptide (1)..(356): Ceres Seq. ID no. 12352399
  misc_feature (8)..(342): Pfam Name: Pfam Description:  GDSL-like Lipase/Acylhydrolase
  misc_feature (1)..(356): NCBI GI NO: 34903970 NR Description: OSJNBa0038J17.30
  misc_feature (7)..(354): NCBI GI NO: 34903994 NR Description: unnamed protein product
  misc_feature (7)..(356): NCBI GI NO: 34903986 NR Description: unnamed protein product
  misc_feature (1)..(351): NCBI GI NO: 15225872 NR Description: putative lipase; protein id: At2g27360.1
  misc_feature (1)..(350): NCBI GI NO: 15218756 NR Description: lipase; protein id: At1g28670
  misc_feature (1)..(350): NCBI GI NO: 10764854 NR Description: F1K23.13 [Arabidopsis thaliana]
  misc_feature (1)..(350): NCBI GI NO: 10764854 NR Description: F1K23.13 [Arabidopsis thaliana]
  misc_feature (4)..(343): NCBI GI NO: 10764854 NR Description: F1K23.13 [Arabidopsis thaliana]
  misc_feature (197)..(350): NCBI GI NO: 10764854 NR Description: F1K23.13 [Arabidopsis thaliana]
  misc_feature (38)..(169): NCBI GI NO: 10764854 NR Description: F1K23.13 [Arabidopsis thaliana]
MQAQYTSIFSFGDSYTDTGNKVILYGPAAADLWINKPPFGMTFFGHPAGRLSDGRLVIDFIAQALGLPLLPPSLAKDQSFKQGANFAVAGATALKTSTTSPALYPQLAVAGDAVPPPNNISLADELGWFDAMKPALCGSPQACKDYFAKALFVVGELGWNDYGVMVVGGKSVAEAQSYVPQIVATIVAATEKLINDGATTVVVSGISPMGCAPGNLVLLASQDPADYEPDTGCLKGMNELSRDHNAQLSQALTTLGGRYPGARVTYADLYGPVIAFAAAPARFGFDSALRDCCGSGGGKYNFNLSAACGMPGVAACPNPSVYVNWDGVHLTEAAYHRVADGWLRGPYANPPILATA

SEQ ID NO: 27968 - protein, 316 aa, Zea mays subsp. mays
  peptide (1)..(316): Ceres Seq. ID no. 12352400
  misc_feature (1)..(302): Pfam Name: Pfam Description:  GDSL-like Lipase/Acylhydrolase
  misc_feature (1)..(316): NCBI GI NO: 34903970 NR Description: OSJNBa0038J17.30
  misc_feature (1)..(314): NCBI GI NO: 34903994 NR Description: unnamed protein product
  misc_feature (1)..(316): NCBI GI NO: 34903986 NR Description: unnamed protein product
  misc_feature (1)..(311): NCBI GI NO: 15225872 NR Description: putative lipase; protein id: At2g27360.1
  misc_feature (1)..(310): NCBI GI NO: 15218756 NR Description: lipase; protein id: At1g28670
  misc_feature (1)..(310): NCBI GI NO: 10764854 NR Description: F1K23.13 [Arabidopsis thaliana]
  misc_feature (1)..(310): NCBI GI NO: 10764854 NR Description: F1K23.13 [Arabidopsis thaliana]
  misc_feature (1)..(303): NCBI GI NO: 10764854 NR Description: F1K23.13 [Arabidopsis thaliana]
  misc_feature (157)..(310): NCBI GI NO: 10764854 NR Description: F1K23.13 [Arabidopsis thaliana]
  misc_feature (1)..(129): NCBI GI NO: 10764854 NR Description: F1K23.13 [Arabidopsis thaliana]
MTFFGHPAGRLSDGRLVIDFIAQALGLPLLPPSLAKDQSFKQGANFAVAGATALKTSTTSPALYPQLAVAGDAVPPPNNISLADELGWFDAMKPALCGSPQACKDYFAKALFVVGELGWNDYGVMVVGGKSVAEAQSYVPQIVATIVAATEKLINDGATTVVVSGISPMGCAPGNLVLLASQDPADYEPDTGCLKGMNELSRDHNAQLSQALTTLGGRYPGARVTYADLYGPVIAFAAAPARFGFDSALRDCCGSGGGKYNFNLSAACGMPGVAACPNPSVYVNWDGVHLTEAAYHRVADGWLRGPYANPPILATA

SEQ ID NO: 27969 - DNA, 984 bp, Zea mays subsp. mays
  misc_feature (1)..(984): Ceres Seq. ID no. 12362327
acggatgctataataactgcccctcaccaaacctcccagccagctctcactcactcacaagtcacacagccacacttgaaccgctgcccgcagcggagggagcttgcacgggccaacgcacacataacacaagctcgtcgtcgatggcgcggtgggctgcggtgctagcgctggccgcggccacggccatcgccgtggcgtccgtggcgggcggcgacatgaacgcggacaagacggagtgcgcggaccagctggtgggcctggcgccgtgcctgcagtacgtgcaggggcaggcccgcgcgccgccgcccgactgctgcggcggcctgcgccaggtgctggggaagagccccaagtgcctgtgcgtgctcgtcaaggacaaggacgaccccaacctgggcatcaagatcaacgccaccctcgcgctcgcgctccccaacgcctgcggcgccacccgcgccaacgtctcccactgcgctcagctcctgcatattcccccgggctccaaagacgccgccgtcttcagtcccggcagcgacaagggctccactgccgctccagccaaggacaactcgacggcgacgaccgactcccgcgcgctgcaggcgaccaccggacgcggcgtgtcctcctcggcggcgaccgccggtgctgcactcacggtgctgctcgccggctacctcctcctgctcgtgccagagctgtcgcctagctcgttctagaccctctgtcaagttgtgccaccagtaggatttgatatgttgttgttctttctagtacgtgacgtgacagacaatttgctgctggtgtccttgttgttgtagtagttgcactgcgtgttcctgttatgctatgggtacgagatgttagggcatgggttaagctaagctaaggcgatgggggatcagtaccttacctctcatctctggctgctgatcctttttgttcttggcactgctgttttatctgaacatttgatcagcc

SEQ ID NO: 27970 - protein, 239 aa, Zea mays subsp. mays
  peptide (1)..(239): Ceres Seq. ID no. 12362328
  misc_feature (80)..(158): Pfam Name: Pfam Description:  Protease inhibitor/seed storage/LTP family
  misc_feature (50)..(234): NCBI GI NO: 34394084 NR Description: lipid transfer protein-like
  misc_feature (54)..(186): NCBI GI NO: 15224863 NR Description: unknown protein; protein id: At2g44300.1
  misc_feature (56)..(216): NCBI GI NO: 15224862 NR Description: unknown protein; protein id: At2g44290.1
  misc_feature (72)..(229): NCBI GI NO: 18405294 NR Description: expressed protein; protein id: At1g55260
  misc_feature (72)..(229): NCBI GI NO: 21537387 NR Description: unknown [Arabidopsis thaliana]
  misc_feature (54)..(195): NCBI GI NO: 15231070 NR Description: putative protein; protein id: At3g58550
  misc_feature (54)..(195): NCBI GI NO: 21555220 NR Description: unknown [Arabidopsis thaliana]
  misc_feature (48)..(224): NCBI GI NO: 25553595 NR Description: OJ1656_E11.26
  misc_feature (47)..(224): NCBI GI NO: 25553588 NR Description: OJ1656_E11.14
  misc_feature (58)..(219): NCBI GI NO: 25553602 NR Description: OJ1656_E11.34
GCYNNCPSPNLPASSHSLTSHTATLEPLPAAEGACTGQRTHNTSSSSMARWAAVLALAAATAIAVASVAGGDMNADKTECADQLVGLAPCLQYVQGQARAPPPDCCGGLRQVLGKSPKCLCVLVKDKDDPNLGIKINATLALALPNACGATRANVSHCAQLLHIPPGSKDAAVFSPGSDKGSTAAPAKDNSTATTDSRALQATTGRGVSSSAATAGAALTVLLAGYLLLLVPELSPSSF

SEQ ID NO: 27971 - protein, 192 aa, Zea mays subsp. mays
  peptide (1)..(192): Ceres Seq. ID no. 12362329
  misc_feature (33)..(111): Pfam Name: Pfam Description:  Protease inhibitor/seed storage/LTP family
  misc_feature (3)..(187): NCBI GI NO: 34394084 NR Description: lipid transfer protein-like
  misc_feature (7)..(139): NCBI GI NO: 15224863 NR Description: unknown protein; protein id: At2g44300.1
  misc_feature (9)..(169): NCBI GI NO: 15224862 NR Description: unknown protein; protein id: At2g44290.1
  misc_feature (25)..(182): NCBI GI NO: 18405294 NR Description: expressed protein; protein id: At1g55260
  misc_feature (25)..(182): NCBI GI NO: 21537387 NR Description: unknown [Arabidopsis thaliana]
  misc_feature (7)..(148): NCBI GI NO: 15231070 NR Description: putative protein; protein id: At3g58550
  misc_feature (7)..(148): NCBI GI NO: 21555220 NR Description: unknown [Arabidopsis thaliana]
  misc_feature (1)..(177): NCBI GI NO: 25553595 NR Description: OJ1656_E11.26
  misc_feature (1)..(177): NCBI GI NO: 25553588 NR Description: OJ1656_E11.14
  misc_feature (11)..(172): NCBI GI NO: 25553602 NR Description: OJ1656_E11.34
MARWAAVLALAAATAIAVASVAGGDMNADKTECADQLVGLAPCLQYVQGQARAPPPDCCGGLRQVLGKSPKCLCVLVKDKDDPNLGIKINATLALALPNACGATRANVSHCAQLLHIPPGSKDAAVFSPGSDKGSTAAPAKDNSTATTDSRALQATTGRGVSSSAATAGAALTVLLAGYLLLLVPELSPSSF

SEQ ID NO: 27972 - protein, 167 aa, Zea mays subsp. mays
  peptide (1)..(167): Ceres Seq. ID no. 12362330
  misc_feature (8)..(86): Pfam Name: Pfam Description:  Protease inhibitor/seed storage/LTP family
  misc_feature (1)..(162): NCBI GI NO: 34394084 NR Description: lipid transfer protein-like
  misc_feature (1)..(114): NCBI GI NO: 15224863 NR Description: unknown protein; protein id: At2g44300.1
  misc_feature (1)..(144): NCBI GI NO: 15224862 NR Description: unknown protein; protein id: At2g44290.1
  misc_feature (1)..(157): NCBI GI NO: 18405294 NR Description: expressed protein; protein id: At1g55260
  misc_feature (1)..(157): NCBI GI NO: 21537387 NR Description: unknown [Arabidopsis thaliana]
  misc_feature (1)..(123): NCBI GI NO: 15231070 NR Description: putative protein; protein id: At3g58550
  misc_feature (1)..(123): NCBI GI NO: 21555220 NR Description: unknown [Arabidopsis thaliana]
  misc_feature (1)..(152): NCBI GI NO: 25553595 NR Description: OJ1656_E11.26
  misc_feature (1)..(152): NCBI GI NO: 25553588 NR Description: OJ1656_E11.14
  misc_feature (1)..(147): NCBI GI NO: 25553602 NR Description: OJ1656_E11.34
MNADKTECADQLVGLAPCLQYVQGQARAPPPDCCGGLRQVLGKSPKCLCVLVKDKDDPNLGIKINATLALALPNACGATRANVSHCAQLLHIPPGSKDAAVFSPGSDKGSTAAPAKDNSTATTDSRALQATTGRGVSSSAATAGAALTVLLAGYLLLLVPELSPSSF

SEQ ID NO: 27973 - DNA, 784 bp, Zea mays subsp. mays
  misc_feature (1)..(784): Ceres Seq. ID no. 12405529
accaaccactcccaccaccctctcaccgttgtccgttacatatccagcggccacccgttcctcttcctcgtccgcctccacgaccaccatccatcgccatggctggccccaccaccacgctcctcctcctgctgctgtgctccgctgggctcgcgtccggcgccacggcggctgacgacagcgggttcactaccttcaaggtatacttccacgacatcgtggcggggacgagcccgacggccatccgcatcgcgcagggggcggcgtccaacacctcgtccaccagcttcggcgcgatggtggccatcgacgacccgctgacgacgggccccacgcgcgccgcgggcaccgaggtgggccgcgcccagggcacctacacgttcgcggaccagcagacgttcggcctcctcatggtgatggacttcgtgttcacggccggggagcacaagggcagcacgctctccatcctcggccgcaacgaggtgctcagcgacgtccgcgagatgagcatcgtcggcggcagcggaaagttccgcatggcgcgtgggtacgtccaggcgcacaccatcgactccggcttcaaatccggcgagaccgtcgtccagtacaccgtcaacgtcagggcctagctacccgctcgatctaccttgcttgctcctccggcccatggccgactgcccgcccggcttcttgtgcgtcgatccatctccggatgctttgtacacaccttgtcgttcttcgatgttactacatgacatgtatttagtagactgcgatttcagac

SEQ ID NO: 27974 - protein, 208 aa, Zea mays subsp. mays
  peptide (1)..(208): Ceres Seq. ID no. 12405530
  misc_feature (63)..(206): Pfam Name: Pfam Description:  Dirigent-like protein
  misc_feature (63)..(206): NCBI GI NO: 15218836 NR Description: disease resistance response protein-related/dirigent protein-related
  misc_feature (62)..(204): NCBI GI NO: 15238980 NR Description: disease resistance response protein-related
  misc_feature (63)..(204): NCBI GI NO: 15219966 NR Description: disease resistance response protein-related
  misc_feature (39)..(202): NCBI GI NO: 15217886 NR Description: disease resistance response protein-related/dirigent protein-related
  misc_feature (63)..(206): NCBI GI NO: 15222673 NR Description: disease resistance response protein-related/dirigent protein-related
  misc_feature (63)..(206): NCBI GI NO: 22135914 NR Description: unknown protein [Arabidopsis thaliana]
  misc_feature (63)..(201): NCBI GI NO: 15239779 NR Description: disease resistance response protein-related/dirigent protein-related
  misc_feature (36)..(204): NCBI GI NO: 15238982 NR Description: disease resistance response protein-related
  misc_feature (40)..(206): NCBI GI NO: 30681257 NR Description: disease resistance response protein-related/dirigent protein-related
  misc_feature (40)..(202): NCBI GI NO: 25412014 NR Description: probable disease resistance response protein
QPLPPPSHRCPLHIQRPPVPLPRPPPRPPSIAMAGPTTTLLLLLLCSAGLASGATAADDSGFTTFKVYFHDIVAGTSPTAIRIAQGAASNTSSTSFGAMVAIDDPLTTGPTRAAGTEVGRAQGTYTFADQQTFGLLMVMDFVFTAGEHKGSTLSILGRNEVLSDVREMSIVGGSGKFRMARGYVQAHTIDSGFKSGETVVQYTVNVRA

SEQ ID NO: 27975 - protein, 176 aa, Zea mays subsp. mays
  peptide (1)..(176): Ceres Seq. ID no. 12405531
  misc_feature (31)..(174): Pfam Name: Pfam Description:  Dirigent-like protein
  misc_feature (31)..(174): NCBI GI NO: 15218836 NR Description: disease resistance response protein-related/dirigent protein-related
  misc_feature (30)..(172): NCBI GI NO: 15238980 NR Description: disease resistance response protein-related
  misc_feature (31)..(172): NCBI GI NO: 15219966 NR Description: disease resistance response protein-related
  misc_feature (7)..(170): NCBI GI NO: 15217886 NR Description: disease resistance response protein-related/dirigent protein-related
  misc_feature (31)..(174): NCBI GI NO: 15222673 NR Description: disease resistance response protein-related/dirigent protein-related
  misc_feature (31)..(174): NCBI GI NO: 22135914 NR Description: unknown protein [Arabidopsis thaliana]
  misc_feature (31)..(169): NCBI GI NO: 15239779 NR Description: disease resistance response protein-related/dirigent protein-related
  misc_feature (4)..(172): NCBI GI NO: 15238982 NR Description: disease resistance response protein-related
  misc_feature (8)..(174): NCBI GI NO: 30681257 NR Description: disease resistance response protein-related/dirigent protein-related
  misc_feature (8)..(170): NCBI GI NO: 25412014 NR Description: probable disease resistance response protein
MAGPTTTLLLLLLCSAGLASGATAADDSGFTTFKVYFHDIVAGTSPTAIRIAQGAASNTSSTSFGAMVAIDDPLTTGPTRAAGTEVGRAQGTYTFADQQTFGLLMVMDFVFTAGEHKGSTLSILGRNEVLSDVREMSIVGGSGKFRMARGYVQAHTIDSGFKSGETVVQYTVNVRA

SEQ ID NO: 27976 - protein, 110 aa, Zea mays subsp. mays
  peptide (1)..(110): Ceres Seq. ID no. 12405532
  misc_feature (1)..(108): Pfam Name: Pfam Description:  Dirigent-like protein
  misc_feature (1)..(108): NCBI GI NO: 15218836 NR Description: disease resistance response protein-related/dirigent protein-related
  misc_feature (1)..(106): NCBI GI NO: 15238980 NR Description: disease resistance response protein-related
  misc_feature (1)..(106): NCBI GI NO: 15219966 NR Description: disease resistance response protein-related
  misc_feature (1)..(104): NCBI GI NO: 15217886 NR Description: disease resistance response protein-related/dirigent protein-related
  misc_feature (1)..(108): NCBI GI NO: 15222673 NR Description: disease resistance response protein-related/dirigent protein-related
  misc_feature (1)..(108): NCBI GI NO: 22135914 NR Description: unknown protein [Arabidopsis thaliana]
  misc_feature (1)..(103): NCBI GI NO: 15239779 NR Description: disease resistance response protein-related/dirigent protein-related
  misc_feature (1)..(106): NCBI GI NO: 15238982 NR Description: disease resistance response protein-related
  misc_feature (1)..(108): NCBI GI NO: 30681257 NR Description: disease resistance response protein-related/dirigent protein-related
  misc_feature (1)..(104): NCBI GI NO: 25412014 NR Description: probable disease resistance response protein
MVAIDDPLTTGPTRAAGTEVGRAQGTYTFADQQTFGLLMVMDFVFTAGEHKGSTLSILGRNEVLSDVREMSIVGGSGKFRMARGYVQAHTIDSGFKSGETVVQYTVNVRA

SEQ ID NO: 27977 - DNA, 1336 bp, Zea mays subsp. mays
  misc_feature (1)..(1336): Ceres Seq. ID no. 12409154
acattaattgtctcgtcctactgctagcaccagaccgctgtcttcttgagcacattgaggtcttcggatttctccgggggtggccgcgcgcagcaccggcaatgtcgtcatgcaagcggtacttgccgtgcttgatattgttgttgctgcacggaggacgaggtgcggtggccgggaaggtgtcggcaatcgtcgtgttcggcgactcttccgtggacacggggaacaacaatttcatcccgaccatcgcgcggagcaacttctggccgtacggccgcgactacgacgatggcctccccacgggccggttctccaatgggcgcctcgccaccgacttcatctccgaggccttcggcctgccgccgtccatccccgcctacctggacaacaactgcaccatcgaccagctcgccacaggagtctccttcgcctccgctgcgacaggcctcgataacgcgacggccggcgtcttgtccgtgatcacgctggacgagcagctcgcttacttcaaggagtacacggaccgcctcaagatcgccaagggcgaggcggcggcggaggagatcatcagcgaagcgctctacatctggagcatcggcaccaatgacttcatcgagaactactacaacttgccggagcggcggatgcagtatactgtgggcgagtacgaggcctacctgctgggactcgccgaggccgccatacgccgcgtgcacaccctcggcggccgcaaaatggacttcaccgggctcacgcccatgggctgcctccccgccgagcggatcggcaaccgcgacaaccccggggagtgcaacgagcagtacaacgctgttgccaggaccttcaacgccaagctgcaggagctcgtcctcaagcttaacaaggaactgctgggactgcagctcgtcttcgccgacacgtaccagctcctcgccaacgtcgtaaacaggccggccgactacggatttgacaatgctgtgcaaggttgttgtgggacggggcttttcgaggcaggttacttttgtagcttcagcacatcaatgctatgcgaaaatgccaacaagtatgtattctttgatgcgatccatcccacggagaagatgtacaaattgctcgccaataccgtcatcaacaccaccttgcatgtattcatgtgaaattatttgatcttcctaatagaaatgcggcatggacaggtctatacggccatgcctgtgtacaatctataatgcacatagacacacctaccgctcctccacatacaactttgattgttgaaaccatatcatatacaattataaattatagcacgtgtactataaattttatcttatag

SEQ ID NO: 27978 - protein, 384 aa, Zea mays subsp. mays
  peptide (1)..(384): Ceres Seq. ID no. 12409155
  misc_feature (63)..(375): Pfam Name: Pfam Description:  GDSL-like Lipase/Acylhydrolase
  misc_feature (44)..(384): NCBI GI NO: 21593518 NR Description: putative GDSL-motif lipase/hydrolase
  misc_feature (44)..(384): NCBI GI NO: 15228157 NR Description: putative GDSL-motif lipase/hydrolase
  misc_feature (59)..(383): NCBI GI NO: 18416824 NR Description: putative APG protein; protein id: At4g26790
  misc_feature (59)..(383): NCBI GI NO: 7485330 NR Description: hypothetical protein F10M23
  misc_feature (82)..(373): NCBI GI NO: 15224201 NR Description: putative APG isolog protein; protein id:At2g42990
  misc_feature (59)..(383): NCBI GI NO: 34907922 NR Description: putative GDSL-motif lipase/hydrolase
  misc_feature (62)..(384): NCBI GI NO: 18394825 NR Description: anter-specific proline-rich protein APG precursor
  misc_feature (44)..(373): NCBI GI NO: 4587999 NR Description: hypothetical APG protein [Arabidopsis thaliana]
  misc_feature (44)..(373): NCBI GI NO: 15225668 NR Description: putative GDSL-motif lipase hydrolase
  misc_feature (62)..(384): NCBI GI NO: 21592372 NR Description: anter-specific proline-rich protein APG precursor
INCLVLLLAPDRCLLEHIEVFGFLRGWPRAAPAMSSCKRYLPCLILLLLHGGRGAVAGKVSAIVVFGDSSVDTGNNNFIPTIARSNFWPYGRDYDDGLPTGRFSNGRLATDFISEAFGLPPSIPAYLDNNCTIDQLATGVSFASAATGLDNATAGVLSVITLDEQLAYFKEYTDRLKIAKGEAAAEEIISEALYIWSIGTNDFIENYYNLPERRMQYTVGEYEAYLLGLAEAAIRRVHTLGGRKMDFTGLTPMGCLPAERIGNRDNPGECNEQYNAVARTFNAKLQELVLKLNKELLGLQLVFADTYQLLANVVNRPADYGFDNAVQGCCGTGLFEAGYFCSFSTSMLCENANKYVFFDAIHPTEKMYKLLANTVINTTLHVFM

SEQ ID NO: 27979 - protein, 351 aa, Zea mays subsp. mays
  peptide (1)..(351): Ceres Seq. ID no. 12409156
  misc_feature (30)..(342): Pfam Name: Pfam Description:  GDSL-like Lipase/Acylhydrolase
  misc_feature (11)..(351): NCBI GI NO: 21593518 NR Description: putative GDSL-motif lipase/hydrolase
  misc_feature (11)..(351): NCBI GI NO: 15228157 NR Description: putative GDSL-motif lipase/hydrolase
  misc_feature (26)..(350): NCBI GI NO: 18416824 NR Description: putative APG protein; protein id: At4g26790
  misc_feature (26)..(350): NCBI GI NO: 7485330 NR Description: hypothetical protein F10M23
  misc_feature (49)..(340): NCBI GI NO: 15224201 NR Description: putative APG isolog protein; protein id:At2g42990
  misc_feature (26)..(350): NCBI GI NO: 34907922 NR Description: putative GDSL-motif lipase/hydrolase
  misc_feature (29)..(351): NCBI GI NO: 18394825 NR Description: anter-specific proline-rich protein APG precursor
  misc_feature (11)..(340): NCBI GI NO: 4587999 NR Description: hypothetical APG protein [Arabidopsis thaliana]
  misc_feature (11)..(340): NCBI GI NO: 15225668 NR Description: putative GDSL-motif lipase hydrolase
  misc_feature (29)..(351): NCBI GI NO: 21592372 NR Description: anter-specific proline-rich protein APG precursor
MSSCKRYLPCLILLLLHGGRGAVAGKVSAIVVFGDSSVDTGNNNFIPTIARSNFWPYGRDYDDGLPTGRFSNGRLATDFISEAFGLPPSIPAYLDNNCTIDQLATGVSFASAATGLDNATAGVLSVITLDEQLAYFKEYTDRLKIAKGEAAAEEIISEALYIWSIGTNDFIENYYNLPERRMQYTVGEYEAYLLGLAEAAIRRVHTLGGRKMDFTGLTPMGCLPAERIGNRDNPGECNEQYNAVARTFNAKLQELVLKLNKELLGLQLVFADTYQLLANVVNRPADYGFDNAVQGCCGTGLFEAGYFCSFSTSMLCENANKYVFFDAIHPTEKMYKLLANTVINTTLHVFM

SEQ ID NO: 27980 - DNA, 1325 bp, Zea mays subsp. mays
  misc_feature (1)..(1325): Ceres Seq. ID no. 12402203
gcacgagaccattacctagaacatcctaatcgaaaagacctgtgtacactcgtactcgtctcttcttcgccacacacacacacggctgctagtgtacacagaggcacagcagcaggaggatggccgtagtgccggcggcgccggtggttcttggagtggccatggtgctcgtcgtcctggccgccagcgccggcgcggccgggcagctcaggatggggttctacgccgagagctgcccgggcgtggagcgcgtggtgggcgacttcgtccggcagcacgtccgccgcgtgcccaccgtcgccgccgcgttgctccggctgcacttccacgactgcttcgtcaggggctgcgacgcctccgtcctgctcaactccaccgccggcagcgtggccgagaaggacgcgccgccgaacctgacgctgcgcggcttcgacctcgtcgaccgcgtcaaggcgctcgtcgaggatgcctgccccggcgtcgtctcctgcgccgacgtcctcgcgctcgccgcccgggacgcggtcgtcgccatcggcgggccgtcgtggcgcgtggcgacggggaggagggacggcacggtgtccgccatgcaggaggcgctcgacgacatccccaagcacaccatgaccttcccgcagctggccagcctgttcgccagcaaaggcctcggcgttcgtgacctcgtctggctctcaggcgcgcacacgatcggcatcgcgcactgctcctccttcgcggaccgcctgtacggctaccccggcggcggcgttggcgcggccggcaacgacacggccgacccggccctggacgcgacctacgcggccaacctgcggaggcgcaagtgccgggcggcgggcggcgggtacgcggaggacggcgtggtggagatggacccaggcagccacctgacgttcgacctgggctactaccgcgcgctgctcaagcgcaggggcctgctccgctccgacgccgcgctgctcaccgacgcggcggcgcgcgccgacgtcgagggcgtcgcggccgggcccgaggaggtcttcttccagctgttcgcgcggtccatggccaggctggcggcgctgcaggtcaagaccggcgccgagggggaggtcaggaggaactgcgctgtcgtcaacggcggctaatgcatgtagcttcttgcctttcttcttctttcccttcatggccattactgctagcgaatactgtgattttgctcttgcattttgggtgcttcacgctcgggtgcaattatcatgtcaaagaaattgttaccctcttgctccttttgttagagacttaatagaattgtttggactggc

SEQ ID NO: 27981 - protein, 342 aa, Zea mays subsp. mays
  peptide (1)..(342): Ceres Seq. ID no. 12402204
  misc_feature (49)..(297): Pfam Name: Pfam Description:  Peroxidase
  misc_feature (17)..(340): NCBI GI NO: 4204759 NR Description: peroxidase precursor [Glycine max]
  misc_feature (17)..(340): NCBI GI NO: 4204761 NR Description: peroxidase precursor [Glycine max]
  misc_feature (11)..(340): NCBI GI NO: 15237128 NR Description: peroxidase, putative; protein id: At4g11290.1
  misc_feature (11)..(340): NCBI GI NO: 1546692 NR Description: peroxidase; peroxidase ATP19a
  misc_feature (9)..(340): NCBI GI NO: 15220463 NR Description: peroxidase, putative; protein id: At1g05260
  misc_feature (9)..(340): NCBI GI NO: 21536908 NR Description: putative peroxidase [Arabidopsis thaliana]
  misc_feature (15)..(340): NCBI GI NO: 678547 NR Description: peroxidase
  misc_feature (15)..(340): NCBI GI NO: 1084405 NR Description: peroxidase (EC 1.11.1.7) TPX1 precursor - tomato
  misc_feature (13)..(338): NCBI GI NO: 1402920 NR Description: peroxidase [Arabidopsis thaliana]
  misc_feature (13)..(338): NCBI GI NO: 1546704 NR Description: peroxidase ATP7a [Arabidopsis thaliana]
MAVVPAAPVVLGVAMVLVVLAASAGAAGQLRMGFYAESCPGVERVVGDFVRQHVRRVPTVAAALLRLHFHDCFVRGCDASVLLNSTAGSVAEKDAPPNLTLRGFDLVDRVKALVEDACPGVVSCADVLALAARDAVVAIGGPSWRVATGRRDGTVSAMQEALDDIPKHTMTFPQLASLFASKGLGVRDLVWLSGAHTIGIAHCSSFADRLYGYPGGGVGAAGNDTADPALDATYAANLRRRKCRAAGGGYAEDGVVEMDPGSHLTFDLGYYRALLKRRGLLRSDAALLTDAAARADVEGVAAGPEEVFFQLFARSMARLAALQVKTGAEGEVRRNCAVVNGG

SEQ ID NO: 27982 - protein, 328 aa, Zea mays subsp. mays
  peptide (1)..(328): Ceres Seq. ID no. 12402205
  misc_feature (35)..(283): Pfam Name: Pfam Description:  Peroxidase
  misc_feature (3)..(326): NCBI GI NO: 4204759 NR Description: peroxidase precursor [Glycine max]
  misc_feature (3)..(326): NCBI GI NO: 4204761 NR Description: peroxidase precursor [Glycine max]
  misc_feature (1)..(326): NCBI GI NO: 15237128 NR Description: peroxidase, putative; protein id: At4g11290.1
  misc_feature (1)..(326): NCBI GI NO: 1546692 NR Description: peroxidase; peroxidase ATP19a
  misc_feature (1)..(326): NCBI GI NO: 15220463 NR Description: peroxidase, putative; protein id: At1g05260
  misc_feature (1)..(326): NCBI GI NO: 21536908 NR Description: putative peroxidase [Arabidopsis thaliana]
  misc_feature (1)..(326): NCBI GI NO: 678547 NR Description: peroxidase
  misc_feature (1)..(326): NCBI GI NO: 1084405 NR Description: peroxidase (EC 1.11.1.7) TPX1 precursor - tomato
  misc_feature (1)..(324): NCBI GI NO: 1402920 NR Description: peroxidase [Arabidopsis thaliana]
  misc_feature (1)..(324): NCBI GI NO: 1546704 NR Description: peroxidase ATP7a [Arabidopsis thaliana]
MVLVVLAASAGAAGQLRMGFYAESCPGVERVVGDFVRQHVRRVPTVAAALLRLHFHDCFVRGCDASVLLNSTAGSVAEKDAPPNLTLRGFDLVDRVKALVEDACPGVVSCADVLALAARDAVVAIGGPSWRVATGRRDGTVSAMQEALDDIPKHTMTFPQLASLFASKGLGVRDLVWLSGAHTIGIAHCSSFADRLYGYPGGGVGAAGNDTADPALDATYAANLRRRKCRAAGGGYAEDGVVEMDPGSHLTFDLGYYRALLKRRGLLRSDAALLTDAAARADVEGVAAGPEEVFFQLFARSMARLAALQVKTGAEGEVRRNCAVVNGG

SEQ ID NO: 27983 - protein, 311 aa, Zea mays subsp. mays
  peptide (1)..(311): Ceres Seq. ID no. 12402206
  misc_feature (18)..(266): Pfam Name: Pfam Description:  Peroxidase
  misc_feature (1)..(309): NCBI GI NO: 4204759 NR Description: peroxidase precursor [Glycine max]
  misc_feature (1)..(309): NCBI GI NO: 4204761 NR Description: peroxidase precursor [Glycine max]
  misc_feature (1)..(309): NCBI GI NO: 15237128 NR Description: peroxidase, putative; protein id: At4g11290.1
  misc_feature (1)..(309): NCBI GI NO: 1546692 NR Description: peroxidase; peroxidase ATP19a
  misc_feature (1)..(309): NCBI GI NO: 15220463 NR Description: peroxidase, putative; protein id: At1g05260
  misc_feature (1)..(309): NCBI GI NO: 21536908 NR Description: putative peroxidase [Arabidopsis thaliana]
  misc_feature (1)..(309): NCBI GI NO: 678547 NR Description: peroxidase
  misc_feature (1)..(309): NCBI GI NO: 1084405 NR Description: peroxidase (EC 1.11.1.7) TPX1 precursor - tomato
  misc_feature (1)..(307): NCBI GI NO: 1402920 NR Description: peroxidase [Arabidopsis thaliana]
  misc_feature (1)..(307): NCBI GI NO: 1546704 NR Description: peroxidase ATP7a [Arabidopsis thaliana]
MGFYAESCPGVERVVGDFVRQHVRRVPTVAAALLRLHFHDCFVRGCDASVLLNSTAGSVAEKDAPPNLTLRGFDLVDRVKALVEDACPGVVSCADVLALAARDAVVAIGGPSWRVATGRRDGTVSAMQEALDDIPKHTMTFPQLASLFASKGLGVRDLVWLSGAHTIGIAHCSSFADRLYGYPGGGVGAAGNDTADPALDATYAANLRRRKCRAAGGGYAEDGVVEMDPGSHLTFDLGYYRALLKRRGLLRSDAALLTDAAARADVEGVAAGPEEVFFQLFARSMARLAALQVKTGAEGEVRRNCAVVNGG

SEQ ID NO: 27984 - DNA, 939 bp, Zea mays subsp. mays
  misc_feature (1)..(939): Ceres Seq. ID no. 12402805
agtcttccttccacctgaaaacccaacccacacgctcgcgcctccgcgaagaaaaacaccgaggcccatggcgccgagaacgtcagagagagcgatgacatcggcggccgcggggctcgcgcgtggcgccggcccgcactacagaggcgtcaggaagcggccgtggggccggtacgccgcggagatccgcgacccggccaagaagagccgcgtgtggctcggcacgttcgacacgcccgaggacgccgcgcgggcctacgacgccgccgcgcgcgagtaccgcggcgccaaggccaagaccaacttctccttcccttcgtgcctgccgctcgccgccgcggacgtggccggcggctgccggagcggcaacagcagcagcaccactaccaccaccaccgtcgactccttcggcggcgacgtgcaggcgccgcccatgcaggccatgccgctcccaccgtccttcagcgccagcgccgccgtacgcttccctttcagcggctaccccgtgacgcacccgtactacttcttcgggcaggcggcagcagggtgccatatgctgaagctgccaccgacgacggtgactgtggctcagagcgactctgactcctcgtccgtcgaggatctgtcgccgtcgccgccggccgccgtgtcagcgacgagagccgccgcgtttgatctcgacctaaactgcccaccgccggccgaggcggaggcatagtcgccggagttttgctgaatgactgcctgtagtttctttcgtcttttacccgtagagagaaaatcggtaggcttagggcccctttgtattcacacggtgtcacgggcacacccacctccgaactctggtactctgatctttagagtgaaactacgaacatgtggtttaaatagttcaaagttaactctataatttatggttcaaagttaactctatgattt

SEQ ID NO: 27985 - protein, 238 aa, Zea mays subsp. mays
  peptide (1)..(238): Ceres Seq. ID no. 12402806
  misc_feature (44)..(106): Pfam Name: Pfam Description:  AP2 domain
  misc_feature (23)..(235): NCBI GI NO: 34908900 NR Description: ethylene-responsive element binding factor 3
  misc_feature (47)..(235): NCBI GI NO: 15232526 NR Description: ethylene responsive element binding factor 4
  misc_feature (46)..(233): NCBI GI NO: 30526297 NR Description: ethylene response factor 2
  misc_feature (23)..(233): NCBI GI NO: 28274832 NR Description: ethylene response factor 3
  misc_feature (23)..(235): NCBI GI NO: 38345793 NR Description: OSJNBa0085I10.10
  misc_feature (47)..(207): NCBI GI NO: 20340233 NR Description: ethylene responsive element binding factor 4-like
  misc_feature (23)..(164): NCBI GI NO: 4099921 NR Description: EREBP-3 homolog [Stylosanthes hamata]
  misc_feature (47)..(207): NCBI GI NO: 2281635 NR Description: AP2 domain containing protein RAP2.5
  misc_feature (45)..(232): NCBI GI NO: 15231110 NR Description: ethylene responsive element binding factor 7
  misc_feature (23)..(181): NCBI GI NO: 4099914 NR Description: ethylene-responsive element binding protein homolog
VFLPPENPTHTLAPPRRKTPRPMAPRTSERAMTSAAAGLARGAGPHYRGVRKRPWGRYAAEIRDPAKKSRVWLGTFDTPEDAARAYDAAAREYRGAKAKTNFSFPSCLPLAAADVAGGCRSGNSSSTTTTTTVDSFGGDVQAPPMQAMPLPPSFSASAAVRFPFSGYPVTHPYYFFGQAAAGCHMLKLPPTTVTVAQSDSDSSSVEDLSPSPPAAVSATRAAAFDLDLNCPPPAEAEA

SEQ ID NO: 27986 - protein, 216 aa, Zea mays subsp. mays
  peptide (1)..(216): Ceres Seq. ID no. 12402807
  misc_feature (22)..(84): Pfam Name: Pfam Description:  AP2 domain
  misc_feature (1)..(213): NCBI GI NO: 34908900 NR Description: ethylene-responsive element binding factor 3
  misc_feature (25)..(213): NCBI GI NO: 15232526 NR Description: ethylene responsive element binding factor 4
  misc_feature (24)..(211): NCBI GI NO: 30526297 NR Description: ethylene response factor 2
  misc_feature (1)..(211): NCBI GI NO: 28274832 NR Description: ethylene response factor 3
  misc_feature (1)..(213): NCBI GI NO: 38345793 NR Description: OSJNBa0085I10.10
  misc_feature (25)..(185): NCBI GI NO: 20340233 NR Description: ethylene responsive element binding factor 4-like
  misc_feature (1)..(142): NCBI GI NO: 4099921 NR Description: EREBP-3 homolog [Stylosanthes hamata]
  misc_feature (25)..(185): NCBI GI NO: 2281635 NR Description: AP2 domain containing protein RAP2.5
  misc_feature (23)..(210): NCBI GI NO: 15231110 NR Description: ethylene responsive element binding factor 7
  misc_feature (1)..(159): NCBI GI NO: 4099914 NR Description: ethylene-responsive element binding protein homolog
MAPRTSERAMTSAAAGLARGAGPHYRGVRKRPWGRYAAEIRDPAKKSRVWLGTFDTPEDAARAYDAAAREYRGAKAKTNFSFPSCLPLAAADVAGGCRSGNSSSTTTTTTVDSFGGDVQAPPMQAMPLPPSFSASAAVRFPFSGYPVTHPYYFFGQAAAGCHMLKLPPTTVTVAQSDSDSSSVEDLSPSPPAAVSATRAAAFDLDLNCPPPAEAEA

SEQ ID NO: 27987 - protein, 207 aa, Zea mays subsp. mays
  peptide (1)..(207): Ceres Seq. ID no. 12402808
  misc_feature (13)..(75): Pfam Name: Pfam Description:  AP2 domain
  misc_feature (1)..(204): NCBI GI NO: 34908900 NR Description: ethylene-responsive element binding factor 3
  misc_feature (16)..(204): NCBI GI NO: 15232526 NR Description: ethylene responsive element binding factor 4
  misc_feature (15)..(202): NCBI GI NO: 30526297 NR Description: ethylene response factor 2
  misc_feature (1)..(202): NCBI GI NO: 28274832 NR Description: ethylene response factor 3
  misc_feature (1)..(204): NCBI GI NO: 38345793 NR Description: OSJNBa0085I10.10
  misc_feature (16)..(176): NCBI GI NO: 20340233 NR Description: ethylene responsive element binding factor 4-like
  misc_feature (1)..(133): NCBI GI NO: 4099921 NR Description: EREBP-3 homolog [Stylosanthes hamata]
  misc_feature (16)..(176): NCBI GI NO: 2281635 NR Description: AP2 domain containing protein RAP2.5
  misc_feature (14)..(201): NCBI GI NO: 15231110 NR Description: ethylene responsive element binding factor 7
  misc_feature (1)..(150): NCBI GI NO: 4099914 NR Description: ethylene-responsive element binding protein homolog
MTSAAAGLARGAGPHYRGVRKRPWGRYAAEIRDPAKKSRVWLGTFDTPEDAARAYDAAAREYRGAKAKTNFSFPSCLPLAAADVAGGCRSGNSSSTTTTTTVDSFGGDVQAPPMQAMPLPPSFSASAAVRFPFSGYPVTHPYYFFGQAAAGCHMLKLPPTTVTVAQSDSDSSSVEDLSPSPPAAVSATRAAAFDLDLNCPPPAEAEA

SEQ ID NO: 27988 - DNA, 1069 bp, Zea mays subsp. mays
  misc_feature (1)..(1069): Ceres Seq. ID no. 12341753
acttcgtttctgcctttgaccagctcttgcgctcggcttatctcgtgcggttgttgctagaaccgtccctaattccattcccgtgatctggtttagtcatttcatggttttatttgttgcatctgtggtgaatctgtggtcacttagatcaacataggaagatgtacgcccagttgagttttgagtcggctgttggtgtttccctaactagggactgagggtctgaagctctatacctgttgcaatcgcgtagttgtgcgtgctagatgtatcagagaatccctttgagtagaaagcacacgcacacagctgccacggtattggcattcgtaggtatctgtttcactgacgtgctacctgcacgaggatagcacctgatatttgtgcgctttttttggtgaagattttttgaagctgagaagatggtgctgaagacggaactctgccgcttcagtggccagaagatctatcctgggaaaggcatccggtttattcgtgctgattctcaggttttcctttttgccaactctaaatgcaagcgctacttccacaaccgcctgaagcctgcaaagcttacctggacagcaatgtacaggaagcagcacaagaaggacatccatgctgaagctgtcaagaagaggcgccgcgccaccaagaagccatactcgaggtccattgtgggtgcttccttggaagtgatccagaagaagagagctgagaagcctgaggtccgtgatgctgctagagaagctgctcttcgtgagatcaaggagcgcatcaagaagaccaaggacgagaagaaggcgaagaaggctgaggtgtccaagtcccagaaggcgcagacgaagggcgctgtccagaagggttccaagggccccaagttgggcggcggcggtggcaaacgctgaaaaggaacgaagtgtcatttcgagacctcaccaaagtcacctttgtagtacctgggttaattttgcattttcgttcagagttacttgtgactcttaactaccatgtcaagagaatggattcgttatttttatatattgggagaaatgatcgccgttccttc

SEQ ID NO: 27989 - protein, 161 aa, Zea mays subsp. mays
  peptide (1)..(161): Ceres Seq. ID no. 12341754
  misc_feature (3)..(73): Pfam Name: Pfam Description:  Ribosomal protein L24e
  misc_feature (1)..(161): NCBI GI NO: 1710521 NR Description: 60S RIBOSOMAL PROTEIN L24
  misc_feature (4)..(161): NCBI GI NO: 34900364 NR Description: putative 60S ribosomal protein L24
  misc_feature (1)..(160): NCBI GI NO: 6094040 NR Description: 60S ribosomal protein L24
  misc_feature (1)..(156): NCBI GI NO: 10180025 NR Description: 60S ribosomal protein L24 [Prunus avium]
  misc_feature (1)..(161): NCBI GI NO: 18404176 NR Description: 60S ribosomal protein L24; protein id: At2g36620
  misc_feature (1)..(161): NCBI GI NO: 15231730 NR Description: 60S ribosomal protein - like; protein id:At3g53020
  misc_feature (5)..(161): NCBI GI NO: 25295112 NR Description: 60S ribosomal protein L24
  misc_feature (3)..(150): NCBI GI NO: 19075214 NR Description: 60s ribosomal protein L24
  misc_feature (3)..(150): NCBI GI NO: 19115030 NR Description: 60S ribosomal protein L24
  misc_feature (10)..(154): NCBI GI NO: 40741063 NR Description: conserved hypothetical protein
MVLKTELCRFSGQKIYPGKGIRFIRADSQVFLFANSKCKRYFHNRLKPAKLTWTAMYRKQHKKDIHAEAVKKRRRATKKPYSRSIVGASLEVIQKKRAEKPEVRDAAREAALREIKERIKKTKDEKKAKKAEVSKSQKAQTKGAVQKGSKGPKLGGGGGKR

SEQ ID NO: 27990 - protein, 106 aa, Zea mays subsp. mays
  peptide (1)..(106): Ceres Seq. ID no. 12341755
  misc_feature (1)..(106): NCBI GI NO: 1710521 NR Description: 60S RIBOSOMAL PROTEIN L24
  misc_feature (1)..(106): NCBI GI NO: 34900364 NR Description: putative 60S ribosomal protein L24
  misc_feature (1)..(105): NCBI GI NO: 6094040 NR Description: 60S ribosomal protein L24
  misc_feature (1)..(101): NCBI GI NO: 10180025 NR Description: 60S ribosomal protein L24 [Prunus avium]
  misc_feature (1)..(106): NCBI GI NO: 18404176 NR Description: 60S ribosomal protein L24; protein id: At2g36620
  misc_feature (1)..(106): NCBI GI NO: 15231730 NR Description: 60S ribosomal protein - like; protein id:At3g53020
  misc_feature (1)..(106): NCBI GI NO: 25295112 NR Description: 60S ribosomal protein L24
  misc_feature (1)..(95): NCBI GI NO: 19075214 NR Description: 60s ribosomal protein L24
  misc_feature (1)..(95): NCBI GI NO: 19115030 NR Description: 60S ribosomal protein L24
  misc_feature (1)..(99): NCBI GI NO: 40741063 NR Description: conserved hypothetical protein
MYRKQHKKDIHAEAVKKRRRATKKPYSRSIVGASLEVIQKKRAEKPEVRDAAREAALREIKERIKKTKDEKKAKKAEVSKSQKAQTKGAVQKGSKGPKLGGGGGKR

SEQ ID NO: 27991 - protein, 89 aa, Zea mays subsp. mays
  peptide (1)..(89): Ceres Seq. ID no. 12341756
MLLEKLLFVRSRSASRRPRTRRRRRRLRCPSPRRRRRRALSRRVPRAPSWAAAVANAEKERSVISRPHQSHLCSTWVNFAFSFRVTCDS

SEQ ID NO: 27992 - DNA, 1099 bp, Zea mays subsp. mays; identical to SEQ ID NO: 25190
  misc_feature (1)..(1099): Ceres Seq. ID no. 13577617

SEQ ID NO: 27993 - protein, 296 aa, Zea mays subsp. mays; identical to SEQ ID NO: 25191
  peptide (1)..(296): Ceres Seq. ID no. 13577618
  misc_feature (77)..(272): Pfam Name: NAP Pfam Description: Nucleosome assembly protein
  misc_feature (46)..(296): NCBI GI NO: 14550110 NR Description: nucleosome/chromatin assembly factor A [Zea mays]
  misc_feature (46)..(293): NCBI GI NO: 14550112 NR Description: nucleosome/chromatin assembly factor A [Zea mays]
  misc_feature (46)..(293): NCBI GI NO: 21739223 NR Description: OSJNBa0072F16.2
  misc_feature (51)..(296): NCBI GI NO: 25354177 NR Description: hypothetical protein F6A14.10
  misc_feature (51)..(296): NCBI GI NO: 18394656 NR Description: expressed protein [Arabidopsis thaliana]
  misc_feature (50)..(296): NCBI GI NO: 15221298 NR Description: SET protein, phospatase 2A inhibitor -related
  misc_feature (51)..(273): NCBI GI NO: 26451105 NR Description: unknown protein [Arabidopsis thaliana]
  misc_feature (46)..(293): NCBI GI NO: 2253411 NR Description: PP2A inhibitor [Tetraodon fluviatilis]
  misc_feature (46)..(293): NCBI GI NO: 28279779 NR Description: Similar to SET translocation
  misc_feature (46)..(295): NCBI GI NO: 2144100 NR Description: Set beta isoform - rat

SEQ ID NO: 27994 - protein, 251 aa, Zea mays subsp. mays; identical to SEQ ID NO: 25192
  peptide (1)..(251): Ceres Seq. ID no. 13577619
  misc_feature (32)..(227): Pfam Name: NAP Pfam Description: Nucleosome assembly protein
  misc_feature (1)..(251): NCBI GI NO: 14550110 NR Description: nucleosome/chromatin assembly factor A [Zea mays]
  misc_feature (1)..(248): NCBI GI NO: 14550112 NR Description: nucleosome/chromatin assembly factor A [Zea mays]
  misc_feature (1)..(248): NCBI GI NO: 21739223 NR Description: OSJNBa0072F16.2
  misc_feature (6)..(251): NCBI GI NO: 25354177 NR Description: hypothetical protein F6A14.10
  misc_feature (6)..(251): NCBI GI NO: 18394656 NR Description: expressed protein [Arabidopsis thaliana]
  misc_feature (5)..(251): NCBI GI NO: 15221298 NR Description: SET protein, phospatase 2A inhibitor -related
  misc_feature (6)..(228): NCBI GI NO: 26451105 NR Description: unknown protein [Arabidopsis thaliana]
  misc_feature (1)..(248): NCBI GI NO: 2253411 NR Description: PP2A inhibitor [Tetraodon fluviatilis]
  misc_feature (1)..(248): NCBI GI NO: 28279779 NR Description: Similar to SET translocation
  misc_feature (1)..(250): NCBI GI NO: 2144100 NR Description: Set beta isoform - rat

SEQ ID NO: 27995 - protein, 198 aa, Zea mays subsp. mays; identical to SEQ ID NO: 25193
  peptide (1)..(198): Ceres Seq. ID no. 13577620
  misc_feature (1)..(174): Pfam Name: NAP Pfam Description: Nucleosome assembly protein
  misc_feature (1)..(198): NCBI GI NO: 14550110 NR Description: nucleosome/chromatin assembly factor A [Zea mays]
  misc_feature (1)..(195): NCBI GI NO: 14550112 NR Description: nucleosome/chromatin assembly factor A [Zea mays]
  misc_feature (1)..(195): NCBI GI NO: 21739223 NR Description: OSJNBa0072F16.2
  misc_feature (1)..(198): NCBI GI NO: 25354177 NR Description: hypothetical protein F6A14.10
  misc_feature (1)..(198): NCBI GI NO: 18394656 NR Description: expressed protein [Arabidopsis thaliana]
  misc_feature (1)..(198): NCBI GI NO: 15221298 NR Description: SET protein, phospatase 2A inhibitor -related
  misc_feature (1)..(175): NCBI GI NO: 26451105 NR Description: unknown protein [Arabidopsis thaliana]
  misc_feature (1)..(195): NCBI GI NO: 2253411 NR Description: PP2A inhibitor [Tetraodon fluviatilis]
  misc_feature (1)..(195): NCBI GI NO: 28279779 NR Description: Similar to SET translocation
  misc_feature (1)..(197): NCBI GI NO: 2144100 NR Description: Set beta isoform - rat

SEQ ID NO: 27996 - DNA, 1073 bp, Zea mays subsp. mays
  misc_feature (1)..(1073): Ceres Seq. ID no. 12340796
attttcttaaaaaaaaatctcaatcgcaacaacacaaaaaaggcccgcaatatcgattagcgagagtcgttcctccaccaaccaattcgcttctccgtcaacatcacttcatcgtcgacgcctccggcccaccaaccatgccggcggccatggcggctgcggcggcgcagaggctcctcgcggcgagcacgaaaatcattggcgttgggcgcaactacatagcccacgccaaggagctcggcaatccggtccccaaggagcccgtcctgttcctgaagccgacctcgtcgtttctccacgctggtgtggccaccgccgccgtcgagatcccggagccgctcgagtcgctacaccacgaggtcgagctcgccgtcgtcatctcccggcgcgggcgcgacgttcccgaggcgtccgccatggactttgttggaggttatgcacttgctttggacatgacagcaagggaccttcagtctgttgctaagtctgcaggccttccatggactttggctaaaggacaagacaccttcaccccaattagtgcagtagttccaaaatcagctgtcactaatcccgatgatctcgagctctggctgaaggtagatgatgaactaaggcagaaaggaccgacaagcgacatgctattcaagattccttttctgataagctatatcagttccatcatgacattaatggagggtcatgtgatattaacaggtactcctgagggtgtgggtcctgtcagagtaggtcagaagattacagctggtataactgacctaattgatgttgagttcgatgttcagaggcgaaatcggtcattttccacatgatgcaataagcaagaaagtaatggtgaatacaaagtggcagtactcgtcctcgaccttgaatcgcattactggacctgcagccattgcagatagctcttgagcctttccttgatttaatttacctgggttttgagagactatctatgaatatgctaactcgttcgtgaagtatctttttgtcccaattttgattgatggagctttaagcttgcttttctgtatgcaataaaaaaacttatc

SEQ ID NO: 27997 - protein, 276 aa, Zea mays subsp. mays
  peptide (1)..(276): Ceres Seq. ID no. 12340797
  misc_feature (79)..(248): Pfam Name: FAA Pfam Description: Fumarylacetoacetate
  misc_feature (52)..(276): NCBI GI NO: 34897304 NR Description: putative hydroxylase [Oryza sativa]
  misc_feature (52)..(239): NCBI GI NO: 28372682 NR Description: putative isomerase
  misc_feature (50)..(275): NCBI GI NO: 16209656 NR Description: AT4g15940/dl4011w [Arabidopsis thaliana]
  misc_feature (50)..(275): NCBI GI NO: 15234757 NR Description: isomerase like protein; protein id: At4g15940
  misc_feature (50)..(270): NCBI GI NO: 15228286 NR Description: putative decarboxilase; protein id: At3g16700
  misc_feature (50)..(238): NCBI GI NO: 7485073 NR Description: hypothetical protein - Arabidopsis thaliana
  misc_feature (64)..(273): NCBI GI NO: 28829830 NR Description: similar to Arabidopsis thaliana (Mouse-ear cress)
  misc_feature (45)..(269): NCBI GI NO: 20072495 NR Description: RIKEN cDNA 1110025H10 gene [Mus musculus]
  misc_feature (50)..(269): NCBI GI NO: 13654274 NR Description: hypothetical protein DKFZp566J2046 [Homo sapiens]
  misc_feature (50)..(269): NCBI GI NO: 14336767 NR Description: similar to homoprotocatechuate catabolismbifunctional isomerase/ decarboxylase
FLKKKSQSQQHKKGPQYRLARVVPPPTNSLLRQHHFIVDASGPPTMPAAMAAAAAQRLLAASTKIIGVGRNYIAHAKELGNPVPKEPVLFLKPTSSFLHAGVATAAVEIPEPLESLHHEVELAVVISRRGRDVPEASAMDFVGGYALALDMTARDLQSVAKSAGLPWTLAKGQDTFTPISAVVPKSAVTNPDDLELWLKVDDELRQKGPTSDMLFKIPFLISYISSIMTLMEGHVILTGTPEGVGPVRVGQKITAGITDLIDVEFDVQRRNRSFST

SEQ ID NO: 27998 - protein, 231 aa, Zea mays subsp. mays
  peptide (1)..(231): Ceres Seq. ID no. 12340798
  misc_feature (34)..(203): Pfam Name: FAA Pfam Description: Fumarylacetoacetate
  misc_feature (7)..(231): NCBI GI NO: 34897304 NR Description: putative hydroxylase [Oryza sativa]
  misc_feature (7)..(194): NCBI GI NO: 28372682 NR Description: putative isomerase
  misc_feature (5)..(230): NCBI GI NO: 16209656 NR Description: AT4g15940/dl4011w [Arabidopsis thaliana]
  misc_feature (5)..(230): NCBI GI NO: 15234757 NR Description: isomerase like protein; protein id: At4g15940
  misc_feature (5)..(225): NCBI GI NO: 15228286 NR Description: putative decarboxilase; protein id: At3g16700
  misc_feature (5)..(193): NCBI GI NO: 7485073 NR Description: hypothetical protein - Arabidopsis thaliana
  misc_feature (19)..(228): NCBI GI NO: 28829830 NR Description: similar to Arabidopsis thaliana (Mouse-ear cress)
  misc_feature (1)..(224): NCBI GI NO: 20072495 NR Description: RIKEN cDNA 1110025H10 gene [Mus musculus]
  misc_feature (5)..(224): NCBI GI NO: 13654274 NR Description: hypothetical protein DKFZp566J2046 [Homo sapiens]
  misc_feature (5)..(224): NCBI GI NO: 14336767 NR Description: similar to homoprotocatechuate catabolismbifunctional isomerase/ decarboxylase
MPAAMAAAAAQRLLAASTKIIGVGRNYIAHAKELGNPVPKEPVLFLKPTSSFLHAGVATAAVEIPEPLESLHHEVELAVVISRRGRDVPEASAMDFVGGYALALDMTARDLQSVAKSAGLPWTLAKGQDTFTPISAVVPKSAVTNPDDLELWLKVDDELRQKGPTSDMLFKIPFLISYISSIMTLMEGHVILTGTPEGVGPVRVGQKITAGITDLIDVEFDVQRRNRSFST

SEQ ID NO: 27999 - protein, 227 aa, Zea mays subsp. mays
  peptide (1)..(227): Ceres Seq. ID no. 12340799
  misc_feature (30)..(199): Pfam Name: FAA Pfam Description: Fumarylacetoacetate
  misc_feature (3)..(227): NCBI GI NO: 34897304 NR Description: putative hydroxylase [Oryza sativa]
  misc_feature (3)..(190): NCBI GI NO: 28372682 NR Description: putative isomerase
  misc_feature (1)..(226): NCBI GI NO: 16209656 NR Description: AT4g15940/dl4011w [Arabidopsis thaliana]
  misc_feature (1)..(226): NCBI GI NO: 15234757 NR Description: isomerase like protein; protein id: At4g15940
  misc_feature (1)..(221): NCBI GI NO: 15228286 NR Description: putative decarboxilase; protein id: At3g16700
  misc_feature (1)..(189): NCBI GI NO: 7485073 NR Description: hypothetical protein - Arabidopsis thaliana
  misc_feature (15)..(224): NCBI GI NO: 28829830 NR Description: similar to Arabidopsis thaliana (Mouse-ear cress)
  misc_feature (1)..(220): NCBI GI NO: 20072495 NR Description: RIKEN cDNA 1110025H10 gene [Mus musculus]
  misc_feature (1)..(220): NCBI GI NO: 13654274 NR Description: hypothetical protein DKFZp566J2046 [Homo sapiens]
  misc_feature (1)..(220): NCBI GI NO: 14336767 NR Description: similar to homoprotocatechuate catabolismbifunctional isomerase/ decarboxylase
MAAAAAQRLLAASTKIIGVGRNYIAHAKELGNPVPKEPVLFLKPTSSFLHAGVATAAVEIPEPLESLHHEVELAVVISRRGRDVPEASAMDFVGGYALALDMTARDLQSVAKSAGLPWTLAKGQDTFTPISAVVPKSAVTNPDDLELWLKVDDELRQKGPTSDMLFKIPFLISYISSIMTLMEGHVILTGTPEGVGPVRVGQKITAGITDLIDVEFDVQRRNRSFST

SEQ ID NO: 28000 - DNA, 860 bp, Zea mays subsp. mays
  misc_feature (1)..(860): Ceres Seq. ID no. 12353809
  misc_feature (87)..(87): n is a, c, t, g, unknown, or other
  misc_feature (88)..(88): n is a, c, t, g, unknown, or other
catccaaaaaaccagaagctagaagcctagaacagccaagaaaagccgaaacaacaacaatcccaatcccccccccccccccgcccnntgtcactcaaaactcgaccaacaatgtcgctgattcgccgtggaagcgcattcgaccccttctccctcgacctctgggaccccttccagggctttcccttcggctctggaagcagcagcagcagcagcctgttcccctcgttcggaggcaccaccaccagctcggagacggccgccttcgccggcgctcgcgtcgactggaaggagacgccggaggcgcacgtgttcaagaccgacgtgccggggctgaagaaggaggaggttaaggtggagctggaggacggcaacgtgctccagatcagcggcgagcgcagcaaggagcaggaggagaagagggacacctggcaccgcgtggagcgcagcagcggcaagttcctgcgcaggttccgcctgccggagaacgccaggacggagcagatcagtgcgtccatggagaacggcgtgctcaccgtcaccgtgcctaaggaggaggccaagaaggccgacgtcaagtctatccagatctccggctagtatgctcaagctcacaaccgatggtgtgccgtcttcgtcttgtcttcacatgccgggggtccataaaatgccagcgtccgtgtaatgtacttgtcacagtgtcagtgtattgtactggtatcatggttgtcttgagtagcgtgtgttgtggctattgtgttccgaacgatattgaagtctcatccgtcgtgtatcagtgtcgtctgtaacgaacccagttttaaaacatttcgaagtgagttgcttggtactcgtaaact

SEQ ID NO: 28001 - protein, 162 aa, Zea mays subsp. mays
  peptide (1)..(162): Ceres Seq. ID no. 12353810
  misc_feature (1)..(162): NCBI GI NO: 34902026 NR Description: unknown protein
  misc_feature (1)..(162): NCBI GI NO: 34902016 NR Description: putative class I low-molecular-weight heat shockprotein
  misc_feature (1)..(162): NCBI GI NO: 7441293 NR Description: heat shock protein 17.9 - pearl millet
  misc_feature (1)..(162): NCBI GI NO: 2119194 NR Description: low-molecular-weight heat-shock protein - rice
  misc_feature (1)..(162): NCBI GI NO: 34902028 NR Description: shock protein, low molecular weight
  misc_feature (1)..(162): NCBI GI NO: 1213073 NR Description: heat shock protein 17.8 [Oryza sativa]
  misc_feature (1)..(162): NCBI GI NO: 34902024 NR Description: unknown protein
  misc_feature (1)..(162): NCBI GI NO: 399937 NR Description: 17.4 KD CLASS I HEAT SHOCK PROTEIN
  misc_feature (1)..(162): NCBI GI NO: 422000 NR Description: heat shock protein, low molecular weight
  misc_feature (1)..(162): NCBI GI NO: 25044839 NR Description: class-1 LMW heat shock protein [Ananas comosus]
MSLIRRGSAFDPFSLDLWDPFQGFPFGSGSSSSSSLFPSFGGTTTSSETAAFAGARVDWKETPEAHVFKTDVPGLKKEEVKVELEDGNVLQISGERSKEQEEKRDTWHRVERSSGKFLRRFRLPENARTEQISASMENGVLTVTVPKEEAKKADVKSIQISG

SEQ ID NO: 28002 - protein, 116 aa, Zea mays subsp. mays
  peptide (1)..(116): Ceres Seq. ID no. 12353811
  misc_feature (29)..(29): Xaa is any aa, unknown or other
SKKPEARSLEQPRKAETTTIPIPPPPPPXVTQNSTNNVADSPWKRIRPLLPRPLGPLPGLSLRLWKQQQQQPVPLVRRHHHQLGDGRLRRRSRRLEGDAGGARVQDRRAGAEEGGG

SEQ ID NO: 28003 - DNA, 1713 bp, Zea mays subsp. mays
  misc_feature (1)..(1713): Ceres Seq. ID no. 12566201
gcacgagaccattacctagaacatcctaatcgaaaattcttcgctcacaccacgtacgatacgagcctcaccagcgccggcgctgtagtgtgcagccctcctcctggatctctgcacccttcggaggccactcctcgcgcgcgcgcgcgcgcggacatggaggtcgaataccacgaggtgagaggagttcggtctgctccgcgcaatgcggcgggcgaagacttatcttctccttattttccgccggccgggccttggatcgtccttgctgatcatctccgtttcggtgcgcttcttcctcctcctcctcctcctccttcggtcgcggaaacgccatggatggatggatgggacgggctagcaggagtacgtgcggagctcgagaggcgtgcagctattcacctgcggctggctgcccgctgccgcatcgcccaaggcgctcgtcttcctctgccacggctacggcatggagtgcagtggcttcatgagagaatgcggcgtgcggctggcggcggccgggtacggcgtgttcgggatggactacgagggccacggcaagtcgatgggcgcgcgctgctacatccgcagtttccgccgcctcgtcgacgactgcggccatttcttcaagtccgtctgcggtgggtcctgtatttcccgatcagaccacactctctctctgataccggctctctgaaccctgtttttttcctgcctcgacgcagagcttgaggagtaccggggcaagagccggttcctgtacggcgagtccatgggtggcgcggtggcgctgctgctgcacaccgaggaccccgccttctgggacggcgccgtcctcgtggcgcccatgtgcaagatatcggagaaggtgaagccgcaccctctggtgatcacgctcctgacgcaggtggaggacgtgatccccaggtggaagatcgtgcccaccaagcaggacgtcatcgacgccgccttcaaggaccccgtcaagcgtgaaaagatcaggaggaaccagctgatctaccaggacaagccgcggctcaagactgcgctggagatgctcagggccagcatgtacatagaagacagcttgtcacaggtgacgctgccgttcttcgtcctgcacggcgaggccgacacggtgacggacccggaggtgagccgcgcgctgtacgagcgttcggccagcgccgacaagaccatcaagctgtacccggggatgtggcacggcctcaccgccggggagcccgacgagaacgtggaggccatcttctccgacatcgtgtcctggctcaaccaccgcagccggagctgggccgtggaggaacgccatatgaccaggaagctggcgccagctccggccaagtccatcgaaggccacggcaccgtggacggcaaagtgcacacacaacaagggcgccctcggcggcgccagggcttcctctgcgggcttgccggccggacgcatcaccacgcggagatgtgaaagatagaatcgccgtctcggtcccggatcagatgggcgcctgctttcttcaaccatggcaaataaaggaatgatgacctgcggtttataatatagaggtcttattatgcttgtcaaagttatgtatgaccaatcattcccagtctggtgcagattcaaactcatgctcagatatatgtaatgtaagattataacgctattagcattctggataacccgttaacaatgacatt

SEQ ID NO: 28004 - protein, 242 aa, Zea mays subsp. mays
  peptide (1)..(242): Ceres Seq. ID no. 12566202
ARDHYLEHPNRKFFAHTTYDTSLTSAGAVVCSPPPGSLHPSEATPRARARADMEVEYHEVRGVRSAPRNAAGEDLSSPYFPPAGPWIVLADHLRFGALLPPPPPPPSVAETPWMDGWDGLAGVRAELERRAAIHLRLAARCRIAQGARLPLPRLRHGVQWLHERMRRAAGGGRVRRVRDGLRGPRQVDGRALLHPQFPPPRRRLRPFLQVRLRWVLYFPIRPHSLSDTGSLNPVFFLPRRRA

SEQ ID NO: 28005 - protein, 236 aa, Zea mays subsp. mays
  peptide (1)..(236): Ceres Seq. ID no. 12566203
  misc_feature (1)..(167): Pfam Name: Pfam Description:  alpha/beta hydrolase fold
  misc_feature (1)..(236): NCBI GI NO: 30695682 NR Description: esterase/lipase/thioesterase family
  misc_feature (1)..(229): NCBI GI NO: 18407407 NR Description: putative phospholipase; protein id: At2g47630
  misc_feature (1)..(236): NCBI GI NO: 34894592 NR Description: phospholipase-like protein
  misc_feature (1)..(229): NCBI GI NO: 21592863 NR Description: putative phospholipase [Arabidopsis thaliana]
  misc_feature (1)..(229): NCBI GI NO: 7487574 NR Description: probable phospholipase
  misc_feature (1)..(176): NCBI GI NO: 7487948 NR Description: lysophospholipase homolog F12L6
  misc_feature (1)..(176): NCBI GI NO: 30687883 NR Description: esterase/lipase/thioesterase family
  misc_feature (1)..(177): NCBI GI NO: 30687879 NR Description: hydrolase, alpha/beta fold family
  misc_feature (1)..(177): NCBI GI NO: 7487947 NR Description: lysophospholipase homolog F12L6
  misc_feature (1)..(177): NCBI GI NO: 15233200 NR Description: lipase -like protein; protein id: At3g55180.1
MGGAVALLLHTEDPAFWDGAVLVAPMCKISEKVKPHPLVITLLTQVEDVIPRWKIVPTKQDVIDAAFKDPVKREKIRRNQLIYQDKPRLKTALEMLRASMYIEDSLSQVTLPFFVLHGEADTVTDPEVSRALYERSASADKTIKLYPGMWHGLTAGEPDENVEAIFSDIVSWLNHRSRSWAVEERHMTRKLAPAPAKSIEGHGTVDGKVHTQQGRPRRRQGFLCGLAGRTHHHAEM

SEQ ID NO: 28006 - protein, 211 aa, Zea mays subsp. mays
  peptide (1)..(211): Ceres Seq. ID no. 12566204
  misc_feature (1)..(142): Pfam Name: Pfam Description:  alpha/beta hydrolase fold
  misc_feature (1)..(211): NCBI GI NO: 30695682 NR Description: esterase/lipase/thioesterase family
  misc_feature (1)..(204): NCBI GI NO: 18407407 NR Description: putative phospholipase; protein id: At2g47630
  misc_feature (1)..(211): NCBI GI NO: 34894592 NR Description: phospholipase-like protein
  misc_feature (1)..(204): NCBI GI NO: 21592863 NR Description: putative phospholipase [Arabidopsis thaliana]
  misc_feature (1)..(204): NCBI GI NO: 7487574 NR Description: probable phospholipase
  misc_feature (1)..(151): NCBI GI NO: 7487948 NR Description: lysophospholipase homolog F12L6
  misc_feature (1)..(151): NCBI GI NO: 30687883 NR Description: esterase/lipase/thioesterase family
  misc_feature (1)..(152): NCBI GI NO: 30687879 NR Description: hydrolase, alpha/beta fold family
  misc_feature (1)..(152): NCBI GI NO: 7487947 NR Description: lysophospholipase homolog F12L6
  misc_feature (1)..(152): NCBI GI NO: 15233200 NR Description: lipase -like protein; protein id: At3g55180.1
MCKISEKVKPHPLVITLLTQVEDVIPRWKIVPTKQDVIDAAFKDPVKREKIRRNQLIYQDKPRLKTALEMLRASMYIEDSLSQVTLPFFVLHGEADTVTDPEVSRALYERSASADKTIKLYPGMWHGLTAGEPDENVEAIFSDIVSWLNHRSRSWAVEERHMTRKLAPAPAKSIEGHGTVDGKVHTQQGRPRRRQGFLCGLAGRTHHHAEM

SEQ ID NO: 28007 - DNA, 1059 bp, Zea mays subsp. mays
  misc_feature (1)..(1059): Ceres Seq. ID no. 12409142
acactcttgccctctagctctagcagcagcagccaaagccatggaggcgagcggcatgaagctccgccggacgttcctcctcaccctactgctggtgctctccaccgccgtgacgcccatcctctcgctgcctgcagacaacgtggtagcctgcgactgcgacaagcccaaggcgcccaagccgtcgcactcgcgcccgcccaagacgaccaagccctcccacccgtcgccgaaacccgagaacccgaagccacccaagggccccgcgtacccggcggcggggcacccaccgcctaagagcccctcctacccaccggtcgtaggcccacccgtcacgcgcccgccggtcgtcggaccgccagtgacctacccgccgattaccggttctccgacgacgccgccggtcatcggcccaccggtcacgcgcccgccggtcgtcggaccaccggtgacctacccgccgatcaccggccctccgtcgacgccgcttccggtcaccggcccgcccgtgacctacccacccggcggaggcgggggcagctcgacgccgtgcccgccgccaccgccactgccgacgtgcccggcggactcgctgaagctgggcgcgtgcgtggacctgctgggcgggctggtgcacgtcggcctcggcgaccccgtggtgaaccagtgctgcccggtgctggaggggctggtggagctggaggcggccgtgtgcctgtgcaccaccatcaagctcaggctcctcaacgtcaacctgtacctgcccctggcgctccagctcctcctcacctgcggcaagacgccgccgccgggctacacctgcaccgtctgactgacgtcctcgatcggttagctagcgcctagcggcatagtagcagcagcccatgcattatccgtccatgcacatgcatgtacgtagctatgccttatgctatgcatgcatctctctgcaagtggttgctgtctgctgcatggtggaagactcgagagctactagctagctagtagagagtagagacgtcgtgttgttgttgcatgcaatgcatatgcgtgccttcg

SEQ ID NO: 28008 - protein, 276 aa, Zea mays subsp. mays
  peptide (1)..(276): Ceres Seq. ID no. 12409143
  misc_feature (193)..(274): Pfam Name: Pfam Description:  Protease inhibitor/seed storage/LTP family
  misc_feature (56)..(274): NCBI GI NO: 11994732 NR Description: contains similarity to cell wall-plasma membranelinker protein~gene_id:MKA23
  misc_feature (56)..(274): NCBI GI NO: 15233282 NR Description: unknown protein; protein id: At3g22120.1
  misc_feature (56)..(274): NCBI GI NO: 7446482 NR Description: probable cell wall-plasma membrane linker proteinPRP precursor - rape
  misc_feature (56)..(274): NCBI GI NO: 25453525 NR Description: cell wall-plasma membrane linker protein homolog
  misc_feature (43)..(276): NCBI GI NO: 18396941 NR Description: expressed protein; protein id: At2g10940
  misc_feature (129)..(276): NCBI GI NO: 485514 NR Description: ADR11-2 protein - soybean (fragment)
  misc_feature (56)..(274): NCBI GI NO: 19521 NR Description: proline rich protein [Lycopersicon esculentum]
  misc_feature (56)..(274): NCBI GI NO: 1709767 NR Description: 36.4 KD PROLINE-RICH PROTEIN
  misc_feature (56)..(274): NCBI GI NO: 1076501 NR Description: cell wall protein - alfalfa
  misc_feature (36)..(274): NCBI GI NO: 11994733 NR Description: contains similarity to cell wall-plasma membranelinker protein~gene_id:MKA23
HSCPLALAAAAKAMEASGMKLRRTFLLTLLLVLSTAVTPILSLPADNVVACDCDKPKAPKPSHSRPPKTTKPSHPSPKPENPKPPKGPAYPAAGHPPPKSPSYPPVVGPPVTRPPVVGPPVTYPPITGSPTTPPVIGPPVTRPPVVGPPVTYPPITGPPSTPLPVTGPPVTYPPGGGGGSSTPCPPPPPLPTCPADSLKLGACVDLLGGLVHVGLGDPVVNQCCPVLEGLVELEAAVCLCTTIKLRLLNVNLYLPLALQLLLTCGKTPPPGYTCTV

SEQ ID NO: 28009 - protein, 263 aa, Zea mays subsp. mays
  peptide (1)..(263): Ceres Seq. ID no. 12409144
  misc_feature (180)..(261): Pfam Name: Pfam Description:  Protease inhibitor/seed storage/LTP family
  misc_feature (43)..(261): NCBI GI NO: 11994732 NR Description: contains similarity to cell wall-plasma membranelinker protein~gene_id:MKA23
  misc_feature (43)..(261): NCBI GI NO: 15233282 NR Description: unknown protein; protein id: At3g22120.1
  misc_feature (43)..(261): NCBI GI NO: 7446482 NR Description: probable cell wall-plasma membrane linker proteinPRP precursor - rape
  misc_feature (43)..(261): NCBI GI NO: 25453525 NR Description: cell wall-plasma membrane linker protein homolog
  misc_feature (30)..(263): NCBI GI NO: 18396941 NR Description: expressed protein; protein id: At2g10940
  misc_feature (116)..(263): NCBI GI NO: 485514 NR Description: ADR11-2 protein - soybean (fragment)
  misc_feature (43)..(261): NCBI GI NO: 19521 NR Description: proline rich protein [Lycopersicon esculentum]
  misc_feature (43)..(261): NCBI GI NO: 1709767 NR Description: 36.4 KD PROLINE-RICH PROTEIN
  misc_feature (43)..(261): NCBI GI NO: 1076501 NR Description: cell wall protein - alfalfa
  misc_feature (23)..(261): NCBI GI NO: 11994733 NR Description: contains similarity to cell wall-plasma membranelinker protein~gene_id:MKA23
MEASGMKLRRTFLLTLLLVLSTAVTPILSLPADNVVACDCDKPKAPKPSHSRPPKTTKPSHPSPKPENPKPPKGPAYPAAGHPPPKSPSYPPVVGPPVTRPPVVGPPVTYPPITGSPTTPPVIGPPVTRPPVVGPPVTYPPITGPPSTPLPVTGPPVTYPPGGGGGSSTPCPPPPPLPTCPADSLKLGACVDLLGGLVHVGLGDPVVNQCCPVLEGLVELEAAVCLCTTIKLRLLNVNLYLPLALQLLLTCGKTPPPGYTCTV

SEQ ID NO: 28010 - protein, 258 aa, Zea mays subsp. mays
  peptide (1)..(258): Ceres Seq. ID no. 12409145
  misc_feature (175)..(256): Pfam Name: Pfam Description:  Protease inhibitor/seed storage/LTP family
  misc_feature (38)..(256): NCBI GI NO: 11994732 NR Description: contains similarity to cell wall-plasma membranelinker protein~gene_id:MKA23
  misc_feature (38)..(256): NCBI GI NO: 15233282 NR Description: unknown protein; protein id: At3g22120.1
  misc_feature (38)..(256): NCBI GI NO: 7446482 NR Description: probable cell wall-plasma membrane linker proteinPRP precursor - rape
  misc_feature (38)..(256): NCBI GI NO: 25453525 NR Description: cell wall-plasma membrane linker protein homolog
  misc_feature (25)..(258): NCBI GI NO: 18396941 NR Description: expressed protein; protein id: At2g10940
  misc_feature (111)..(258): NCBI GI NO: 485514 NR Description: ADR11-2 protein - soybean (fragment)
  misc_feature (38)..(256): NCBI GI NO: 19521 NR Description: proline rich protein [Lycopersicon esculentum]
  misc_feature (38)..(256): NCBI GI NO: 1709767 NR Description: 36.4 KD PROLINE-RICH PROTEIN
  misc_feature (38)..(256): NCBI GI NO: 1076501 NR Description: cell wall protein - alfalfa
  misc_feature (18)..(256): NCBI GI NO: 11994733 NR Description: contains similarity to cell wall-plasma membranelinker protein~gene_id:MKA23
MKLRRTFLLTLLLVLSTAVTPILSLPADNVVACDCDKPKAPKPSHSRPPKTTKPSHPSPKPENPKPPKGPAYPAAGHPPPKSPSYPPVVGPPVTRPPVVGPPVTYPPITGSPTTPPVIGPPVTRPPVVGPPVTYPPITGPPSTPLPVTGPPVTYPPGGGGGSSTPCPPPPPLPTCPADSLKLGACVDLLGGLVHVGLGDPVVNQCCPVLEGLVELEAAVCLCTTIKLRLLNVNLYLPLALQLLLTCGKTPPPGYTCTV

SEQ ID NO: 28011 - DNA, 1601 bp, Zea mays subsp. mays
  misc_feature (1)..(1601): Ceres Seq. ID no. 13491106
ccttccgattctccgtcgcctgagcggctgagccaacttgccaagcccaagcaagccaagtcgtcgcctccccgacccaacgccgcgacccccttgcccgtccgcgaccgctgcagcacctcggatcccgccccaatggcaacagcgtgtccgccgctctcgctgccgtccacctccctcttccgcggcaggtccgcccgcgccgggcccaacgcaggcagctcacggccgtccgctgcagcgccgtcggagaggcggtcgtggaggaggcctcgcccagacggcggaagagccgctgctggtgagcgcaatcagagggaggaagtcgagaggccacccgtctggctcatgaggcaggccgggaggtacatgaagagctaccaattgctctgcgagcggtatccttcgttccgtgaaagatcagaaaatgtcgacctagttgttgagatctctttgcaaccatggaaggttttcaagcctgatggagtcatcttgttctcggacatccttactccacttcctgggatgaacataccttttgacattgtgaagggaaaaggtccagtgatctatgatccattgagaacggcagcagctgtgaatgaagtcagagaatttgttcctgaggagtgggtcccttatgtggggcaggctctgaatattttgagacaagaggttaaaaatgaagctgctgtactaggttttgttggagctccgtttaccttggcatcttattgtgtggaaggaggttcatcaaagaactttacattgattaagaaaatggccttctcagaaccagcgattttacacaatttgctacagaagttcacaacatcaatggctaactatattaaataccaagcggacaatggggcgcaggctgtccaaattttcgattcatgggctactgaactcagcccggctgattttgaggagtttagcctgccttatctaaagcagatagtggatagtgttagggaaacacatcctgacttgcctctgatactttacgcaagtggatctgggggcttgctggagaggcttcctttgacaggtgttgatgttgtcagcttggactggacggtcgatatggcagagggcaggaaaagattgggatctaacacagcagtccaagggaacgtggaccctggtgttctttttggatccaaagagtttataacgaggcggatttacgacactgtgcagaaggctggcaatgttggacatgtattgaaccttggccatggcatcaaggttggaactccggaggaaaatgttgctcacttttttgaggtcgcaaaagggatcagatattaaagaacctggcatggttttttcctttttccaaatcggcagaagttgtagagtcggcggtcgaggatagatgcagaaagcccatgtgcagtatagagtgcctgaaaaaatttttgggactgattttgtttgttgcatttcaagttccggtttcagtgtaatattgtaagcagatttgagtggaggcgtaatgaagtgcctaattgtttatagcaatatagttttgtacaaccagtatccttgtttatgagagtacgaagcagaaatactgatcatgtgttgacatg

SEQ ID NO: 28012 - protein, 438 aa, Zea mays subsp. mays
  peptide (1)..(438): Ceres Seq. ID no. 13491107
  misc_feature (105)..(436): Pfam Name: URO-D Pfam Description: Uroporphyrinogen decarboxylase
  misc_feature (46)..(438): NCBI GI NO: 6014938 NR Description: Uroporphyrinogen decarboxylase
  misc_feature (109)..(438): NCBI GI NO: 2501646 NR Description: Uroporphyrinogen decarboxylase (UPD)
  misc_feature (107)..(438): NCBI GI NO: 2501647 NR Description: Uroporphyrinogen decarboxylase
  misc_feature (107)..(438): NCBI GI NO: 16975230 NR Description: Chain A
  misc_feature (107)..(438): NCBI GI NO: 15226690 NR Description: uroporphyrinogen decarboxylase (UPD), putative
  misc_feature (107)..(438): NCBI GI NO: 14334768 NR Description: putative uroporphyrinogen decarboxylase
  misc_feature (107)..(436): NCBI GI NO: 16332025 NR Description: uroporphyrinogen decarboxylase
  misc_feature (107)..(436): NCBI GI NO: 23041382 NR Description: hypothetical protein
  misc_feature (97)..(436): NCBI GI NO: 33240529 NR Description: Uroporphyrinogen decarboxylase
  misc_feature (97)..(434): NCBI GI NO: 17231401 NR Description: uroporphyrinogen decarboxylase
PSDSPSPERLSQLAKPKQAKSSPPRPNAATPLPVRDRCSTSDPAPMATACPPLSLPSTSLFRGRSARAGPNAGSSRPSAAAPSERRSWRRPRPDGGRAAAGERNQREEVERPPVWLMRQAGRYMKSYQLLCERYPSFRERSENVDLVVEISLQPWKVFKPDGVILFSDILTPLPGMNIPFDIVKGKGPVIYDPLRTAAAVNEVREFVPEEWVPYVGQALNILRQEVKNEAAVLGFVGAPFTLASYCVEGGSSKNFTLIKKMAFSEPAILHNLLQKFTTSMANYIKYQADNGAQAVQIFDSWATELSPADFEEFSLPYLKQIVDSVRETHPDLPLILYASGSGGLLERLPLTGVDVVSLDWTVDMAEGRKRLGSNTAVQGNVDPGVLFGSKEFITRRIYDTVQKAGNVGHVLNLGHGIKVGTPEENVAHFFEVAKGIRY

SEQ ID NO: 28013 - protein, 393 aa, Zea mays subsp. mays
  peptide (1)..(393): Ceres Seq. ID no. 13491108
  misc_feature (60)..(391): Pfam Name: URO-D Pfam Description: Uroporphyrinogen decarboxylase
  misc_feature (1)..(393): NCBI GI NO: 6014938 NR Description: Uroporphyrinogen decarboxylase
  misc_feature (64)..(393): NCBI GI NO: 2501646 NR Description: Uroporphyrinogen decarboxylase (UPD)
  misc_feature (62)..(393): NCBI GI NO: 2501647 NR Description: Uroporphyrinogen decarboxylase
  misc_feature (62)..(393): NCBI GI NO: 16975230 NR Description: Chain A
  misc_feature (62)..(393): NCBI GI NO: 15226690 NR Description: uroporphyrinogen decarboxylase (UPD), putative
  misc_feature (62)..(393): NCBI GI NO: 14334768 NR Description: putative uroporphyrinogen decarboxylase
  misc_feature (62)..(391): NCBI GI NO: 16332025 NR Description: uroporphyrinogen decarboxylase
  misc_feature (62)..(391): NCBI GI NO: 23041382 NR Description: hypothetical protein
  misc_feature (52)..(391): NCBI GI NO: 33240529 NR Description: Uroporphyrinogen decarboxylase
  misc_feature (52)..(389): NCBI GI NO: 17231401 NR Description: uroporphyrinogen decarboxylase
MATACPPLSLPSTSLFRGRSARAGPNAGSSRPSAAAPSERRSWRRPRPDGGRAAAGERNQREEVERPPVWLMRQAGRYMKSYQLLCERYPSFRERSENVDLVVEISLQPWKVFKPDGVILFSDILTPLPGMNIPFDIVKGKGPVIYDPLRTAAAVNEVREFVPEEWVPYVGQALNILRQEVKNEAAVLGFVGAPFTLASYCVEGGSSKNFTLIKKMAFSEPAILHNLLQKFTTSMANYIKYQADNGAQAVQIFDSWATELSPADFEEFSLPYLKQIVDSVRETHPDLPLILYASGSGGLLERLPLTGVDVVSLDWTVDMAEGRKRLGSNTAVQGNVDPGVLFGSKEFITRRIYDTVQKAGNVGHVLNLGHGIKVGTPEENVAHFFEVAKGIRY

SEQ ID NO: 28014 - protein, 322 aa, Zea mays subsp. mays
  peptide (1)..(322): Ceres Seq. ID no. 13491109
  misc_feature (1)..(320): Pfam Name: URO-D Pfam Description: Uroporphyrinogen decarboxylase
  misc_feature (1)..(322): NCBI GI NO: 6014938 NR Description: Uroporphyrinogen decarboxylase
  misc_feature (1)..(322): NCBI GI NO: 2501646 NR Description: Uroporphyrinogen decarboxylase (UPD)
  misc_feature (1)..(322): NCBI GI NO: 2501647 NR Description: Uroporphyrinogen decarboxylase
  misc_feature (1)..(322): NCBI GI NO: 16975230 NR Description: Chain A
  misc_feature (1)..(322): NCBI GI NO: 15226690 NR Description: uroporphyrinogen decarboxylase (UPD), putative
  misc_feature (1)..(322): NCBI GI NO: 14334768 NR Description: putative uroporphyrinogen decarboxylase
  misc_feature (1)..(320): NCBI GI NO: 16332025 NR Description: uroporphyrinogen decarboxylase
  misc_feature (1)..(320): NCBI GI NO: 23041382 NR Description: hypothetical protein
  misc_feature (1)..(320): NCBI GI NO: 33240529 NR Description: Uroporphyrinogen decarboxylase
  misc_feature (1)..(318): NCBI GI NO: 17231401 NR Description: uroporphyrinogen decarboxylase
MRQAGRYMKSYQLLCERYPSFRERSENVDLVVEISLQPWKVFKPDGVILFSDILTPLPGMNIPFDIVKGKGPVIYDPLRTAAAVNEVREFVPEEWVPYVGQALNILRQEVKNEAAVLGFVGAPFTLASYCVEGGSSKNFTLIKKMAFSEPAILHNLLQKFTTSMANYIKYQADNGAQAVQIFDSWATELSPADFEEFSLPYLKQIVDSVRETHPDLPLILYASGSGGLLERLPLTGVDVVSLDWTVDMAEGRKRLGSNTAVQGNVDPGVLFGSKEFITRRIYDTVQKAGNVGHVLNLGHGIKVGTPEENVAHFFEVAKGIRY

SEQ ID NO: 28015 - DNA, 1556 bp, Zea mays subsp. mays
  misc_feature (1)..(1556): Ceres Seq. ID no. 12409134
ctgattccttccgccttgtcagcgcagcgatccagacccacccgagccaacaacccatggccgccgcgacgccgcgtctcctgctcgcggtcgcgggcctcaccctcgccggtgctgcaggacccggcggagctcctgcgccttgccaaggagccggccttcgcggactggatggtcggggtgcggcggcggatccacgagaacccggagctgggatacgaggagttccagaccagcgagctcgtgcgccgggagctccacgccatggggatcccctacaggcaccccttcgccgtcaccggcgtggtagcaacagtcggcaccggcgggtccgcccttcgttgctctgcgggcggacatggacgcgctgcccttgcaggaaagtgtggagtgggaacacaagagcaaagtccctgggaagatgcatggatgtggacatgatgcacatgttgctatgctgttgggatctgctaagattcttcaggagcatcgtgatgagttgaagggtacagtagttcttgtcttccaaccagctgaggaaggtggcggtggggccaagaaaatgatagaagacagagctgtggaaaacatagatgccatttttgggcttcatatagctgactctgtgcctattggtgtgctggcatccaggccagggcctattatggctgggagtggattctttgaggccgtaataagtggaaagggaggacatgctgcacttcctcatcacactatagatccgatattggctgcctcaaatgttattgtgagccttcagcaacttgtttctcgagaagctgatcccttggactcacaggttgtgacagttggaaagtttcaaggaggtggagccttcaatgtgatccctgattcggtaactataggtggcaccttccgagcctttctgaaagagagttttaatcaattgaagcagcggattgaagaggtgattgtgtctcaagctagcgtgcagcgctgcagcgctgccgtggacttcctcagcaaggaccgtcctttcttcccgccgaccatcaacagccccgagctccacgacttcttcgtgaacgtggccggcgagatggtcggctcgaggaacgtgagggacaggcagccgctgatgggcgccgaggacttcgcgttctacgccgaggcggtcccttccacctactactacttcgtgggcatgtacaacgagacgcgcgggccgcaggcgccccaccactccccctacttcaccatcaacgaagacgcccttccctacggcgcggccgggcaggcggcgctggcagctcgctacctactcgagcgtcagcagcctgctgccgccaccgctgataaggcagaaacccatgatgagctgtagatagtacatgatgtttgcgtccctgtccctgtgttgatggaattagattgagcaataatttcttcgccaagtttattcagcggctgtacatatcctggtatctccatgctttggtaatgatcggttgggatcagtcagcaaatagtctgagaaacatgctttagtctgagaaacatgattccatcccttg

SEQ ID NO: 28016 - protein, 335 aa, Zea mays subsp. mays
  peptide (1)..(335): Ceres Seq. ID no. 12409135
  misc_feature (1)..(316): Pfam Name: Pfam Description:  Peptidase family M20/M25/M40
  misc_feature (1)..(335): NCBI GI NO: 34914096 NR Description: putative IAA-Ala hydrolase
  misc_feature (1)..(335): NCBI GI NO: 27948556 NR Description: IAA-amino acid hydrolase
  misc_feature (1)..(335): NCBI GI NO: 15218027 NR Description: IAA-Ala hydrolase (IAR3); protein id: At1g51760
  misc_feature (1)..(335): NCBI GI NO: 2181184 NR Description: JR3 protein [Arabidopsis thaliana]
  misc_feature (1)..(317): NCBI GI NO: 15218029 NR Description: auxin conjugate hydrolase
  misc_feature (1)..(335): NCBI GI NO: 34910396 NR Description: putative IAA-Ala hydrolase
  misc_feature (1)..(335): NCBI GI NO: 902791 NR Description: ILL2
  misc_feature (1)..(335): NCBI GI NO: 15241894 NR Description: IAA-amino acid hydrolase (gb|AAC04866
  misc_feature (1)..(335): NCBI GI NO: 18175667 NR Description: IAA-amino acid hydrolase [Arabidopsis thaliana]
  misc_feature (1)..(335): NCBI GI NO: 15241892 NR Description: IAA-amino acid hydrolase homolog 1 precursor
MDALPLQESVEWEHKSKVPGKMHGCGHDAHVAMLLGSAKILQEHRDELKGTVVLVFQPAEEGGGGAKKMIEDRAVENIDAIFGLHIADSVPIGVLASRPGPIMAGSGFFEAVISGKGGHAALPHHTIDPILAASNVIVSLQQLVSREADPLDSQVVTVGKFQGGGAFNVIPDSVTIGGTFRAFLKESFNQLKQRIEEVIVSQASVQRCSAAVDFLSKDRPFFPPTINSPELHDFFVNVAGEMVGSRNVRDRQPLMGAEDFAFYAEAVPSTYYYFVGMYNETRGPQAPHHSPYFTINEDALPYGAAGQAALAARYLLERQQPAAATADKAETHDEL

SEQ ID NO: 28017 - protein, 314 aa, Zea mays subsp. mays
  peptide (1)..(314): Ceres Seq. ID no. 12409136
  misc_feature (1)..(295): Pfam Name: Pfam Description:  Peptidase family M20/M25/M40
  misc_feature (1)..(314): NCBI GI NO: 34914096 NR Description: putative IAA-Ala hydrolase
  misc_feature (1)..(314): NCBI GI NO: 27948556 NR Description: IAA-amino acid hydrolase
  misc_feature (1)..(314): NCBI GI NO: 15218027 NR Description: IAA-Ala hydrolase (IAR3); protein id: At1g51760
  misc_feature (1)..(314): NCBI GI NO: 2181184 NR Description: JR3 protein [Arabidopsis thaliana]
  misc_feature (1)..(296): NCBI GI NO: 15218029 NR Description: auxin conjugate hydrolase
  misc_feature (1)..(314): NCBI GI NO: 34910396 NR Description: putative IAA-Ala hydrolase
  misc_feature (1)..(314): NCBI GI NO: 902791 NR Description: ILL2
  misc_feature (1)..(314): NCBI GI NO: 15241894 NR Description: IAA-amino acid hydrolase (gb|AAC04866
  misc_feature (1)..(314): NCBI GI NO: 18175667 NR Description: IAA-amino acid hydrolase [Arabidopsis thaliana]
  misc_feature (1)..(314): NCBI GI NO: 15241892 NR Description: IAA-amino acid hydrolase homolog 1 precursor
MHGCGHDAHVAMLLGSAKILQEHRDELKGTVVLVFQPAEEGGGGAKKMIEDRAVENIDAIFGLHIADSVPIGVLASRPGPIMAGSGFFEAVISGKGGHAALPHHTIDPILAASNVIVSLQQLVSREADPLDSQVVTVGKFQGGGAFNVIPDSVTIGGTFRAFLKESFNQLKQRIEEVIVSQASVQRCSAAVDFLSKDRPFFPPTINSPELHDFFVNVAGEMVGSRNVRDRQPLMGAEDFAFYAEAVPSTYYYFVGMYNETRGPQAPHHSPYFTINEDALPYGAAGQAALAARYLLERQQPAAATADKAETHDEL

SEQ ID NO: 28018 - protein, 303 aa, Zea mays subsp. mays
  peptide (1)..(303): Ceres Seq. ID no. 12409137
  misc_feature (1)..(284): Pfam Name: Pfam Description:  Peptidase family M20/M25/M40
  misc_feature (1)..(303): NCBI GI NO: 34914096 NR Description: putative IAA-Ala hydrolase
  misc_feature (1)..(303): NCBI GI NO: 27948556 NR Description: IAA-amino acid hydrolase
  misc_feature (1)..(303): NCBI GI NO: 15218027 NR Description: IAA-Ala hydrolase (IAR3); protein id: At1g51760
  misc_feature (1)..(303): NCBI GI NO: 2181184 NR Description: JR3 protein [Arabidopsis thaliana]
  misc_feature (1)..(285): NCBI GI NO: 15218029 NR Description: auxin conjugate hydrolase
  misc_feature (1)..(303): NCBI GI NO: 34910396 NR Description: putative IAA-Ala hydrolase
  misc_feature (1)..(303): NCBI GI NO: 902791 NR Description: ILL2
  misc_feature (1)..(303): NCBI GI NO: 15241894 NR Description: IAA-amino acid hydrolase (gb|AAC04866
  misc_feature (1)..(303): NCBI GI NO: 18175667 NR Description: IAA-amino acid hydrolase [Arabidopsis thaliana]
  misc_feature (1)..(303): NCBI GI NO: 15241892 NR Description: IAA-amino acid hydrolase homolog 1 precursor
MLLGSAKILQEHRDELKGTVVLVFQPAEEGGGGAKKMIEDRAVENIDAIFGLHIADSVPIGVLASRPGPIMAGSGFFEAVISGKGGHAALPHHTIDPILAASNVIVSLQQLVSREADPLDSQVVTVGKFQGGGAFNVIPDSVTIGGTFRAFLKESFNQLKQRIEEVIVSQASVQRCSAAVDFLSKDRPFFPPTINSPELHDFFVNVAGEMVGSRNVRDRQPLMGAEDFAFYAEAVPSTYYYFVGMYNETRGPQAPHHSPYFTINEDALPYGAAGQAALAARYLLERQQPAAATADKAETHDEL

SEQ ID NO: 28019 - DNA, 1078 bp, Zea mays subsp. mays
  misc_feature (1)..(1078): Ceres Seq. ID no. 12577742
agttcgccactctcgccatcggggacgagggactgggagccaggatacttctgccgcgcggcgaccggtcgagcgaaatcgatctaccccaggtgcggcgggcgcggctttattctcaagattttttctgtgttctttagagagcagccatggacgagtggattcgccaaaccgaggtgtgggtgcaccaaaccgacagctggatccggcagcagcccccggagcagatctatgtagcggccgcggtggttgccgtcacaatcctgttgcttatcgtagcatcttgtctgaaatcgtctagaccaaacaccatagttctatctgggcttagtggcagtggcaaaaccactatttactaccagcttcgggatggatcatcacatcaaggaactgttacttcaatggaagaaaacagtgatacttttgtgctgcattcggagcaagaaaggaaagacaaagtaaaacctgtgcatattattgatgttcctggtcatgctaggctcaaacccaaacttgatgaagtcctgcctaaagctgctgcggttgtctttgttgttgatgctcaagatttcttgtctagcatgcaagctgctgcagagtacctttatgacattctgacaaaggcaactgtagtgaagaaaaaggtccctgtgcttatattctgcaacaagacagataaagttaccgcccactcgaaggaattcatcaagaagcagttggagaaagaattgaacaagcttagggaatctaggaacgccgtatcgtcagccgacatctctgatgaagtccagcttggggtccctggagaggcattcaacttcagccagtgccagaacaaggtggctgttgcggagggtgctggtttgacaggtgatgtttcggccgtggaacaattcatccgtgaacatgtgaaggcataggttgttcttattgtttttggggctccaaatggctatcctgatgagataagatgtacattgcgtcaatgtggttgttacctttcatgcatgtacaccttcatccggtgctctgaagttgcttagagacagtgaagcacagtcatattttgaactggttc

SEQ ID NO: 28020 - protein, 256 aa, Zea mays subsp. mays
  peptide (1)..(256): Ceres Seq. ID no. 12577743
  misc_feature (49)..(223): Pfam Name: Pfam Description:  ADP-ribosylation factor family
  misc_feature (9)..(255): NCBI GI NO: 15239201 NR Description: signal recognition particle receptor beta subunit-like protein
  misc_feature (9)..(255): NCBI GI NO: 15224229 NR Description: putative signal recognition particle receptor beta subunit
  misc_feature (19)..(235): NCBI GI NO: 32450191 NR Description: Unknown (protein for MGC:64420) [Xenopus laevis]
  misc_feature (19)..(250): NCBI GI NO: 6678137 NR Description: signal recognition particle receptor, B subunit
  misc_feature (19)..(250): NCBI GI NO: 12842535 NR Description: unnamed protein product [Mus musculus]
  misc_feature (19)..(247): NCBI GI NO: 27721301 NR Description: similar to signal recognition particle receptor
  misc_feature (19)..(235): NCBI GI NO: 38174090 NR Description: Unknown (protein for MGC:75930)
  misc_feature (19)..(247): NCBI GI NO: 31340540 NR Description: Signal recognition particle receptor beta subunit
  misc_feature (19)..(247): NCBI GI NO: 38649415 NR Description: Signal recognition particle receptor, beta subunit
  misc_feature (19)..(247): NCBI GI NO: 14042265 NR Description: unnamed protein product [Homo sapiens]
MDEWIRQTEVWVHQTDSWIRQQPPEQIYVAAAVVAVTILLLIVASCLKSSRPNTIVLSGLSGSGKTTIYYQLRDGSSHQGTVTSMEENSDTFVLHSEQERKDKVKPVHIIDVPGHARLKPKLDEVLPKAAAVVFVVDAQDFLSSMQAAAEYLYDILTKATVVKKKVPVLIFCNKTDKVTAHSKEFIKKQLEKELNKLRESRNAVSSADISDEVQLGVPGEAFNFSQCQNKVAVAEGAGLTGDVSAVEQFIREHVKA

SEQ ID NO: 28021 - protein, 172 aa, Zea mays subsp. mays
  peptide (1)..(172): Ceres Seq. ID no. 12577744
  misc_feature (1)..(139): Pfam Name: Pfam Description:  ADP-ribosylation factor family
  misc_feature (1)..(171): NCBI GI NO: 15239201 NR Description: signal recognition particle receptor beta subunit-like protein
  misc_feature (1)..(171): NCBI GI NO: 15224229 NR Description: putative signal recognition particle receptor beta subunit
  misc_feature (1)..(151): NCBI GI NO: 32450191 NR Description: Unknown (protein for MGC:64420) [Xenopus laevis]
  misc_feature (1)..(166): NCBI GI NO: 6678137 NR Description: signal recognition particle receptor, B subunit
  misc_feature (1)..(166): NCBI GI NO: 12842535 NR Description: unnamed protein product [Mus musculus]
  misc_feature (1)..(163): NCBI GI NO: 27721301 NR Description: similar to signal recognition particle receptor
  misc_feature (1)..(151): NCBI GI NO: 38174090 NR Description: Unknown (protein for MGC:75930)
  misc_feature (1)..(163): NCBI GI NO: 31340540 NR Description: Signal recognition particle receptor beta subunit
  misc_feature (1)..(163): NCBI GI NO: 38649415 NR Description: Signal recognition particle receptor, beta subunit
  misc_feature (1)..(163): NCBI GI NO: 14042265 NR Description: unnamed protein product [Homo sapiens]
MEENSDTFVLHSEQERKDKVKPVHIIDVPGHARLKPKLDEVLPKAAAVVFVVDAQDFLSSMQAAAEYLYDILTKATVVKKKVPVLIFCNKTDKVTAHSKEFIKKQLEKELNKLRESRNAVSSADISDEVQLGVPGEAFNFSQCQNKVAVAEGAGLTGDVSAVEQFIREHVKA

SEQ ID NO: 28022 - DNA, 1103 bp, Zea mays subsp. mays
  misc_feature (1)..(1103): Ceres Seq. ID no. 13498465
aaggactcagtccacactccacagggaaggagggagcaggagaggtaggtagccaagaagatcggttccagcggcaggcgcgagcgaggcgtgaccgatggcggccgcgtcgctctgagccgggcgcggtggctcctggtggagcacccggccgtgccctcgttccgctggcagccaggccgcacggtcggcgcgacgccgtccttcgcggccgccgtcatctgcggctacctcgccgcggtgctcgtcctccgccgcctcgtcctgccccgcctcccggcgctgcctccgccggcgctccgcgcgctctccgccgcccacaacgcggtcctgctggcgctctccgccgccatggccggcgggtgcgcgctgtcgacggccgcgacggcgccggcgccgcggtgggcgtgggccttctgcttcccgccgcggggcgccacggaggcgtcggggcccgtcttcttctgggcgcacgtgttctacctctccaaggtgtacgagctcggcgacacgctgctcatcctgctcgcccgccgcccgctcacgctgctccacgtgtaccaccacgcgctcgtcgtggccatgtgctacctctggctcgccacccggcagtcgctgatgcccgtcgcgctcgtcaccaacgccggcgtgcacgtcgtgatgtactcctactacctctcctgcagcgtcggcctgcgctggcccgggcggtggaagcgcgccgtcacggagctgcagatcgcgcagttcctcttcagcttcgcggcctccgtggtgatgctgtggctccacttcgccgctggcggctgcgaggggatggccggctgggtgttcaacgccgtcttcaacgcgtcgctgctcgcgctcttcctcaacttccacggcgccgcctacaaaggcgccgccaaggccaacaagggtaaagcggaatgacgcggccgacaagctttaatttgccggcaaccaaaatcctcgtgagatttaattgggaccaattgtttaatgttgcttcttcgccaaattattactgatacgaagtctgtctgaaataattgttcgaaaaagaatggcatcgatcgcccttgaattatgggtgaattttc

SEQ ID NO: 28023 - protein, 306 aa, Zea mays subsp. mays
  peptide (1)..(306): Ceres Seq. ID no. 13498466
GLSPHSTGKEGAGEVGSQEDRFQRQARARRDRWRPRRSEPGAVAPGGAPGRALVPLAARPHGRRDAVLRGRRHLRLPRRGARPPPPRPAPPPGAASAGAPRALRRPQRGPAGALRRHGRRVRAVDGRDGAGAAVGVGLLLPAAGRHGGVGARLLLGARVLPLQGVRARRHAAHPARPPPAHAAPRVPPRARRGHVLPLARHPAVADARRARHQRRRARRDVLLLPLLQRRPALARAVEARRHGAADRAVPLQLRGLRGDAVAPLRRWRLRGDGRLGVQRRLQRVAARALPQLPRRRLQRRRQGQQG

SEQ ID NO: 28024 - protein, 193 aa, Zea mays subsp. mays
  peptide (1)..(193): Ceres Seq. ID no. 13498467
  misc_feature (1)..(193): Pfam Name: Pfam Description:  GNS1/SUR4 family
  misc_feature (1)..(193): NCBI GI NO: 19033556 NR Description: putative long chain fatty acid elongation enzyme
  misc_feature (1)..(191): NCBI GI NO: 15230729 NR Description: expressed protein [Arabidopsis thaliana]
  misc_feature (1)..(182): NCBI GI NO: 15230725 NR Description: expressed protein [Arabidopsis thaliana]
  misc_feature (1)..(188): NCBI GI NO: 15222085 NR Description: hypothetical protein [Arabidopsis thaliana]
  misc_feature (1)..(177): NCBI GI NO: 15234538 NR Description: expressed protein [Arabidopsis thaliana]
  misc_feature (1)..(193): NCBI GI NO: 19569971 NR Description: Hypothetical 36
  misc_feature (1)..(181): NCBI GI NO: 28828933 NR Description: similar to GNS1/SUR4 family protein
  misc_feature (1)..(193): NCBI GI NO: 40740549 NR Description: hypothetical protein AN8117.2
  misc_feature (1)..(185): NCBI GI NO: 40739267 NR Description: hypothetical protein AN6435.2
  misc_feature (1)..(189): NCBI GI NO: 8050874 NR Description: long chain fatty acid elongation enzyme
MAGGCALSTAATAPAPRWAWAFCFPPRGATEASGPVFFWAHVFYLSKVYELGDTLLILLARRPLTLLHVYHHALVVAMCYLWLATRQSLMPVALVTNAGVHVVMYSYYLSCSVGLRWPGRWKRAVTELQIAQFLFSFAASVVMLWLHFAAGGCEGMAGWVFNAVFNASLLALFLNFHGAAYKGAAKANKGKAE

SEQ ID NO: 28025 - DNA, 1768 bp, Zea mays subsp. mays
  misc_feature (1)..(1768): Ceres Seq. ID no. 12409131
atctcttgtgccagcacaatgatgctttgtcatatctagggagaagtgagtaaaagccatgagtgatgattatgcttctcttcttcttttccttcttaatgacgtactgccagtacgtacgtgctgttgtcagggaactgtatccgaattccaaattttgaacatgatttagcaagacagacagagagaaagagaatagttgactagttgtaaacttgtaatgtatggatcatgcctttcattcgatggctactgatcttgcttcgagcgcagtctgccgcggacctggcctgggagatagccgtcctggaggagcaagtcgtccgcaaggagctgcacctgctgtccctgtacagagccgcgttcgaccagtacctcggcgtctcccctcgcgcgtctgctcaggaaccgcgccatgagcgcagcagcagaagggctactgctgctgacgacgaaggcgcccttcgcctgaggagcatcaaggagtctgcgtcctacagcctaccaacgctctccgattctaaacgcgtagagctctccaggtgctcctcagggcggtccagcctggccaacttcctgagcgcctcgatcgctgagtacgtgcctaagatctcgtgcaagctctcggaggacatactgcggtgcgtctccgccgtctactgcaagctcgcgagcaggccgctgtcgcaggaggaggaggaggcgaggtccgagacgccgccgttcacgccttctctctcggtctcgtccgcgtcgagctccttctccctcaagaagcagcaccccgtccgtggctggagccctcggtgctactacaacgccgacgcgactgcgaccccggacgcgtacgcttcgtccggcgggagcagtgggcggtacagtggggtgatggttttcccagggatacatgtagacgaggagaagtttgagtatgcctgcaaaatcctggacactatcagatcgctgatcaaacggctggagaagattgatcctagaaagatggcacatgaagagcagctctgtttctgggtcaacatccacaatgccttggttatgcatgctttcatggcctatggattacaggaaaaacggatgaaaagcactgacttgattctgaaggctgcatacaatgtgggtgggcattcagtgaactcccaaactatccagaactcgattctaggatgccagtcccaccgcccttcactgtgggttcggacactatttacgccgacgaaaaaatctgggagctccatacatccatatgcgcttcagtacgcagagccaattgcgcactttgcgctctcgaccggcgcgttttcagacccacctgtgaggctgtacacagccaagaaactgtaccatcagctggagcaagccagggccgagttcatccaagcaaatgtcatggtccggaggcagaccatcttcctgcccaaggttctccacttctatgcgaaggatgcttccctggagctacctgaccttgttgacatagtgtgcgagagcatgcctgagctgcagcgaaaagagatcaggcagtatcttaggaggaggatcgacaagtgtgttcagtggttgccctacaagtcttctttcaggtacactgtgcatagcagtttggctgagtaggcacttttttttcttctctatgtgcttgtaaataaggagccatgattctaagaacagtcgtctgttggggtgtgtgtgtgtatgtaaaactatattgtgacagttctttctttcttagaggaaaattacagcttatctc

SEQ ID NO: 28026 - protein, 465 aa, Zea mays subsp. mays
  peptide (1)..(465): Ceres Seq. ID no. 12409132
  misc_feature (243)..(387): Pfam Name: Pfam Description:  Protein of unknown function, DUF547
  misc_feature (13)..(465): NCBI GI NO: 34905078 NR Description: P0686C03.22
  misc_feature (111)..(459): NCBI GI NO: 15240016 NR Description: putative protein; protein id: At5g66600.1
  misc_feature (16)..(103): NCBI GI NO: 15240016 NR Description: putative protein; protein id: At5g66600.1
  misc_feature (190)..(459): NCBI GI NO: 18394945 NR Description: unknown protein; protein id: At1g21060.1
  misc_feature (190)..(459): NCBI GI NO: 25372915 NR Description: T22I11.12 protein - Arabidopsis thaliana
  misc_feature (14)..(187): NCBI GI NO: 18394945 NR Description: unknown protein; protein id: At1g21060.1
  misc_feature (14)..(187): NCBI GI NO: 25372915 NR Description: T22I11.12 protein - Arabidopsis thaliana
  misc_feature (9)..(463): NCBI GI NO: 18411161 NR Description: expressed protein; protein id: At1g76620
  misc_feature (66)..(464): NCBI GI NO: 40539066 NR Description: hypothetical protein
  misc_feature (118)..(463): NCBI GI NO: 7486263 NR Description: hypothetical protein At2g23700
MPFIRWLLILLRAQSAADLAWEIAVLEEQVVRKELHLLSLYRAAFDQYLGVSPRASAQEPRHERSSRRATAADDEGALRLRSIKESASYSLPTLSDSKRVELSRCSSGRSSLANFLSASIAEYVPKISCKLSEDILRCVSAVYCKLASRPLSQEEEEARSETPPFTPSLSVSSASSSFSLKKQHPVRGWSPRCYYNADATATPDAYASSGGSSGRYSGVMVFPGIHVDEEKFEYACKILDTIRSLIKRLEKIDPRKMAHEEQLCFWVNIHNALVMHAFMAYGLQEKRMKSTDLILKAAYNVGGHSVNSQTIQNSILGCQSHRPSLWVRTLFTPTKKSGSSIHPYALQYAEPIAHFALSTGAFSDPPVRLYTAKKLYHQLEQARAEFIQANVMVRRQTIFLPKVLHFYAKDASLELPDLVDIVCESMPELQRKEIRQYLRRRIDKCVQWLPYKSSFRYTVHSSLAE

SEQ ID NO: 28027 - protein, 246 aa, Zea mays subsp. mays
  peptide (1)..(246): Ceres Seq. ID no. 12409133
  misc_feature (24)..(168): Pfam Name: Pfam Description:  Protein of unknown function, DUF547
  misc_feature (1)..(246): NCBI GI NO: 34905078 NR Description: P0686C03.22
  misc_feature (1)..(240): NCBI GI NO: 15240016 NR Description: putative protein; protein id: At5g66600.1
  misc_feature (1)..(240): NCBI GI NO: 18394945 NR Description: unknown protein; protein id: At1g21060.1
  misc_feature (1)..(240): NCBI GI NO: 25372915 NR Description: T22I11.12 protein - Arabidopsis thaliana
  misc_feature (1)..(244): NCBI GI NO: 18411161 NR Description: expressed protein; protein id: At1g76620
  misc_feature (1)..(245): NCBI GI NO: 40539066 NR Description: hypothetical protein
  misc_feature (1)..(244): NCBI GI NO: 7486263 NR Description: hypothetical protein At2g23700
  misc_feature (1)..(244): NCBI GI NO: 15224054 NR Description: unknown protein; protein id: At2g23700.1
  misc_feature (1)..(244): NCBI GI NO: 39104579 NR Description: unknown protein [Arabidopsis thaliana]
  misc_feature (1)..(244): NCBI GI NO: 28916180 NR Description: putative ternary complex factor MIP1
MVFPGIHVDEEKFEYACKILDTIRSLIKRLEKIDPRKMAHEEQLCFWVNIHNALVMHAFMAYGLQEKRMKSTDLILKAAYNVGGHSVNSQTIQNSILGCQSHRPSLWVRTLFTPTKKSGSSIHPYALQYAEPIAHFALSTGAFSDPPVRLYTAKKLYHQLEQARAEFIQANVMVRRQTIFLPKVLHFYAKDASLELPDLVDIVCESMPELQRKEIRQYLRRRIDKCVQWLPYKSSFRYTVHSSLAE

SEQ ID NO: 28028 - DNA, 1411 bp, Zea mays subsp. mays
  misc_feature (1)..(1411): Ceres Seq. ID no. 12409129
cccgctgctgcctgctctcctccccgaaggccgaatccgatagctagcggctagcgccaacaaaacccctctctccgcgcccgctccccaccggtgacagcgcgcccatggctgccttactccgaacggccgcggccctcgcgcccccgccctcgtcgtccctgtccgcacgggagccgcgtgggcggtgcctgcggctagcctgctcccggcgcgcgccggcccgacagcttcgggcgtggctactgccgactccgcacgtcttcggtcgttctgggggccggttccggcgcctgagcgtcaccgaggccgaggaggccgcgcagacggcgacgcaggaggatccagaaaccgaagttactggagagagtgctgcagatgacagtgctggaagcacagacgaaactccatcatttattgtgacaacactgcaatcatacagagaagctctgattaatgatgatgaagcaaaagctgctgagatagaatcctttttactttctatcgaggatgagaagaactctcttttgagcaaaatcactgctctagatgtggaactagcaactcaacgagaacgtatcttgcggattagtgctgattttgacaatttcaggaaaaggacagaaaatgagaagcttaacatgatggaaaatgtgcaaggggaacttatagagagctttttgcctgttctcgataactttgaaagagcaaaaatgcaaataaaggtggaaacagagggagaggagaaaataaataatagctaccagagcattaataagcaatttatcgagattcttaattcattgagtgttgaagatgttgaaactgttggcaaaccatttgatcctatgctgcacgaggctattatgagagaagaatcatcggagtatgaagagggaatcatactccaggaattccgaaaaggcttcaaacttggggaaagactacttcgcccagcaatggtcaaggtgtctgcagggccaggccctgaaaattctggagatgatgaccctacagttgttgaagatagtgtggcacctcaaaaggttgaggatgttgaagaagacggttttgatgacggcgatgcagaataggtggctggagcttcagctgtgaatcaacaagaacaagtccagaaattttgatgcttttctggagcgtgccaagcaggtaataggattagtaccaattcgttcaagctagagttaggtccccaaatgtgctggttctttactgctgctgacatgggggtgttggtattgcgacaaatttgtgtttctacccgccgtggtcaactttttgttcttacgaaggggaattttcgtggttcatagatgcaaaaatgatatttgtaaggactaaattggctcagtttgctattgataatcaatatatgaattccattgtttgt

SEQ ID NO: 28029 - protein, 328 aa, Zea mays subsp. mays
  peptide (1)..(328): Ceres Seq. ID no. 12409130
  misc_feature (130)..(290): Pfam Name: Pfam Description:  GrpE
  misc_feature (26)..(295): NCBI GI NO: 30686476 NR Description: chloroplast GrpE protein [Arabidopsis thaliana]
  misc_feature (26)..(295): NCBI GI NO: 18418410 NR Description: chloroplast GrpE protein; protein id: At5g17710
  misc_feature (91)..(292): NCBI GI NO: 18400095 NR Description: putative heat shock protein; protein id:At1g36390
  misc_feature (104)..(292): NCBI GI NO: 21593629 NR Description: putative heat shock protein [Arabidopsis thaliana]
  misc_feature (89)..(300): NCBI GI NO: 15384277 NR Description: co-chaperone CGE1 precursor isoform a
  misc_feature (88)..(308): NCBI GI NO: 32488078 NR Description: OSJNBa0084A10.6
  misc_feature (90)..(300): NCBI GI NO: 15384279 NR Description: co-chaperone CGE1 precursor isoform b
  misc_feature (59)..(303): NCBI GI NO: 22298857 NR Description: heat shock protein
  misc_feature (110)..(289): NCBI GI NO: 37523763 NR Description: heat shock protein [Gloeobacter violaceus]
  misc_feature (77)..(315): NCBI GI NO: 33239468 NR Description: Molecular chaperone GrpE, heat shock protein
MAALLRTAAALAPPPSSSLSAREPRGRCLRLACSRRAPARQLRAWLLPTPHVFGRSGGRFRRLSVTEAEEAAQTATQEDPETEVTGESAADDSAGSTDETPSFIVTTLQSYREALINDDEAKAAEIESFLLSIEDEKNSLLSKITALDVELATQRERILRISADFDNFRKRTENEKLNMMENVQGELIESFLPVLDNFERAKMQIKVETEGEEKINNSYQSINKQFIEILNSLSVEDVETVGKPFDPMLHEAIMREESSEYEEGIILQEFRKGFKLGERLLRPAMVKVSAGPGPENSGDDDPTVVEDSVAPQKVEDVEEDGFDDGDAE

SEQ ID NO: 28030 - DNA, 764 bp, Zea mays subsp. mays
  misc_feature (1)..(764): Ceres Seq. ID no. 12403432
gacaagcaagaacagctgtcgatccaattgtcacttgctctccctccaacaagctaattaaggccggtcatccctcttctagctcgtttcattatccatggcggaggagaagcaccaccaccaccacctgttccaccacaagaaggacgaggagcaggaggagcagctcgccggcggcgggtacggcgagtccgccgagtacacggaggccacggtgacggaggtcgtgtccacgggcgagaacgagtacgacgagtacaagaaggaggagaagcagcacaagcacaagcagcacctcggcgaggccggcgccatcgccgccggcgccttcgcactctacgagaagcacgaggcaaagaaggacccggagcacgcgcaccgccacaagatcgaggaggaggtcgcggcggcggcggccgtcggctccggcggcttcgccttccacgagcaccacgagaagaagaaggaccacaaggacgccgaggaggccggcggcgagaagaagcaccacttcttcggctgattgatcctcccgtatcgtcgtccctccccgtgtgctacgcgtgcgtgtgtgagagtgatatcgagcgcccgccgtgttgtgcgcgcgtacgtatgtatgcgctcgtgtgatgcacgaataagcgtggctacgtaatctatcgtatgtatacgtgtgtgtatgcatgtgcttgtgtatgatcgtggtacgaggaccgaaaaaatgtatgcaactctgatttacttacatgtttagttgtttc

SEQ ID NO: 28031 - protein, 141 aa, Zea mays subsp. mays
  peptide (1)..(141): Ceres Seq. ID no. 12403433
  misc_feature (54)..(107): Pfam Name: Pfam Description:  ABA/WDS induced protein
  misc_feature (1)..(141): NCBI GI NO: 15667623 NR Description: drought inducible 22 kD protein
  misc_feature (1)..(141): NCBI GI NO: 7489448 NR Description: abscisic acid- and stress-induced protein - rice
  misc_feature (1)..(141): NCBI GI NO: 6525055 NR Description: anth [Lilium longiflorum]
  misc_feature (1)..(140): NCBI GI NO: 7484607 NR Description: ABA stress ripening protein - common ice plant
  misc_feature (26)..(140): NCBI GI NO: 16588758 NR Description: abscisic stress ripening-like protein
  misc_feature (26)..(140): NCBI GI NO: 2677824 NR Description: abscisic stress ripening protein homolog
  misc_feature (1)..(140): NCBI GI NO: 7484489 NR Description: abscisic acid
  misc_feature (26)..(138): NCBI GI NO: 38532363 NR Description: abscisic acid and water deficit stress inducibleprotein
  misc_feature (1)..(140): NCBI GI NO: 14582465 NR Description: putative transcription factor [Vitis vinifera]
  misc_feature (1)..(140): NCBI GI NO: 7484497 NR Description: water-stress-inducible protein LP3 - loblolly pine
MAEEKHHHHHLFHHKKDEEQEEQLAGGGYGESAEYTEATVTEVVSTGENEYDEYKKEEKQHKHKQHLGEAGAIAAGAFALYEKHEAKKDPEHAHRHKIEEEVAAAAAVGSGGFAFHEHHEKKKDHKDAEEAGGEKKHHFFG

SEQ ID NO: 28032 - protein, 71 aa, Zea mays subsp. mays
  peptide (1)..(71): Ceres Seq. ID no. 12403434
  misc_feature (11)..(71): NCBI GI NO: 28574039 NR Description: Salivary gland secretion 1 CG3047-PA
  misc_feature (34)..(71): NCBI GI NO: 28972153 NR Description: mKIAA0324 protein [Mus musculus]
  misc_feature (34)..(71): NCBI GI NO: 5821151 NR Description: RNA binding protein [Homo sapiens]
  misc_feature (34)..(71): NCBI GI NO: 6634015 NR Description: KIAA0324 protein [Homo sapiens]
  misc_feature (34)..(71): NCBI GI NO: 7512967 NR Description: hypothetical protein KIAA0324 - human (fragment)
  misc_feature (34)..(71): NCBI GI NO: 19923466 NR Description: splicing coactivator subunit SRm300
  misc_feature (36)..(71): NCBI GI NO: 134466 NR Description: SALIVARY GLUE PROTEIN SGS-3 PRECURSOR
  misc_feature (34)..(71): NCBI GI NO: 5821151 NR Description: RNA binding protein [Homo sapiens]
  misc_feature (34)..(71): NCBI GI NO: 5821151 NR Description: RNA binding protein [Homo sapiens]
  misc_feature (34)..(71): NCBI GI NO: 6634015 NR Description: KIAA0324 protein [Homo sapiens]
QARTAVDPIVTCSPSNKLIKAGHPSSSSFHYPWRRRSTTTTTCSTTRRTRSRRSSSPAAGTASPPSTRRPR

SEQ ID NO: 28033 - DNA, 1770 bp, Zea mays subsp. mays
  misc_feature (1)..(1770): Ceres Seq. ID no. 12410829
tctgttcccctttccctcctgcgcaccccgtcttctcctccccgcgtcaaaccccagcacaaaaagcaaccgcccgccgcctcctcgctcctctcccgaatcagccgtcgcggtgcctaatccggccgaccccccctccgatccgcgggtgcccgccgcagaggcggcgcctccgggcctcccccgatgtatagcaacttcaaggagcaggcgatcgagtacgtcaagcaggcagtccaggaggacaatgccggcaactacgtcaaggcgttccctctctacatgaacgcgctcgagtacttcaaaacccacctcaagtacgagaagaaccccaagatcaaggaggccatcaccgccaagttcaccgagtacctccgccgcgccgaggagatccgggcggtcctcgatgagggcggcgcagggcctggggccaacggtggcgacgcagctgtcgccacgcgccccaagacccaagggcaaggatggggacggaggcaacggaggggatgactccgagcagtccaagctgagggcggggctcaactccgccatcatcaccgagaagcccaacattaagtggaacgacgttgccggcctcgagagcgccaagcaggcactgcaggaggccgttatattgcccgtcaagttcccgcagttcttcacgggcaagcggaggccttggagggcgtttcttttgtatggccccccaggaacaggaaagtcttatttggcaaaagctgttgcaaccgaggctgattcaacatttttcagtatatcttcttcagatctggtttcaaagtggatgggtgaaagtgagaaattagttgcaaatctgttccaaatggctcgggaaaatgccccttccattatcttcattgatgaaattgattctttatgcggtcaacgtggagaaggcaatgaaagtgaagcatctaggagaattaagactgaacttcttgtgcaaatgcagggtgttggtcacaatgatgataaagttcttgttcttgctgccacgaatacgccatatgctctggaccaggctgtgcggcgaagatttgacaagcgtatctacattccgctacctgacatgaaagcaaggcaacacatgtttaaggtccatctcggggatacaccgcacagtttaactgaaagtgatttcgagagcttggcccgtcggacagacgggttttctggttctgacgttgctgtctgcgttaaggacgtgttatttgaacccgtgcgcaaaacgcaggatgccatgttcttcttcaaggcggacggtgacatgtggatgccatgtggaccgaagcaaccgggcgccgtgcagaccaccatgcaggagcttgcatccaaaggcctcgctgcgaagattcttccgccccctatctcgagggcggacttcgagaaggtcctgtcgaggcagaggccgacggttagcaagaaggacctggaggtgcacgagaggttcacgaaggagttcggcgaggagggctgacagacgcgggcacccacccatgcacgggctgctgcaccacacaaatgtatattgcttcttatgacttggattgttctgcttggaagtggaagttgcgttacattacaatttggtgtcccaactacggctaatcatgccagctggtttctcgtgttgggctaccaatgggcctctgttgtcagcctatttcatttttattgttgcacatggaatttttccacgggtgtattattatggaataataattgttagcgtggtggagtccttgtggttgc

SEQ ID NO: 28034 - protein, 362 aa, Zea mays subsp. mays
  peptide (1)..(362): Ceres Seq. ID no. 12410830
  misc_feature (94)..(279): Pfam Name: AAA Pfam Description: ATPase family associated with various cellular activities
  misc_feature (20)..(362): NCBI GI NO: 15226199 NR Description: putative ATPase; protein id: At2g27600
  misc_feature (20)..(362): NCBI GI NO: 21593336 NR Description: putative ATPase [Arabidopsis thaliana]
  misc_feature (4)..(322): NCBI GI NO: 22652796 NR Description: AAA-ATPase-like protein
  misc_feature (29)..(358): NCBI GI NO: 34895696 NR Description: putative AAA-type ATPase
  misc_feature (73)..(362): NCBI GI NO: 16265863 NR Description: suppressor of K+ transport growth defect-like
  misc_feature (17)..(362): NCBI GI NO: 17865802 NR Description: vacuolar protein sorting factor 4B
  misc_feature (17)..(362): NCBI GI NO: 9087199 NR Description: SKD1 protein (Vacuolar sorting protein 4b)
  misc_feature (23)..(362): NCBI GI NO: 5712623 NR Description: SKD1 [Mus musculus]
  misc_feature (23)..(362): NCBI GI NO: 34878783 NR Description: similar to SKD1 [Rattus norvegicus]
  misc_feature (23)..(362): NCBI GI NO: 6677981 NR Description: suppressor of K+ transport defect 1 [Mus musculus]
MRAAQGLGPTVATQLSPRAPRPKGKDGDGGNGGDDSEQSKLRAGLNSAIITEKPNIKWNDVAGLESAKQALQEAVILPVKFPQFFTGKRRPWRAFLLYGPPGTGKSYLAKAVATEADSTFFSISSSDLVSKWMGESEKLVANLFQMARENAPSIIFIDEIDSLCGQRGEGNESEASRRIKTELLVQMQGVGHNDDKVLVLAATNTPYALDQAVRRRFDKRIYIPLPDMKARQHMFKVHLGDTPHSLTESDFESLARRTDGFSGSDVAVCVKDVLFEPVRKTQDAMFFFKADGDMWMPCGPKQPGAVQTTMQELASKGLAAKILPPPISRADFEKVLSRQRPTVSKKDLEVHERFTKEFGEEG

SEQ ID NO: 28035 - protein, 230 aa, Zea mays subsp. mays
  peptide (1)..(230): Ceres Seq. ID no. 12410831
  misc_feature (1)..(147): Pfam Name: AAA Pfam Description: ATPase family associated with various cellular activities
  misc_feature (1)..(230): NCBI GI NO: 15226199 NR Description: putative ATPase; protein id: At2g27600
  misc_feature (1)..(230): NCBI GI NO: 21593336 NR Description: putative ATPase [Arabidopsis thaliana]
  misc_feature (1)..(190): NCBI GI NO: 22652796 NR Description: AAA-ATPase-like protein
  misc_feature (1)..(226): NCBI GI NO: 34895696 NR Description: putative AAA-type ATPase
  misc_feature (1)..(230): NCBI GI NO: 16265863 NR Description: suppressor of K+ transport growth defect-like
  misc_feature (1)..(230): NCBI GI NO: 17865802 NR Description: vacuolar protein sorting factor 4B
  misc_feature (1)..(230): NCBI GI NO: 9087199 NR Description: SKD1 protein (Vacuolar sorting protein 4b)
  misc_feature (1)..(230): NCBI GI NO: 5712623 NR Description: SKD1 [Mus musculus]
  misc_feature (1)..(230): NCBI GI NO: 34878783 NR Description: similar to SKD1 [Rattus norvegicus]
  misc_feature (1)..(230): NCBI GI NO: 6677981 NR Description: suppressor of K+ transport defect 1 [Mus musculus]
MGESEKLVANLFQMARENAPSIIFIDEIDSLCGQRGEGNESEASRRIKTELLVQMQGVGHNDDKVLVLAATNTPYALDQAVRRRFDKRIYIPLPDMKARQHMFKVHLGDTPHSLTESDFESLARRTDGFSGSDVAVCVKDVLFEPVRKTQDAMFFFKADGDMWMPCGPKQPGAVQTTMQELASKGLAAKILPPPISRADFEKVLSRQRPTVSKKDLEVHERFTKEFGEEG

SEQ ID NO: 28036 - protein, 217 aa, Zea mays subsp. mays
  peptide (1)..(217): Ceres Seq. ID no. 12410832
  misc_feature (1)..(134): Pfam Name: AAA Pfam Description: ATPase family associated with various cellular activities
  misc_feature (1)..(217): NCBI GI NO: 15226199 NR Description: putative ATPase; protein id: At2g27600
  misc_feature (1)..(217): NCBI GI NO: 21593336 NR Description: putative ATPase [Arabidopsis thaliana]
  misc_feature (1)..(177): NCBI GI NO: 22652796 NR Description: AAA-ATPase-like protein
  misc_feature (1)..(213): NCBI GI NO: 34895696 NR Description: putative AAA-type ATPase
  misc_feature (1)..(217): NCBI GI NO: 16265863 NR Description: suppressor of K+ transport growth defect-like
  misc_feature (1)..(217): NCBI GI NO: 17865802 NR Description: vacuolar protein sorting factor 4B
  misc_feature (1)..(217): NCBI GI NO: 9087199 NR Description: SKD1 protein (Vacuolar sorting protein 4b)
  misc_feature (1)..(217): NCBI GI NO: 5712623 NR Description: SKD1 [Mus musculus]
  misc_feature (1)..(217): NCBI GI NO: 34878783 NR Description: similar to SKD1 [Rattus norvegicus]
  misc_feature (1)..(217): NCBI GI NO: 6677981 NR Description: suppressor of K+ transport defect 1 [Mus musculus]
MARENAPSIIFIDEIDSLCGQRGEGNESEASRRIKTELLVQMQGVGHNDDKVLVLAATNTPYALDQAVRRRFDKRIYIPLPDMKARQHMFKVHLGDTPHSLTESDFESLARRTDGFSGSDVAVCVKDVLFEPVRKTQDAMFFFKADGDMWMPCGPKQPGAVQTTMQELASKGLAAKILPPPISRADFEKVLSRQRPTVSKKDLEVHERFTKEFGEEG

SEQ ID NO: 28037 - DNA, 1422 bp, Zea mays subsp. mays
  misc_feature (1)..(1422): Ceres Seq. ID no. 12410825
agatctccggatcgttcatccactggtcgagaatccagatctctcgccttctcgctaccaaataccaaccacgaagaacaggaagaatgcccaaactgtcgtgtcgggtgctctttgcggctcttctcatcgcttcgctagccgctctgctcgtccggttcccgatccacaggctcctcaacccccacgccgccatggaccccgactccgagctcgagttcgagatgcccggcgtcttgcgtgtgtacaagaccggccgcgtcgagcgcttcgacggcaccgagaccgtcccgccctgccccgatggcgatcccgccaacggcgtcgcgtccaaggacatcgtcctggaccccgccgcaggcatctccgcccgcctctacctacccgcgggagtggatgccgggaagaagctccccgtcgttgtgttcttccacggcggtgcgttcatggtccacaccgccgcctccccgctgtaccacatctacgccgcctccctcgctgccgcggtgcccgccgtcgtcgtctccgttgactaccgcctagctcccgagcaccgcatccccgccgcctacgacgacgcattcgcggccctgaaggcggtcatcgccgcgtgccgcgcggatggcgccgaggcggaggctgagccctggctcgcctctcacggcgacgcctcccgcatcgtccttgcgggggacagcgccggcggtaacatggcgcacaacgtggcgataaggctgcgcaaggaaggcggcatcgagggttacggcgacatggtcagcggcgtcgtcctcctgtacccttatttctgggggaaggagccgctgggcgcggagcccacggatcccggctaccgcgcaatgttcgatcccacttgggaattcatctgcggcggaaagttcggcctcgaccacccctacgtcaacccaatggcatcgccggaggagttgaggcagctcggttcccgccgcgtgctggtgaccacggcggaccagtgctggttcgtggagagggcaagggcgtacgcagagggaatcaagaaatgcggctgggagggggagctcgagttctacgagaccaagggtgaggcgcacgtcttcttcttgcctaaacacggcagcgaaaaagccgtgaaggagctcgccctcgtggccgaattcgtccggcgctgttgaggtacctttcgctttgtttgcccggacctggtgagtagttcagcgagaaaaaaaatcgcacaattagtgacttttattcatattgcaaattaaggacagaggttcagtctcgattcagaatcctgatcttgaatttctgttgtgcatcgaaatttatcctgaacagtacacactgtaattctgaagtacaggcaagcgagtggctaaatgtattgtatacttgaaaactgtccaatgtattgtatactcg

SEQ ID NO: 28038 - protein, 389 aa, Zea mays subsp. mays
  peptide (1)..(389): Ceres Seq. ID no. 12410826
  misc_feature (125)..(179): Pfam Name: Pfam Description:  Carboxylesterase
  misc_feature (68)..(388): NCBI GI NO: 15227669 NR Description: putative esterase; protein id: At2g03550.1
  misc_feature (71)..(388): NCBI GI NO: 28393060 NR Description: putative esterase [Arabidopsis thaliana]
  misc_feature (59)..(386): NCBI GI NO: 38344841 NR Description: OSJNBa0064H22.22
  misc_feature (68)..(387): NCBI GI NO: 15228425 NR Description: putative protein; protein id: At3g48690
  misc_feature (68)..(387): NCBI GI NO: 15228426 NR Description: putative protein; protein id: At3g48700.1
  misc_feature (68)..(387): NCBI GI NO: 18086341 NR Description: AT3g48690/T8P19_200 [Arabidopsis thaliana]
  misc_feature (70)..(388): NCBI GI NO: 21536771 NR Description: unknown [Arabidopsis thaliana]
  misc_feature (70)..(388): NCBI GI NO: 18401743 NR Description: expressed protein; protein id: At1g47480
  misc_feature (70)..(388): NCBI GI NO: 34393904 NR Description: putative cell death associated protein
  misc_feature (68)..(386): NCBI GI NO: 15222795 NR Description: unknown protein; protein id: At1g49660.1
ISGSFIHWSRIQISRLLATKYQPRRTGRMPKLSCRVLFAALLIASLAALLVRFPIHRLLNPHAAMDPDSELEFEMPGVLRVYKTGRVERFDGTETVPPCPDGDPANGVASKDIVLDPAAGISARLYLPAGVDAGKKLPVVVFFHGGAFMVHTAASPLYHIYAASLAAAVPAVVVSVDYRLAPEHRIPAAYDDAFAALKAVIAACRADGAEAEAEPWLASHGDASRIVLAGDSAGGNMAHNVAIRLRKEGGIEGYGDMVSGVVLLYPYFWGKEPLGAEPTDPGYRAMFDPTWEFICGGKFGLDHPYVNPMASPEELRQLGSRRVLVTTADQCWFVERARAYAEGIKKCGWEGELEFYETKGEAHVFFLPKHGSEKAVKELALVAEFVRRC

SEQ ID NO: 28039 - protein, 361 aa, Zea mays subsp. mays
  peptide (1)..(361): Ceres Seq. ID no. 12410827
  misc_feature (97)..(151): Pfam Name: Pfam Description:  Carboxylesterase
  misc_feature (40)..(360): NCBI GI NO: 15227669 NR Description: putative esterase; protein id: At2g03550.1
  misc_feature (43)..(360): NCBI GI NO: 28393060 NR Description: putative esterase [Arabidopsis thaliana]
  misc_feature (31)..(358): NCBI GI NO: 38344841 NR Description: OSJNBa0064H22.22
  misc_feature (40)..(359): NCBI GI NO: 15228425 NR Description: putative protein; protein id: At3g48690
  misc_feature (40)..(359): NCBI GI NO: 15228426 NR Description: putative protein; protein id: At3g48700.1
  misc_feature (40)..(359): NCBI GI NO: 18086341 NR Description: AT3g48690/T8P19_200 [Arabidopsis thaliana]
  misc_feature (42)..(360): NCBI GI NO: 21536771 NR Description: unknown [Arabidopsis thaliana]
  misc_feature (42)..(360): NCBI GI NO: 18401743 NR Description: expressed protein; protein id: At1g47480
  misc_feature (42)..(360): NCBI GI NO: 34393904 NR Description: putative cell death associated protein
  misc_feature (40)..(358): NCBI GI NO: 15222795 NR Description: unknown protein; protein id: At1g49660.1
MPKLSCRVLFAALLIASLAALLVRFPIHRLLNPHAAMDPDSELEFEMPGVLRVYKTGRVERFDGTETVPPCPDGDPANGVASKDIVLDPAAGISARLYLPAGVDAGKKLPVVVFFHGGAFMVHTAASPLYHIYAASLAAAVPAVVVSVDYRLAPEHRIPAAYDDAFAALKAVIAACRADGAEAEAEPWLASHGDASRIVLAGDSAGGNMAHNVAIRLRKEGGIEGYGDMVSGVVLLYPYFWGKEPLGAEPTDPGYRAMFDPTWEFICGGKFGLDHPYVNPMASPEELRQLGSRRVLVTTADQCWFVERARAYAEGIKKCGWEGELEFYETKGEAHVFFLPKHGSEKAVKELALVAEFVRRC

SEQ ID NO: 28040 - protein, 325 aa, Zea mays subsp. mays
  peptide (1)..(325): Ceres Seq. ID no. 12410828
  misc_feature (61)..(115): Pfam Name: Pfam Description:  Carboxylesterase
  misc_feature (4)..(324): NCBI GI NO: 15227669 NR Description: putative esterase; protein id: At2g03550.1
  misc_feature (7)..(324): NCBI GI NO: 28393060 NR Description: putative esterase [Arabidopsis thaliana]
  misc_feature (1)..(322): NCBI GI NO: 38344841 NR Description: OSJNBa0064H22.22
  misc_feature (4)..(323): NCBI GI NO: 15228425 NR Description: putative protein; protein id: At3g48690
  misc_feature (4)..(323): NCBI GI NO: 15228426 NR Description: putative protein; protein id: At3g48700.1
  misc_feature (4)..(323): NCBI GI NO: 18086341 NR Description: AT3g48690/T8P19_200 [Arabidopsis thaliana]
  misc_feature (6)..(324): NCBI GI NO: 21536771 NR Description: unknown [Arabidopsis thaliana]
  misc_feature (6)..(324): NCBI GI NO: 18401743 NR Description: expressed protein; protein id: At1g47480
  misc_feature (6)..(324): NCBI GI NO: 34393904 NR Description: putative cell death associated protein
  misc_feature (4)..(322): NCBI GI NO: 15222795 NR Description: unknown protein; protein id: At1g49660.1
MDPDSELEFEMPGVLRVYKTGRVERFDGTETVPPCPDGDPANGVASKDIVLDPAAGISARLYLPAGVDAGKKLPVVVFFHGGAFMVHTAASPLYHIYAASLAAAVPAVVVSVDYRLAPEHRIPAAYDDAFAALKAVIAACRADGAEAEAEPWLASHGDASRIVLAGDSAGGNMAHNVAIRLRKEGGIEGYGDMVSGVVLLYPYFWGKEPLGAEPTDPGYRAMFDPTWEFICGGKFGLDHPYVNPMASPEELRQLGSRRVLVTTADQCWFVERARAYAEGIKKCGWEGELEFYETKGEAHVFFLPKHGSEKAVKELALVAEFVRRC

SEQ ID NO: 28041 - DNA, 1630 bp, Zea mays subsp. mays
  misc_feature (1)..(1630): Ceres Seq. ID no. 12353812
atcttgatctcatctcctatcttcttcctcctagattctttcttccgcgcgccctctctctctctctccttcctgccttctgcctgcgggcggcccatgtccgtggcgcccctcctgccctgcgagctgcttctccagcgaaaaggttgctgcgccttgacgcaccaccgatccaccgccgcccaacccgagcgttctgtccggcagctaggtagcgagctgcgcggtggctgcgaccggaagcagggaggggaacagggcagcgaacgcccggcgattgccttgcttgcctgtgtgctccggccggcgcgagttggtcggtcgttccatgcatggatgacaaggaacttatctcacagtccgacctgcagtcattctaccagcagcagcagcagcaccaccgggccttcggcggcggcggcggcgggcagcatagcccgtcctcgctggccgggatgcactccgtcattcgccccatgcccaacatgaacatgagcccgtcggcgatccttaactctatcggcgggggctccttcaccggtatgcagttccaaatggacccgccgccgccaccattgctgcacaccgccgccatgggtgcctcggctcctacctccacccccggtgccgtccccgcggcccccacggagccggtcaagcgcaaaagagggagaccgcgcaaatacggtcccgacggcaccatgaagcagcagcagctcgtcgccgcacagccaaggatagggccgtctggtcccaacatgatcagcagcgccgggatagaggactcttcgcagaagaagcggcgcggccggccgccgggcaccgccaagaagcatcagccctcgccctctcaaggcaatgcgttcgccggttcagctggaacgagcttcactccgcacatcatcacggcgtctccttcagaggacgtggcggcgaagatcgtcgcgttcgccacccagtcgtcaagggcggtgtgcgtgctctcggcgatgggctccgtctccagggccgtcctccgccacccggccgacggctctcccatggcgagggttcacgcgtcgccgcagccgtacaacaacagcccagccatctacgaggggttctacgagatcatgagcctaaccggctcgtacaacctggccgagggctcacaacaagaacagtgccagggccagggccagccgagcggcgggctcagcgtcacgctctgcagccctgagaggaatgtgatcggaggtgttttgggcggcccactggtagctgcaggaaccgtgcaggtggtactggggagttttcaccaaggagggtcgaaatccaagtccaagaaaggcgggaagcagcagcaggcgccggcgccggcggccgccttcagttccgactcgctcaccggcggccaggaggcgtcgcccagctctgggcacaaccaaaatctaacgccgccgccgccgccgccctccgtgacgggagggtggcccacctccgggatgtttgacaccagcattgatatcaactcatctagaggatagctcatttcatttgtcgataattccagccctcgagaaattttctgttctcgcacaagaatgatcgaaaccatacttcgaaatagattattcggtttctccctttt

SEQ ID NO: 28042 - protein, 397 aa, Zea mays subsp. mays
  peptide (1)..(397): Ceres Seq. ID no. 12353813
  misc_feature (31)..(271): NCBI GI NO: 2213534 NR Description: DNA-binding PD1-like protein [Pisum sativum]
  misc_feature (245)..(383): NCBI GI NO: 2213534 NR Description: DNA-binding PD1-like protein [Pisum sativum]
  misc_feature (31)..(271): NCBI GI NO: 7488825 NR Description: probable DNA-binding protein - garden pea
  misc_feature (245)..(383): NCBI GI NO: 7488825 NR Description: probable DNA-binding protein - garden pea
  misc_feature (78)..(340): NCBI GI NO: 8809639 NR Description: contains similarity to DNA-bindingprotein~gene_id:MMI9
  misc_feature (17)..(280): NCBI GI NO: 38346715 NR Description: OSJNBa0086O06.13
  misc_feature (81)..(273): NCBI GI NO: 15225902 NR Description: putative AT-hook DNA-binding protein
  misc_feature (33)..(280): NCBI GI NO: 37537056 NR Description: putative AT-Hook DNA-binding protein
  misc_feature (43)..(280): NCBI GI NO: 14326504 NR Description: At2g33620/F4P9.39 [Arabidopsis thaliana]
  misc_feature (78)..(267): NCBI GI NO: 11281387 NR Description: probable DNA-binding protein - Arabidopsis thaliana
MDDKELISQSDLQSFYQQQQQHHRAFGGGGGGQHSPSSLAGMHSVIRPMPNMNMSPSAILNSIGGGSFTGMQFQMDPPPPPLLHTAAMGASAPTSTPGAVPAAPTEPVKRKRGRPRKYGPDGTMKQQQLVAAQPRIGPSGPNMISSAGIEDSSQKKRRGRPPGTAKKHQPSPSQGNAFAGSAGTSFTPHIITASPSEDVAAKIVAFATQSSRAVCVLSAMGSVSRAVLRHPADGSPMARVHASPQPYNNSPAIYEGFYEIMSLTGSYNLAEGSQQEQCQGQGQPSGGLSVTLCSPERNVIGGVLGGPLVAAGTVQVVLGSFHQGGSKSKSKKGGKQQQAPAPAAAFSSDSLTGGQEASPSSGHNQNLTPPPPPPSVTGGWPTSGMFDTSIDINSSRG

SEQ ID NO: 28043 - protein, 356 aa, Zea mays subsp. mays
  peptide (1)..(356): Ceres Seq. ID no. 12353814
  misc_feature (1)..(230): NCBI GI NO: 2213534 NR Description: DNA-binding PD1-like protein [Pisum sativum]
  misc_feature (204)..(342): NCBI GI NO: 2213534 NR Description: DNA-binding PD1-like protein [Pisum sativum]
  misc_feature (1)..(230): NCBI GI NO: 7488825 NR Description: probable DNA-binding protein - garden pea
  misc_feature (204)..(342): NCBI GI NO: 7488825 NR Description: probable DNA-binding protein - garden pea
  misc_feature (37)..(299): NCBI GI NO: 8809639 NR Description: contains similarity to DNA-bindingprotein~gene_id:MMI9
  misc_feature (1)..(239): NCBI GI NO: 38346715 NR Description: OSJNBa0086O06.13
  misc_feature (40)..(232): NCBI GI NO: 15225902 NR Description: putative AT-hook DNA-binding protein
  misc_feature (1)..(239): NCBI GI NO: 37537056 NR Description: putative AT-Hook DNA-binding protein
  misc_feature (2)..(239): NCBI GI NO: 14326504 NR Description: At2g33620/F4P9.39 [Arabidopsis thaliana]
  misc_feature (37)..(226): NCBI GI NO: 11281387 NR Description: probable DNA-binding protein - Arabidopsis thaliana
MHSVIRPMPNMNMSPSAILNSIGGGSFTGMQFQMDPPPPPLLHTAAMGASAPTSTPGAVPAAPTEPVKRKRGRPRKYGPDGTMKQQQLVAAQPRIGPSGPNMISSAGIEDSSQKKRRGRPPGTAKKHQPSPSQGNAFAGSAGTSFTPHIITASPSEDVAAKIVAFATQSSRAVCVLSAMGSVSRAVLRHPADGSPMARVHASPQPYNNSPAIYEGFYEIMSLTGSYNLAEGSQQEQCQGQGQPSGGLSVTLCSPERNVIGGVLGGPLVAAGTVQVVLGSFHQGGSKSKSKKGGKQQQAPAPAAAFSSDSLTGGQEASPSSGHNQNLTPPPPPPSVTGGWPTSGMFDTSIDINSSRG

SEQ ID NO: 28044 - protein, 349 aa, Zea mays subsp. mays
  peptide (1)..(349): Ceres Seq. ID no. 12353815
  misc_feature (1)..(223): NCBI GI NO: 2213534 NR Description: DNA-binding PD1-like protein [Pisum sativum]
  misc_feature (197)..(335): NCBI GI NO: 2213534 NR Description: DNA-binding PD1-like protein [Pisum sativum]
  misc_feature (1)..(223): NCBI GI NO: 7488825 NR Description: probable DNA-binding protein - garden pea
  misc_feature (197)..(335): NCBI GI NO: 7488825 NR Description: probable DNA-binding protein - garden pea
  misc_feature (30)..(292): NCBI GI NO: 8809639 NR Description: contains similarity to DNA-bindingprotein~gene_id:MMI9
  misc_feature (1)..(232): NCBI GI NO: 38346715 NR Description: OSJNBa0086O06.13
  misc_feature (33)..(225): NCBI GI NO: 15225902 NR Description: putative AT-hook DNA-binding protein
  misc_feature (1)..(232): NCBI GI NO: 37537056 NR Description: putative AT-Hook DNA-binding protein
  misc_feature (1)..(232): NCBI GI NO: 14326504 NR Description: At2g33620/F4P9.39 [Arabidopsis thaliana]
  misc_feature (30)..(219): NCBI GI NO: 11281387 NR Description: probable DNA-binding protein - Arabidopsis thaliana
MPNMNMSPSAILNSIGGGSFTGMQFQMDPPPPPLLHTAAMGASAPTSTPGAVPAAPTEPVKRKRGRPRKYGPDGTMKQQQLVAAQPRIGPSGPNMISSAGIEDSSQKKRRGRPPGTAKKHQPSPSQGNAFAGSAGTSFTPHIITASPSEDVAAKIVAFATQSSRAVCVLSAMGSVSRAVLRHPADGSPMARVHASPQPYNNSPAIYEGFYEIMSLTGSYNLAEGSQQEQCQGQGQPSGGLSVTLCSPERNVIGGVLGGPLVAAGTVQVVLGSFHQGGSKSKSKKGGKQQQAPAPAAAFSSDSLTGGQEASPSSGHNQNLTPPPPPPSVTGGWPTSGMFDTSIDINSSRG

SEQ ID NO: 28045 - DNA, 1108 bp, Zea mays subsp. mays
  misc_feature (1)..(1108): Ceres Seq. ID no. 12566751
aatcccctcctccgccctccgcctcctcagtgctccggcgcctagcgacctgctcctgcccccgccgccgccgtgcacgcacagccggagcaggagcagcgctgcccgcctttaccgttgcccatggagaactctgccgccgccgccgccgcccggccgcgcctcacccgcgcagccgccaagcgctcagccgtcgtcacggctgtggccgtcgccgccaagcgcaagcgcgtcgcgctcagccagctgcccacgctccccaacgccgtgctcggcgcgcacgacgacgacgacgacaagcccgtcaggaagcagcgcctcctccccgccgccaagcccaagcccaagcccaaggcagcgcccgcgcctgccgcgcccgccgccgcggatgacacggatgacgacattcagctctgcaagccctacgcttccgacatctactcctacctccgctccatggagtcgcaggccaagcgccgcctcgctgttgactacatcgcggcggtgcagatcgacgtcacgcccaacatgcgtggcatcctcatcgactggctcgtcgaggtcgccgaggagtacaagctcgtctccgacacgctctacctcaccgtctcctacatcgaccgcttcctctctgccaaagttctcaacaggcagaagctgcagctcctcggcgtctccgccatgctcatcgcatccaagtatgaggagatcagcccgcccaacgtggaggatttctgctacatcaccgataacacctacaccaagcaggaggtagttaagatggagagtgatatactgaatgtcctcaagtttgaggtgggcagtcctaccgccaagacgttcctgaggatgttcatcagatctgcccaagaagacaacaagaagtatcctagcctccagttggagttcctggggagctacctttctgagctgagcttgctggattatggcttgattcgctccttgccgtcacttgttgcagcctcagccgtctttgttgcaaggctgaccctggatccacacacccatccctggagcaagaagatgcaaacgctaacaggctataagccatctgagttgaaggactgtgttgctgccatacataatt

SEQ ID NO: 28046 - protein, 328 aa, Zea mays subsp. mays
  peptide (1)..(328): Ceres Seq. ID no. 12566752
  misc_feature (104)..(233): Pfam Name: Pfam Description:  Cyclin, N-terminal domain
  misc_feature (1)..(327): NCBI GI NO: 40538955 NR Description: putative A-type cyclin
  misc_feature (13)..(327): NCBI GI NO: 15220147 NR Description: Cyclin A3;4; protein id: At1g47230
  misc_feature (13)..(327): NCBI GI NO: 7438513 NR Description: cyclin A-type (clone 59) - common tobacco
  misc_feature (13)..(327): NCBI GI NO: 7438516 NR Description: cyclin A-type - Madagascar periwinkle
  misc_feature (13)..(327): NCBI GI NO: 30694019 NR Description: cyclin family [Arabidopsis thaliana]
  misc_feature (13)..(327): NCBI GI NO: 15239172 NR Description: Cyclin A3;1; protein id: At5g43080.1
  misc_feature (9)..(327): NCBI GI NO: 7438508 NR Description: mitosis-specific cyclin CYS
  misc_feature (10)..(327): NCBI GI NO: 7438511 NR Description: cyclin A-type (clone 105) - common tobacco
  misc_feature (13)..(315): NCBI GI NO: 7438512 NR Description: cyclin A-type
  misc_feature (13)..(304): NCBI GI NO: 2190263 NR Description: A-type cyclin [Catharanthus roseus]
MENSAAAAAARPRLTRAAAKRSAVVTAVAVAAKRKRVALSQLPTLPNAVLGAHDDDDDKPVRKQRLLPAAKPKPKPKAAPAPAAPAAADDTDDDIQLCKPYASDIYSYLRSMESQAKRRLAVDYIAAVQIDVTPNMRGILIDWLVEVAEEYKLVSDTLYLTVSYIDRFLSAKVLNRQKLQLLGVSAMLIASKYEEISPPNVEDFCYITDNTYTKQEVVKMESDILNVLKFEVGSPTAKTFLRMFIRSAQEDNKKYPSLQLEFLGSYLSELSLLDYGLIRSLPSLVAASAVFVARLTLDPHTHPWSKKMQTLTGYKPSELKDCVAAIHN

SEQ ID NO: 28047 - protein, 257 aa, Zea mays subsp. mays
  peptide (1)..(257): Ceres Seq. ID no. 12566753
  misc_feature (20)..(233): Pfam Name: Pfam Description:  Formin Homology 2 Domain
  misc_feature (1)..(256): NCBI GI NO: 38373695 NR Description: WASP-interacting protein [Homo sapiens]
  misc_feature (19)..(157): NCBI GI NO: 38373695 NR Description: WASP-interacting protein [Homo sapiens]
IPSSALRLLSAPAPSDLLLPPPPPCTHSRSRSSAARLYRCPWRTLPPPPPPGRASPAQPPSAQPSSRLWPSPPSASASRSASCPRSPTPCSARTTTTTTSPSGSSASSPPPSPSPSPRQRPRLPRPPPRMTRMTTFSSASPTLPTSTPTSAPWSRRPSAASLLTTSRRCRSTSRPTCVASSSTGSSRSPRSTSSSPTRSTSPSPTSTASSLPKFSTGRSCSSSASPPCSSHPSMRRSARPTWRISATSPITPTPSRR

SEQ ID NO: 28048 - protein, 217 aa, Zea mays subsp. mays
  peptide (1)..(217): Ceres Seq. ID no. 12566754
  misc_feature (1)..(122): Pfam Name: Pfam Description:  Cyclin, N-terminal domain
  misc_feature (1)..(216): NCBI GI NO: 40538955 NR Description: putative A-type cyclin
  misc_feature (1)..(216): NCBI GI NO: 15220147 NR Description: Cyclin A3;4; protein id: At1g47230
  misc_feature (1)..(216): NCBI GI NO: 7438513 NR Description: cyclin A-type (clone 59) - common tobacco
  misc_feature (1)..(216): NCBI GI NO: 7438516 NR Description: cyclin A-type - Madagascar periwinkle
  misc_feature (1)..(216): NCBI GI NO: 30694019 NR Description: cyclin family [Arabidopsis thaliana]
  misc_feature (1)..(216): NCBI GI NO: 15239172 NR Description: Cyclin A3;1; protein id: At5g43080.1
  misc_feature (1)..(216): NCBI GI NO: 7438508 NR Description: mitosis-specific cyclin CYS
  misc_feature (1)..(216): NCBI GI NO: 7438511 NR Description: cyclin A-type (clone 105) - common tobacco
  misc_feature (1)..(204): NCBI GI NO: 7438512 NR Description: cyclin A-type
  misc_feature (1)..(193): NCBI GI NO: 2190263 NR Description: A-type cyclin [Catharanthus roseus]
MESQAKRRLAVDYIAAVQIDVTPNMRGILIDWLVEVAEEYKLVSDTLYLTVSYIDRFLSAKVLNRQKLQLLGVSAMLIASKYEEISPPNVEDFCYITDNTYTKQEVVKMESDILNVLKFEVGSPTAKTFLRMFIRSAQEDNKKYPSLQLEFLGSYLSELSLLDYGLIRSLPSLVAASAVFVARLTLDPHTHPWSKKMQTLTGYKPSELKDCVAAIHN

SEQ ID NO: 28049 - DNA, 2219 bp, Zea mays subsp. mays
  misc_feature (1)..(2219): Ceres Seq. ID no. 12409104
attcgagccctgaaatcccaaaagcccaaaccaaatccaagcgcaagagggggcaaagccgcaaagggggaggcaccaggcaccggcagccattacttactggtcctcactcccacaccaaccaaccaacctcctctgcctgccgcttctcctgctgcgggcgggcactgctgcaagtactagaggaggacatccgcttccattactgcgcctgcggaggatcggaggaaccagtagcggaggcttcgattttcggcgggcgcaataaatttcccgcatggctcggagggccgcgtcctcgctcgtctcccgctgcctcctggcgagggcccctgccggcgcgccgcccgctgccccctctgcgccgcgcaggacagtgcctgcagatgggatgcacaggctgttgccaggtgtccttcagaggttcagcactgcagcagcagtagaggagcccatcacgccgtcagtccatgtgaactacacaaagctcctcattaatgggaactttgttgattccgcatccggcaagaccttcccaactctggaccctcgtacaggggaggtgattgctcatgtggctgagggtgacgcagaggacattaaccgtgcagtagctgcggctcgcaaggcttttgatgaagggccatggccgaagatgactgcctatgagaggtcccgtatcctactgcggtttgctgatttgatagagaagcacaatgacgagcttgctgctttggagacatgggacaacgggaagccatatgagcaagcagcccagattgaagtacccatggtggcccgtcttatgcgttactatgctggttgggctgataagatccatgggctcattgtgccggctgatggcccacaccatgtacagatcttgcatgagccaattggtgttgcaggtcagatcatcccatggaactttcctcttctgatgtatgcctggaaagttggccctgctttggcatgtggaaatactctcgtgctcaagactgctgaacaaacccctctatcggctttgtatatctccaaattgttgcatgaggctggactacctgagggtgttgtgaatgtcgtttctggttttggccctactgctggtgctgctcttgctagtcacatggatgttgataagatcgcatttactggatctaccgatactggaaaaattattctcgagttggctgcaaagagcaaccttaagacagtgacactggagttaggaggcaagtcccctttcatcataatggacgatgctgatgttgaccatgctgttgagcttgcgcactttgccctgttctttaaccagggacaatgctgctgcgctggatctcgcacgtttgtacatgagcgtgtttatgatgagtttgtggagaaggccaaggctcgtgcattgaagcgcgtcgttggtgatccgttcaggaaaggtgttgaacagggcccgcagattgacgacgagcaattcaacaagatcttgcgctacattaggtatggtgttgacggtggagctacccttgtgacgggtggtgataggttgggtgacaagggtttctacatccagccaacgattttctcagatgtccaggacggcatgaagattgctcaggaggagatatttgggcctgtgcagtcgatcctcaagttcaaagacctcaatgaggttatcaagagggcaaacgcgagccagtatggattggccgccggcgtgttcaccaacagcctggacacggccaacaccctgacgcgcgcgctcagggccgggaccgtctgggtgaactgcttcgacgtcttcgatgctgcgattccgtttggtgggtacaagatgagcggcatcgggagggagaagggcgttgacagcctgaagaactacctgcaggtgaaggcggtcgtcaccccaatcaagaacgccgcgtggttgtagacgctgcaagtgtggccttgtgcacgagaaccacgtatattcatttcctggtcacatccccgaacaatgtgaaggcgttaatcagatagatgacgatgaagaagaacaactataataagatttgccctagcctgggttctcagttatctctaataagttttatggttggtgcctatatattgtgcaatttggttgctcccttttattttgtttctttttgataagactgttctagcaacggatatgcagagttcattatgaaaatgcatttgttagtgtctttgatggttaa

SEQ ID NO: 28050 - protein, 549 aa, Zea mays subsp. mays
  peptide (1)..(549): Ceres Seq. ID no. 12409105
  misc_feature (1)..(549): NCBI GI NO: 7431451 NR Description: rf2 nuclear restorer protein - maize
  misc_feature (1)..(549): NCBI GI NO: 14276718 NR Description: T-cytoplasm male sterility restorer factor 2
  misc_feature (1)..(549): NCBI GI NO: 20530131 NR Description: mitochondrial aldehyde dehydrogenase
  misc_feature (2)..(549): NCBI GI NO: 8163730 NR Description: aldehyde dehydrogenase [Oryza sativa]
  misc_feature (2)..(549): NCBI GI NO: 11691926 NR Description: aldehyde dehydrogenase ALDH2b
  misc_feature (3)..(549): NCBI GI NO: 20530127 NR Description: mitochondrial aldehyde dehydrogenase
  misc_feature (3)..(549): NCBI GI NO: 15128580 NR Description: mitochondrial aldehyde dehydrogenase ALDH2
  misc_feature (2)..(549): NCBI GI NO: 20530129 NR Description: mitochondrial aldehyde dehydrogenase
  misc_feature (2)..(549): NCBI GI NO: 8574429 NR Description: mitochondrial aldehyde dehydrogenase ALDH2a
  misc_feature (3)..(549): NCBI GI NO: 19850251 NR Description: mitochondrial aldehyde dehydrogenase RF2B
MARRAASSLVSRCLLARAPAGAPPAAPSAPRRTVPADGMHRLLPGVLQRFSTAAAVEEPITPSVHVNYTKLLINGNFVDSASGKTFPTLDPRTGEVIAHVAEGDAEDINRAVAAARKAFDEGPWPKMTAYERSRILLRFADLIEKHNDELAALETWDNGKPYEQAAQIEVPMVARLMRYYAGWADKIHGLIVPADGPHHVQILHEPIGVAGQIIPWNFPLLMYAWKVGPALACGNTLVLKTAEQTPLSALYISKLLHEAGLPEGVVNVVSGFGPTAGAALASHMDVDKIAFTGSTDTGKIILELAAKSNLKTVTLELGGKSPFIIMDDADVDHAVELAHFALFFNQGQCCCAGSRTFVHERVYDEFVEKAKARALKRVVGDPFRKGVEQGPQIDDEQFNKILRYIRYGVDGGATLVTGGDRLGDKGFYIQPTIFSDVQDGMKIAQEEIFGPVQSILKFKDLNEVIKRANASQYGLAAGVFTNSLDTANTLTRALRAGTVWVNCFDVFDAAIPFGGYKMSGIGREKGVDSLKNYLQVKAVVTPIKNAAWL

SEQ ID NO: 28051 - protein, 511 aa, Zea mays subsp. mays
  peptide (1)..(511): Ceres Seq. ID no. 12409106
  misc_feature (1)..(511): NCBI GI NO: 7431451 NR Description: rf2 nuclear restorer protein - maize
  misc_feature (1)..(511): NCBI GI NO: 14276718 NR Description: T-cytoplasm male sterility restorer factor 2
  misc_feature (1)..(511): NCBI GI NO: 20530131 NR Description: mitochondrial aldehyde dehydrogenase
  misc_feature (1)..(511): NCBI GI NO: 8163730 NR Description: aldehyde dehydrogenase [Oryza sativa]
  misc_feature (1)..(511): NCBI GI NO: 11691926 NR Description: aldehyde dehydrogenase ALDH2b
  misc_feature (1)..(511): NCBI GI NO: 20530127 NR Description: mitochondrial aldehyde dehydrogenase
  misc_feature (1)..(511): NCBI GI NO: 15128580 NR Description: mitochondrial aldehyde dehydrogenase ALDH2
  misc_feature (1)..(511): NCBI GI NO: 20530129 NR Description: mitochondrial aldehyde dehydrogenase
  misc_feature (1)..(511): NCBI GI NO: 8574429 NR Description: mitochondrial aldehyde dehydrogenase ALDH2a
  misc_feature (1)..(511): NCBI GI NO: 19850251 NR Description: mitochondrial aldehyde dehydrogenase RF2B
MHRLLPGVLQRFSTAAAVEEPITPSVHVNYTKLLINGNFVDSASGKTFPTLDPRTGEVIAHVAEGDAEDINRAVAAARKAFDEGPWPKMTAYERSRILLRFADLIEKHNDELAALETWDNGKPYEQAAQIEVPMVARLMRYYAGWADKIHGLIVPADGPHHVQILHEPIGVAGQIIPWNFPLLMYAWKVGPALACGNTLVLKTAEQTPLSALYISKLLHEAGLPEGVVNVVSGFGPTAGAALASHMDVDKIAFTGSTDTGKIILELAAKSNLKTVTLELGGKSPFIIMDDADVDHAVELAHFALFFNQGQCCCAGSRTFVHERVYDEFVEKAKARALKRVVGDPFRKGVEQGPQIDDEQFNKILRYIRYGVDGGATLVTGGDRLGDKGFYIQPTIFSDVQDGMKIAQEEIFGPVQSILKFKDLNEVIKRANASQYGLAAGVFTNSLDTANTLTRALRAGTVWVNCFDVFDAAIPFGGYKMSGIGREKGVDSLKNYLQVKAVVTPIKNAAWL

SEQ ID NO: 28052 - protein, 423 aa, Zea mays subsp. mays
  peptide (1)..(423): Ceres Seq. ID no. 12409107
  misc_feature (1)..(423): NCBI GI NO: 7431451 NR Description: rf2 nuclear restorer protein - maize
  misc_feature (1)..(423): NCBI GI NO: 14276718 NR Description: T-cytoplasm male sterility restorer factor 2
  misc_feature (1)..(423): NCBI GI NO: 20530131 NR Description: mitochondrial aldehyde dehydrogenase
  misc_feature (1)..(423): NCBI GI NO: 8163730 NR Description: aldehyde dehydrogenase [Oryza sativa]
  misc_feature (1)..(423): NCBI GI NO: 11691926 NR Description: aldehyde dehydrogenase ALDH2b
  misc_feature (1)..(423): NCBI GI NO: 20530127 NR Description: mitochondrial aldehyde dehydrogenase
  misc_feature (1)..(423): NCBI GI NO: 15128580 NR Description: mitochondrial aldehyde dehydrogenase ALDH2
  misc_feature (1)..(423): NCBI GI NO: 20530129 NR Description: mitochondrial aldehyde dehydrogenase
  misc_feature (1)..(423): NCBI GI NO: 8574429 NR Description: mitochondrial aldehyde dehydrogenase ALDH2a
  misc_feature (1)..(423): NCBI GI NO: 19850251 NR Description: mitochondrial aldehyde dehydrogenase RF2B
MTAYERSRILLRFADLIEKHNDELAALETWDNGKPYEQAAQIEVPMVARLMRYYAGWADKIHGLIVPADGPHHVQILHEPIGVAGQIIPWNFPLLMYAWKVGPALACGNTLVLKTAEQTPLSALYISKLLHEAGLPEGVVNVVSGFGPTAGAALASHMDVDKIAFTGSTDTGKIILELAAKSNLKTVTLELGGKSPFIIMDDADVDHAVELAHFALFFNQGQCCCAGSRTFVHERVYDEFVEKAKARALKRVVGDPFRKGVEQGPQIDDEQFNKILRYIRYGVDGGATLVTGGDRLGDKGFYIQPTIFSDVQDGMKIAQEEIFGPVQSILKFKDLNEVIKRANASQYGLAAGVFTNSLDTANTLTRALRAGTVWVNCFDVFDAAIPFGGYKMSGIGREKGVDSLKNYLQVKAVVTPIKNAAWL

SEQ ID NO: 28053 - DNA, 1566 bp, Zea mays subsp. mays
  misc_feature (1)..(1566): Ceres Seq. ID no. 12374418
ggcactgccattcccgtttcctcgctcgaacacacaccgaagagagagacagagcgagagaggatggcgtccctggcgcagcacgtcgcgggcctaccgtgcccccctctatccggcgcgtcgcgccgtcgccccgcggcgcagaggcggcctccgtcggcgcttgtgtgcggtacctatgcgctgaccaaggacgagcgggagcgggagcggatgcgccaggtgttcgacgacgcctccgagcgctgccgcaccgcgcccatggagggcgtcgccttctcccccgacgacctcgacaccgccgtcgagtccaccgacatagacacggagatcggctcgctcattaaaggaacagtatttatgactacctcaaatggtgcatatatcgacatccaatccaagtctactgcttttttgcccttagatgaggcatgtcttcttgatatcgataatgttgaagaggctggcattcgtcctgggttagtagaagaattcatgataattgatgagaacccaggtgatgaaactttgattctaagtttgcaagcaattcagcaagaacttgcatgggaaaggtgccggcaacttcaggccgaagatgtcgttgtcacgggtaaagtaattggtggaaacaaaggaggtgtagtagctcttgtggatgggcttaagggtttcgttccattttcgcaagtgtcatcgaaaacaaccgccgaagagctgcttgagaaagaattgcctctgaagtttgtagaggtcgatgaggaacaaggcaggcttgtcctcagtaatcgcaaggcaatggcagatagtcaggcccagctaggtattggatcagttgtcttgggaactgtagagagcctaaaaccttatggcgccttcattgacatcggtggaatcaacggccttctccatgtgagccagattagtcatgaccgtgttgcagatatctcaacagttctgcaaccaggagataccctcaaggttatgatactgagccatgaccgtgaaagaggccgagtcagcctttctactaagaagcttgagccaacacctggtgacatgatccgcaatcccaagcttgtgtttgagaaggctgatgagatggctcagatattcaggcagagaatagctcaggcagaggctatggctcgtgctgacatgttgagattccagccagagagtggattgaccctcagttcagagggcatcttaggaccattgtcgtcggatgcaccttcggaggattctgaagaacccacagatgaatagaggcagttgacgaagtgcaccgggtttgagatatgtgatggcagttcatcatgctcattttccttggggtgggggaggcatgacgagagcatgttctgttcagatcgttttccccgttccacttattcttgtcttgtactaggaaatctgaaaatgtaacaaggttctgaagacaccgaaaagaaatgtaattaaatccctctgtgaagttatcccattctcgcaggaacctcaatgtgtagtctgatcgttgagtgtatattttgtaattttgaatgcattttgaatgcgtattcc

SEQ ID NO: 28054 - protein, 422 aa, Zea mays subsp. mays
  peptide (1)..(422): Ceres Seq. ID no. 12374419
  misc_feature (273)..(345): Pfam Name: Pfam Description:  S1 RNA binding domain
  misc_feature (22)..(414): NCBI GI NO: 133872 NR Description: 30S ribosomal protein S1, chloroplast precursor
  misc_feature (22)..(422): NCBI GI NO: 30692346 NR Description: ribosomal protein S1 [Arabidopsis thaliana]
  misc_feature (91)..(418): NCBI GI NO: 22299589 NR Description: 30S ribosomal protein S1
  misc_feature (77)..(380): NCBI GI NO: 33863935 NR Description: 30S ribosomal protein S1, homolog A
  misc_feature (77)..(380): NCBI GI NO: 33866517 NR Description: 30S ribosomal protein S1, homolog A
  misc_feature (77)..(380): NCBI GI NO: 33239803 NR Description: Ribosomal protein S1
  misc_feature (87)..(382): NCBI GI NO: 1173225 NR Description: 30S ribosomal protein S1
  misc_feature (91)..(382): NCBI GI NO: 16330162 NR Description: 30S ribosomal protein S1
  misc_feature (91)..(422): NCBI GI NO: 17227632 NR Description: 30S ribosomal protein S1 [Nostoc sp. PCC 7120]
  misc_feature (96)..(393): NCBI GI NO: 40641370 NR Description: ribosomal protein S1 homologue
GTAIPVSSLEHTPKRETERERMASLAQHVAGLPCPPLSGASRRRPAAQRRPPSALVCGTYALTKDERERERMRQVFDDASERCRTAPMEGVAFSPDDLDTAVESTDIDTEIGSLIKGTVFMTTSNGAYIDIQSKSTAFLPLDEACLLDIDNVEEAGIRPGLVEEFMIIDENPGDETLILSLQAIQQELAWERCRQLQAEDVVVTGKVIGGNKGGVVALVDGLKGFVPFSQVSSKTTAEELLEKELPLKFVEVDEEQGRLVLSNRKAMADSQAQLGIGSVVLGTVESLKPYGAFIDIGGINGLLHVSQISHDRVADISTVLQPGDTLKVMILSHDRERGRVSLSTKKLEPTPGDMIRNPKLVFEKADEMAQIFRQRIAQAEAMARADMLRFQPESGLTLSSEGILGPLSSDAPSEDSEEPTDE

SEQ ID NO: 28055 - protein, 401 aa, Zea mays subsp. mays
  peptide (1)..(401): Ceres Seq. ID no. 12374420
  misc_feature (252)..(324): Pfam Name: Pfam Description:  S1 RNA binding domain
  misc_feature (1)..(393): NCBI GI NO: 133872 NR Description: 30S ribosomal protein S1, chloroplast precursor
  misc_feature (1)..(401): NCBI GI NO: 30692346 NR Description: ribosomal protein S1 [Arabidopsis thaliana]
  misc_feature (70)..(397): NCBI GI NO: 22299589 NR Description: 30S ribosomal protein S1
  misc_feature (56)..(359): NCBI GI NO: 33863935 NR Description: 30S ribosomal protein S1, homolog A
  misc_feature (56)..(359): NCBI GI NO: 33866517 NR Description: 30S ribosomal protein S1, homolog A
  misc_feature (56)..(359): NCBI GI NO: 33239803 NR Description: Ribosomal protein S1
  misc_feature (66)..(361): NCBI GI NO: 1173225 NR Description: 30S ribosomal protein S1
  misc_feature (70)..(361): NCBI GI NO: 16330162 NR Description: 30S ribosomal protein S1
  misc_feature (70)..(401): NCBI GI NO: 17227632 NR Description: 30S ribosomal protein S1 [Nostoc sp. PCC 7120]
  misc_feature (75)..(372): NCBI GI NO: 40641370 NR Description: ribosomal protein S1 homologue
MASLAQHVAGLPCPPLSGASRRRPAAQRRPPSALVCGTYALTKDERERERMRQVFDDASERCRTAPMEGVAFSPDDLDTAVESTDIDTEIGSLIKGTVFMTTSNGAYIDIQSKSTAFLPLDEACLLDIDNVEEAGIRPGLVEEFMIIDENPGDETLILSLQAIQQELAWERCRQLQAEDVVVTGKVIGGNKGGVVALVDGLKGFVPFSQVSSKTTAEELLEKELPLKFVEVDEEQGRLVLSNRKAMADSQAQLGIGSVVLGTVESLKPYGAFIDIGGINGLLHVSQISHDRVADISTVLQPGDTLKVMILSHDRERGRVSLSTKKLEPTPGDMIRNPKLVFEKADEMAQIFRQRIAQAEAMARADMLRFQPESGLTLSSEGILGPLSSDAPSEDSEEPTDE

SEQ ID NO: 28056 - protein, 351 aa, Zea mays subsp. mays
  peptide (1)..(351): Ceres Seq. ID no. 12374421
  misc_feature (202)..(274): Pfam Name: Pfam Description:  S1 RNA binding domain
  misc_feature (1)..(343): NCBI GI NO: 133872 NR Description: 30S ribosomal protein S1, chloroplast precursor
  misc_feature (1)..(351): NCBI GI NO: 30692346 NR Description: ribosomal protein S1 [Arabidopsis thaliana]
  misc_feature (20)..(347): NCBI GI NO: 22299589 NR Description: 30S ribosomal protein S1
  misc_feature (6)..(309): NCBI GI NO: 33863935 NR Description: 30S ribosomal protein S1, homolog A
  misc_feature (6)..(309): NCBI GI NO: 33866517 NR Description: 30S ribosomal protein S1, homolog A
  misc_feature (6)..(309): NCBI GI NO: 33239803 NR Description: Ribosomal protein S1
  misc_feature (16)..(311): NCBI GI NO: 1173225 NR Description: 30S ribosomal protein S1
  misc_feature (20)..(311): NCBI GI NO: 16330162 NR Description: 30S ribosomal protein S1
  misc_feature (20)..(351): NCBI GI NO: 17227632 NR Description: 30S ribosomal protein S1 [Nostoc sp. PCC 7120]
  misc_feature (25)..(322): NCBI GI NO: 40641370 NR Description: ribosomal protein S1 homologue
MRQVFDDASERCRTAPMEGVAFSPDDLDTAVESTDIDTEIGSLIKGTVFMTTSNGAYIDIQSKSTAFLPLDEACLLDIDNVEEAGIRPGLVEEFMIIDENPGDETLILSLQAIQQELAWERCRQLQAEDVVVTGKVIGGNKGGVVALVDGLKGFVPFSQVSSKTTAEELLEKELPLKFVEVDEEQGRLVLSNRKAMADSQAQLGIGSVVLGTVESLKPYGAFIDIGGINGLLHVSQISHDRVADISTVLQPGDTLKVMILSHDRERGRVSLSTKKLEPTPGDMIRNPKLVFEKADEMAQIFRQRIAQAEAMARADMLRFQPESGLTLSSEGILGPLSSDAPSEDSEEPTDE

SEQ ID NO: 28057 - DNA, 1546 bp, Zea mays subsp. mays
  misc_feature (1)..(1546): Ceres Seq. ID no. 12409096
acgtctcattcaagcgctctgccggccagcctagtgctctcggctttctttcatctccctccttttgccacttgctgtagctttaatttgcctggcactttgcacgttgtggccggccggggcctgtgcttccattggtcggcagcaagcaagcaaggctagctagcgtccgtggatcagtcatgggcagccagaggcagaggcaccgagcggtcactggcctcccggcggcgggcgcgcggatgctggccctgctgtgcgcgtcgtcgtgggtgctggtgctcacgacggcgcagaactacagcgccatcttcaacttcggcgactcgatcaccgacaccggcaacctgtgcaccagcggcaggccgtcgcagatcaccttcacgcagcccccctacggcgagacctacttcggcacgccgacgtgccgctgctccgacggccgcgtcgtcgtcgacttcctgagcacccagttcgggctgccgttcctgccgccgtccaagtcgagcagcgcggacttcagtcagggcgccaacatggcgatcacgggcgccactgccatggacgcccccttcttccgctcgctcgggctctccgacaagatctggaacaacgggcccatcagctttcagctgcagtggttccagcagatcgccacctccgtctgcggacagagctgcaagagctacctgggcaactccctgttcgtgttcggcgagttcggcggcaacgactacaacgccatgatcttcggcggctactccatcgagcaggccaggaaatacgtccccaagatcgtcaacaccatctcgaggggcatcgataaactgatcgccatgggcgcgaccgacatcgtcgtccccggggtgcttcccatcgggtgcttccccatctatctgaccatctaccagagctccaacggcagcgactacgacagtctcggctgcctcaacagcttcaacgacctgtccacgtaccacaactccctgctccagaagagggtggacatcatccagagccggcacaggaagacggcgcgcatcatgtacgccgacttctactccgccgtctacgacatggtccgcaacccacagagctacgggttcagctcggtgttcgagacgtgctgcggatcaggcggcggcaagtacaactaccagaacagcgcgcggtgcggcatggcgggcgccgccgcgtgctctagcccggcgtcgcacctcagctgggacggcatccacctcacggaggccgcgtacaagcacatcaccgacgcctggctcaaggggccgtactgccgcccgcccatcctgcacaactaatcctcagtgcatatggacacgctggaccggaggccggcagcgcgttgtcttttttataaataatttatttattattcgtacaagctttggttggatccatcgcggcgggggttattaattatagcattggttggtcctttcgttatatttgaccatatttttttttgtgttcggggtaaggtgtttattatattttgcgttgctcaagaaaaagagctgacgatggc

SEQ ID NO: 28058 - protein, 378 aa, Zea mays subsp. mays
  peptide (1)..(378): Ceres Seq. ID no. 12409097
  misc_feature (43)..(365): Pfam Name: Pfam Description:  GDSL-like Lipase/Acylhydrolase
  misc_feature (23)..(377): NCBI GI NO: 34903956 NR Description: OSJNBa0038J17.23
  misc_feature (14)..(376): NCBI GI NO: 34903958 NR Description: OSJNBa0038J17.24
  misc_feature (37)..(376): NCBI GI NO: 34903978 NR Description: unnamed protein product
  misc_feature (10)..(374): NCBI GI NO: 15218725 NR Description: lipase, putative; protein id: At1g28580
  misc_feature (118)..(362): NCBI GI NO: 15237586 NR Description: lipase -like protein; protein id: At5g03980.1
  misc_feature (42)..(365): NCBI GI NO: 18413404 NR Description: putative protein; protein id: At4g10950.1
  misc_feature (42)..(365): NCBI GI NO: 7486718 NR Description: hypothetical protein F8M12
  misc_feature (42)..(365): NCBI GI NO: 7486138 NR Description: hypothetical protein F25I24
  misc_feature (39)..(369): NCBI GI NO: 15220995 NR Description: lipase, putative; protein id: At1g53940.1
  misc_feature (40)..(370): NCBI GI NO: 18394825 NR Description: anter-specific proline-rich protein APG precursor
MGSQRQRHRAVTGLPAAGARMLALLCASSWVLVLTTAQNYSAIFNFGDSITDTGNLCTSGRPSQITFTQPPYGETYFGTPTCRCSDGRVVVDFLSTQFGLPFLPPSKSSSADFSQGANMAITGATAMDAPFFRSLGLSDKIWNNGPISFQLQWFQQIATSVCGQSCKSYLGNSLFVFGEFGGNDYNAMIFGGYSIEQARKYVPKIVNTISRGIDKLIAMGATDIVVPGVLPIGCFPIYLTIYQSSNGSDYDSLGCLNSFNDLSTYHNSLLQKRVDIIQSRHRKTARIMYADFYSAVYDMVRNPQSYGFSSVFETCCGSGGGKYNYQNSARCGMAGAAACSSPASHLSWDGIHLTEAAYKHITDAWLKGPYCRPPILHN

SEQ ID NO: 28059 - protein, 358 aa, Zea mays subsp. mays
  peptide (1)..(358): Ceres Seq. ID no. 12409098
  misc_feature (23)..(345): Pfam Name: Pfam Description:  GDSL-like Lipase/Acylhydrolase
  misc_feature (3)..(357): NCBI GI NO: 34903956 NR Description: OSJNBa0038J17.23
  misc_feature (1)..(356): NCBI GI NO: 34903958 NR Description: OSJNBa0038J17.24
  misc_feature (17)..(356): NCBI GI NO: 34903978 NR Description: unnamed protein product
  misc_feature (1)..(354): NCBI GI NO: 15218725 NR Description: lipase, putative; protein id: At1g28580
  misc_feature (98)..(342): NCBI GI NO: 15237586 NR Description: lipase -like protein; protein id: At5g03980.1
  misc_feature (22)..(345): NCBI GI NO: 18413404 NR Description: putative protein; protein id: At4g10950.1
  misc_feature (22)..(345): NCBI GI NO: 7486718 NR Description: hypothetical protein F8M12
  misc_feature (22)..(345): NCBI GI NO: 7486138 NR Description: hypothetical protein F25I24
  misc_feature (19)..(349): NCBI GI NO: 15220995 NR Description: lipase, putative; protein id: At1g53940.1
  misc_feature (20)..(350): NCBI GI NO: 18394825 NR Description: anter-specific proline-rich protein APG precursor
MLALLCASSWVLVLTTAQNYSAIFNFGDSITDTGNLCTSGRPSQITFTQPPYGETYFGTPTCRCSDGRVVVDFLSTQFGLPFLPPSKSSSADFSQGANMAITGATAMDAPFFRSLGLSDKIWNNGPISFQLQWFQQIATSVCGQSCKSYLGNSLFVFGEFGGNDYNAMIFGGYSIEQARKYVPKIVNTISRGIDKLIAMGATDIVVPGVLPIGCFPIYLTIYQSSNGSDYDSLGCLNSFNDLSTYHNSLLQKRVDIIQSRHRKTARIMYADFYSAVYDMVRNPQSYGFSSVFETCCGSGGGKYNYQNSARCGMAGAAACSSPASHLSWDGIHLTEAAYKHITDAWLKGPYCRPPILHN

SEQ ID NO: 28060 - protein, 260 aa, Zea mays subsp. mays
  peptide (1)..(260): Ceres Seq. ID no. 12409099
  misc_feature (1)..(247): Pfam Name: Pfam Description:  GDSL-like Lipase/Acylhydrolase
  misc_feature (1)..(259): NCBI GI NO: 34903956 NR Description: OSJNBa0038J17.23
  misc_feature (1)..(258): NCBI GI NO: 34903958 NR Description: OSJNBa0038J17.24
  misc_feature (1)..(258): NCBI GI NO: 34903978 NR Description: unnamed protein product
  misc_feature (1)..(256): NCBI GI NO: 15218725 NR Description: lipase, putative; protein id: At1g28580
  misc_feature (1)..(244): NCBI GI NO: 15237586 NR Description: lipase -like protein; protein id: At5g03980.1
  misc_feature (1)..(247): NCBI GI NO: 18413404 NR Description: putative protein; protein id: At4g10950.1
  misc_feature (1)..(247): NCBI GI NO: 7486718 NR Description: hypothetical protein F8M12
  misc_feature (1)..(247): NCBI GI NO: 7486138 NR Description: hypothetical protein F25I24
  misc_feature (1)..(251): NCBI GI NO: 15220995 NR Description: lipase, putative; protein id: At1g53940.1
  misc_feature (1)..(252): NCBI GI NO: 18394825 NR Description: anter-specific proline-rich protein APG precursor
MAITGATAMDAPFFRSLGLSDKIWNNGPISFQLQWFQQIATSVCGQSCKSYLGNSLFVFGEFGGNDYNAMIFGGYSIEQARKYVPKIVNTISRGIDKLIAMGATDIVVPGVLPIGCFPIYLTIYQSSNGSDYDSLGCLNSFNDLSTYHNSLLQKRVDIIQSRHRKTARIMYADFYSAVYDMVRNPQSYGFSSVFETCCGSGGGKYNYQNSARCGMAGAAACSSPASHLSWDGIHLTEAAYKHITDAWLKGPYCRPPILHN

SEQ ID NO: 28061 - DNA, 1237 bp, Zea mays subsp. mays; identical to SEQ ID NO: 27325
  misc_feature (1)..(1237): Ceres Seq. ID no. 12356266

SEQ ID NO: 28062 - protein, 374 aa, Zea mays subsp. mays; identical to SEQ ID NO: 27326
  peptide (1)..(374): Ceres Seq. ID no. 12356267
  misc_feature (101)..(368): NCBI GI NO: 15228845 NR Description: putative protein; protein id: At3g62730
  misc_feature (105)..(368): NCBI GI NO: 18401988 NR Description: dessication-related protein, putative
  misc_feature (105)..(368): NCBI GI NO: 25357137 NR Description: hypothetical protein T2J15.11
  misc_feature (105)..(368): NCBI GI NO: 21593191 NR Description: dessication-related protein, putative
  misc_feature (85)..(226): NCBI GI NO: 12083528 NR Description: similar to Arabidopsis thaliana hypotheticalprotein
  misc_feature (228)..(367): NCBI GI NO: 12083528 NR Description: similar to Arabidopsis thaliana hypotheticalprotein
  misc_feature (101)..(368): NCBI GI NO: 38346151 NR Description: OSJNBb0118P14.11
  misc_feature (64)..(362): NCBI GI NO: 118926 NR Description: Desiccation-related protein PCC13-62 precursor
  misc_feature (99)..(366): NCBI GI NO: 22984403 NR Description: hypothetical protein [Burkholderia fungorum]
  misc_feature (115)..(363): NCBI GI NO: 16263242 NR Description: Conserved hypothetical protein

SEQ ID NO: 28063 - protein, 354 aa, Zea mays subsp. mays; identical to SEQ ID NO: 27327
  peptide (1)..(354): Ceres Seq. ID no. 12356268
  misc_feature (81)..(348): NCBI GI NO: 15228845 NR Description: putative protein; protein id: At3g62730
  misc_feature (85)..(348): NCBI GI NO: 18401988 NR Description: dessication-related protein, putative
  misc_feature (85)..(348): NCBI GI NO: 25357137 NR Description: hypothetical protein T2J15.11
  misc_feature (85)..(348): NCBI GI NO: 21593191 NR Description: dessication-related protein, putative
  misc_feature (65)..(206): NCBI GI NO: 12083528 NR Description: similar to Arabidopsis thaliana hypotheticalprotein
  misc_feature (208)..(347): NCBI GI NO: 12083528 NR Description: similar to Arabidopsis thaliana hypotheticalprotein
  misc_feature (81)..(348): NCBI GI NO: 38346151 NR Description: OSJNBb0118P14.11
  misc_feature (44)..(342): NCBI GI NO: 118926 NR Description: Desiccation-related protein PCC13-62 precursor
  misc_feature (79)..(346): NCBI GI NO: 22984403 NR Description: hypothetical protein [Burkholderia fungorum]
  misc_feature (95)..(343): NCBI GI NO: 16263242 NR Description: Conserved hypothetical protein

SEQ ID NO: 28064 - protein, 270 aa, Zea mays subsp. mays; identical to SEQ ID NO: 27328
  peptide (1)..(270): Ceres Seq. ID no. 12356269
  misc_feature (1)..(264): NCBI GI NO: 15228845 NR Description: putative protein; protein id: At3g62730
  misc_feature (1)..(264): NCBI GI NO: 18401988 NR Description: dessication-related protein, putative
  misc_feature (1)..(264): NCBI GI NO: 25357137 NR Description: hypothetical protein T2J15.11
  misc_feature (1)..(264): NCBI GI NO: 21593191 NR Description: dessication-related protein, putative
  misc_feature (1)..(122): NCBI GI NO: 12083528 NR Description: similar to Arabidopsis thaliana hypotheticalprotein
  misc_feature (124)..(263): NCBI GI NO: 12083528 NR Description: similar to Arabidopsis thaliana hypotheticalprotein
  misc_feature (1)..(264): NCBI GI NO: 38346151 NR Description: OSJNBb0118P14.11
  misc_feature (1)..(258): NCBI GI NO: 118926 NR Description: Desiccation-related protein PCC13-62 precursor
  misc_feature (1)..(262): NCBI GI NO: 22984403 NR Description: hypothetical protein [Burkholderia fungorum]
  misc_feature (11)..(259): NCBI GI NO: 16263242 NR Description: Conserved hypothetical protein

SEQ ID NO: 28065 - DNA, 854 bp, Zea mays subsp. mays
  misc_feature (1)..(854): Ceres Seq. ID no. 12409092
acatcgccccagccccaagtccaaagccgcgagaggcaagggcgcagcaaaaccctagccgccttcccgtccttttcctttcataaaccccaagccgcgccgcaatagctcgccccctcgttcgccgcctctcctgctcctaccgcagctctccctcaggtttagtgttcgcaatggcggccttcaacaagcttggtggccttctaaggcacagtgctctggtgagcggtatcactggtggctcttctcctgcagtgttcaatgctgcacggctcatgtctaccaagctatttattggtggtcttgactggggtgttgatgacgtgaaactaagagaagcatttagcagctttggagaggttactgaagcgagggtgatcacagacagggagactgggaggtcaagaggctttggctttgtgaactactccgacagtgatgctgccaaggaagctatttctgcaatggatggcaaggaaattgatgggcggcaggtacgtgtcaacatggctaatgagagacctgctgggaaccgtggtggtggtggctatggcggcggcggctatggaggtggtggctacggaggtggcggcggctacggaggtggtggctatggtggtggcagccaaagctatgatgcttgaggggggcaggatcctattaggtgcattatcaaccaagatatttgaaataatgaactttaggacttggtatgacgttttatgttaagcgttgtcaggttttgctattcgtgttatgctgaattgttggaactcctagatgcagaatcttacgtattggttttggttccttcgagaagtgcaaatgcaagacgcatctattcccattgagtg

SEQ ID NO: 28066 - protein, 156 aa, Zea mays subsp. mays
  peptide (1)..(156): Ceres Seq. ID no. 12409093
  misc_feature (39)..(110): Pfam Name: a.k.a. RRM, RBD, or RNP domain Pfam Description: RNA recognition motif.
  misc_feature (1)..(149): NCBI GI NO: 34906972 NR Description: putative glycine-rich RNA-binding protein 2
  misc_feature (1)..(150): NCBI GI NO: 15236359 NR Description: glycine-rich RNA-binding protein AtGRP2
  misc_feature (1)..(150): NCBI GI NO: 30682622 NR Description: glycine-rich RNA-binding protein (AtGRP2)
  misc_feature (1)..(150): NCBI GI NO: 2826811 NR Description: AtGRP2 [Arabidopsis thaliana]
  misc_feature (27)..(150): NCBI GI NO: 322514 NR Description: glycine-rich RNA-binding protein
  misc_feature (1)..(156): NCBI GI NO: 15239505 NR Description: glycine-rich RNA-binding protein
  misc_feature (1)..(147): NCBI GI NO: 7439994 NR Description: glycine-rich RNA-binding protein - garden pea
  misc_feature (1)..(137): NCBI GI NO: 7439995 NR Description: RNA binding protein 3 - wood tobacco
  misc_feature (1)..(142): NCBI GI NO: 15229525 NR Description: glycine-rich RNA-binding protein
  misc_feature (1)..(142): NCBI GI NO: 21553972 NR Description: glycine-rich RNA binding protein, putative
MAAFNKLGGLLRHSALVSGITGGSSPAVFNAARLMSTKLFIGGLDWGVDDVKLREAFSSFGEVTEARVITDRETGRSRGFGFVNYSDSDAAKEAISAMDGKEIDGRQVRVNMANERPAGNRGGGGYGGGGYGGGGYGGGGGYGGGGYGGGSQSYDA

SEQ ID NO: 28067 - protein, 122 aa, Zea mays subsp. mays
  peptide (1)..(122): Ceres Seq. ID no. 12409094
  misc_feature (5)..(76): Pfam Name: a.k.a. RRM, RBD, or RNP domain Pfam Description: RNA recognition motif.
  misc_feature (1)..(115): NCBI GI NO: 34906972 NR Description: putative glycine-rich RNA-binding protein 2
  misc_feature (1)..(116): NCBI GI NO: 15236359 NR Description: glycine-rich RNA-binding protein AtGRP2
  misc_feature (1)..(116): NCBI GI NO: 30682622 NR Description: glycine-rich RNA-binding protein (AtGRP2)
  misc_feature (1)..(116): NCBI GI NO: 2826811 NR Description: AtGRP2 [Arabidopsis thaliana]
  misc_feature (1)..(116): NCBI GI NO: 322514 NR Description: glycine-rich RNA-binding protein
  misc_feature (1)..(122): NCBI GI NO: 15239505 NR Description: glycine-rich RNA-binding protein
  misc_feature (1)..(113): NCBI GI NO: 7439994 NR Description: glycine-rich RNA-binding protein - garden pea
  misc_feature (1)..(103): NCBI GI NO: 7439995 NR Description: RNA binding protein 3 - wood tobacco
  misc_feature (1)..(108): NCBI GI NO: 15229525 NR Description: glycine-rich RNA-binding protein
  misc_feature (1)..(108): NCBI GI NO: 21553972 NR Description: glycine-rich RNA binding protein, putative
MSTKLFIGGLDWGVDDVKLREAFSSFGEVTEARVITDRETGRSRGFGFVNYSDSDAAKEAISAMDGKEIDGRQVRVNMANERPAGNRGGGGYGGGGYGGGGYGGGGGYGGGGYGGGSQSYDA

SEQ ID NO: 28068 - protein, 96 aa, Zea mays subsp. mays
  peptide (1)..(96): Ceres Seq. ID no. 12409095
MLPRKLFLQWMARKLMGGRYVSTWLMRDLLGTVVVVAMAAAAMEVVATEVAAATEVVAMVVAAKAMMLEGGRILLGALSTKIFEIMNFRTWYDVLC

SEQ ID NO: 28069 - DNA, 620 bp, Zea mays subsp. mays
  misc_feature (1)..(620): Ceres Seq. ID no. 12367118
aaatcccccaaacatttcgtcgaatccgccgtgagatccgcccgactctcgctccgttccggcgctctcggtcgggcgaaggctccaccttcctccgacaagatggcggggaagggagccaaggccacggccgccaagtcggcggacaaggacaaggggaagaagaccggcggccccgtctcgcgctcctcccgcgccgcaccccaggagaagtcagctccgaagaaagatgtttatcaattgttcgctgagaaggtcagggataacaaacaactggaatcaagatgggcgatcatgcaagaaacccgcgtggagtatttccgtggaaaagatttcaataccttcgtcaaaaatcatccagaagtcagggaaattttggggccagataaggatttagaggtggaagacattgttaacactttgctgaccaagaaccttgtgataaggtgtgatcgagtcatgaaaactgtgaggcctggcaagaaaaagctatcgtcatggcctgctcatttggagatacataatgaacaagtgtttactgaaaatgatgggttttttgcttggatgtttctgaaaagaaggaccttgtggcagacaattccttcttttcagaaacatcc

SEQ ID NO: 28070 - protein, 206 aa, Zea mays subsp. mays
  peptide (1)..(206): Ceres Seq. ID no. 12367119
  misc_feature (101)..(203): Pfam Name: Pfam Description:  Translocation protein Sec62
  misc_feature (48)..(203): NCBI GI NO: 18402801 NR Description: expressed protein; protein id: At3g20920
  misc_feature (48)..(203): NCBI GI NO: 21593719 NR Description: unknown [Arabidopsis thaliana]
KSPKHFVESAVRSARLSLRSGALGRAKAPPSSDKMAGKGAKATAAKSADKDKGKKTGGPVSRSSRAAPQEKSAPKKDVYQLFAEKVRDNKQLESRWAIMQETRVEYFRGKDFNTFVKNHPEVREILGPDKDLEVEDIVNTLLTKNLVIRCDRVMKTVRPGKKKLSSWPAHLEIHNEQVFTENDGFFAWMFLKRRTLWQTIPSFQKH

SEQ ID NO: 28071 - protein, 172 aa, Zea mays subsp. mays
  peptide (1)..(172): Ceres Seq. ID no. 12367120
  misc_feature (67)..(169): Pfam Name: Pfam Description:  Translocation protein Sec62
  misc_feature (14)..(169): NCBI GI NO: 18402801 NR Description: expressed protein; protein id: At3g20920
  misc_feature (14)..(169): NCBI GI NO: 21593719 NR Description: unknown [Arabidopsis thaliana]
MAGKGAKATAAKSADKDKGKKTGGPVSRSSRAAPQEKSAPKKDVYQLFAEKVRDNKQLESRWAIMQETRVEYFRGKDFNTFVKNHPEVREILGPDKDLEVEDIVNTLLTKNLVIRCDRVMKTVRPGKKKLSSWPAHLEIHNEQVFTENDGFFAWMFLKRRTLWQTIPSFQKH

SEQ ID NO: 28072 - protein, 108 aa, Zea mays subsp. mays
  peptide (1)..(108): Ceres Seq. ID no. 12367121
  misc_feature (3)..(105): Pfam Name: Pfam Description:  Translocation protein Sec62
  misc_feature (1)..(105): NCBI GI NO: 18402801 NR Description: expressed protein; protein id: At3g20920
  misc_feature (1)..(105): NCBI GI NO: 21593719 NR Description: unknown [Arabidopsis thaliana]
MQETRVEYFRGKDFNTFVKNHPEVREILGPDKDLEVEDIVNTLLTKNLVIRCDRVMKTVRPGKKKLSSWPAHLEIHNEQVFTENDGFFAWMFLKRRTLWQTIPSFQKH

SEQ ID NO: 28073 - DNA, 1403 bp, Zea mays subsp. mays
  misc_feature (1)..(1403): Ceres Seq. ID no. 13498720
gtcttccctgatcccttcgctccccgaagcaaaagcgcagagcgcatcagcgcagagtaggacagccatggcgacggcggcggcgcagtcccatccggcatcgatggacgcgcgccggtgggacgagtcatcgtaccgccgcggcatcctccgtgcccgcgacctctcgtcccgcaccctcttccgtgccgtcttctttgaccacagcgacgacccggataccgacatcctactcgccgccgcctccagcgacggctccctcgcttccttctccctttcatcctgcatctccgcatgttccgctacctcccaggtggagaccgccgccactctggtagatcctgtctgcatcgtgcaagcgcacagcggacctgcctacgacgtcaggttttaccccgatcaacagcagccgctgctcttcagctgcggggacgatggccgcatcaagggttggaggtggcacgagatgcagagctgccttgtcccgctctccctgcaaggggatcatctggaaccagcacttgacttggtcaaccctcagcacgagggtccttggggtgctcgatctccagtacctgaaaacaatgccattgcaattaataaacaggatggatccattttggcagcagcgggtgatgcatgtgcttactgctgggatgtggagaccagtaaatgtaaaatcacattcaaggggcatgctgattatttgcacagcattgcagttcgtgagtcaaaccgccaggttgtaacaggatcagaggatgggacagctcgtatctgggattgcagaagtgggaagtgcactcgggttatacagccaggaaagagcaaggcatttgaaagctcatgggtcagctgtgttgctattgatccaagtgaaagttggctggcttgtggcacgtctagcggtatatcagtttggagtcttctctcaaatgagtgcatctttaatttggactgtcatgctcctgttcaagatttattgtttgacaagaatcatattttagcagttggcgctgaacctctgctctcccgtctcacaataaacgggacagtcctttcacaagtaaaatgtgcccctcagtcggcgttttctgtctccatccactcaactgggatagcagctgttgctggatacggaggtctggtggatgtgatctcagaagttgggagccatctgtgcacattcggtagccggggcctagacaagtaaatgacccatgagcattccttgcgaacagcgcgcggagaatgcgagggctgtatctctttgcactgcagttgcacaagtttcatggaacgttgtcgctgacaatgctctactgaacaaagatagctagacggtaaaaaaaaacatttgatactagttcgagctaaacaaagttctgctctgacatctcttc

SEQ ID NO: 28074 - protein, 403 aa, Zea mays subsp. mays
  peptide (1)..(403): Ceres Seq. ID no. 13498721
  misc_feature (36)..(401): NCBI GI NO: 30680669 NR Description: transducin / WD-40 repeat protein family
  misc_feature (36)..(338): NCBI GI NO: 7486245 NR Description: probable WD-40 repeat protein
  misc_feature (139)..(338): NCBI GI NO: 22761350 NR Description: unnamed protein product [Homo sapiens]
  misc_feature (191)..(388): NCBI GI NO: 21358289 NR Description: CG5632-PA [Drosophila melanogaster]
  misc_feature (195)..(400): NCBI GI NO: 17230958 NR Description: WD-40 repeat protein [Nostoc sp. PCC 7120]
  misc_feature (195)..(346): NCBI GI NO: 17230958 NR Description: WD-40 repeat protein [Nostoc sp. PCC 7120]
  misc_feature (203)..(340): NCBI GI NO: 37520744 NR Description: WD-repeat protein [Gloeobacter violaceus]
  misc_feature (195)..(400): NCBI GI NO: 17230958 NR Description: WD-40 repeat protein [Nostoc sp. PCC 7120]
  misc_feature (196)..(377): NCBI GI NO: 17230958 NR Description: WD-40 repeat protein [Nostoc sp. PCC 7120]
  misc_feature (196)..(329): NCBI GI NO: 17225210 NR Description: beta transducin-like protein HET-D2Y
SSLIPSLPEAKAQSASAQSRTAMATAAAQSHPASMDARRWDESSYRRGILRARDLSSRTLFRAVFFDHSDDPDTDILLAAASSDGSLASFSLSSCISACSATSQVETAATLVDPVCIVQAHSGPAYDVRFYPDQQQPLLFSCGDDGRIKGWRWHEMQSCLVPLSLQGDHLEPALDLVNPQHEGPWGARSPVPENNAIAINKQDGSILAAAGDACAYCWDVETSKCKITFKGHADYLHSIAVRESNRQVVTGSEDGTARIWDCRSGKCTRVIQPGKSKAFESSWVSCVAIDPSESWLACGTSSGISVWSLLSNECIFNLDCHAPVQDLLFDKNHILAVGAEPLLSRLTINGTVLSQVKCAPQSAFSVSIHSTGIAAVAGYGGLVDVISEVGSHLCTFGSRGLDK

SEQ ID NO: 28075 - protein, 381 aa, Zea mays subsp. mays
  peptide (1)..(381): Ceres Seq. ID no. 13498722
  misc_feature (14)..(379): NCBI GI NO: 30680669 NR Description: transducin / WD-40 repeat protein family
  misc_feature (14)..(316): NCBI GI NO: 7486245 NR Description: probable WD-40 repeat protein
  misc_feature (117)..(316): NCBI GI NO: 22761350 NR Description: unnamed protein product [Homo sapiens]
  misc_feature (169)..(366): NCBI GI NO: 21358289 NR Description: CG5632-PA [Drosophila melanogaster]
  misc_feature (173)..(378): NCBI GI NO: 17230958 NR Description: WD-40 repeat protein [Nostoc sp. PCC 7120]
  misc_feature (173)..(324): NCBI GI NO: 17230958 NR Description: WD-40 repeat protein [Nostoc sp. PCC 7120]
  misc_feature (181)..(318): NCBI GI NO: 37520744 NR Description: WD-repeat protein [Gloeobacter violaceus]
  misc_feature (173)..(378): NCBI GI NO: 17230958 NR Description: WD-40 repeat protein [Nostoc sp. PCC 7120]
  misc_feature (174)..(355): NCBI GI NO: 17230958 NR Description: WD-40 repeat protein [Nostoc sp. PCC 7120]
  misc_feature (174)..(307): NCBI GI NO: 17225210 NR Description: beta transducin-like protein HET-D2Y
MATAAAQSHPASMDARRWDESSYRRGILRARDLSSRTLFRAVFFDHSDDPDTDILLAAASSDGSLASFSLSSCISACSATSQVETAATLVDPVCIVQAHSGPAYDVRFYPDQQQPLLFSCGDDGRIKGWRWHEMQSCLVPLSLQGDHLEPALDLVNPQHEGPWGARSPVPENNAIAINKQDGSILAAAGDACAYCWDVETSKCKITFKGHADYLHSIAVRESNRQVVTGSEDGTARIWDCRSGKCTRVIQPGKSKAFESSWVSCVAIDPSESWLACGTSSGISVWSLLSNECIFNLDCHAPVQDLLFDKNHILAVGAEPLLSRLTINGTVLSQVKCAPQSAFSVSIHSTGIAAVAGYGGLVDVISEVGSHLCTFGSRGLDK

SEQ ID NO: 28076 - protein, 369 aa, Zea mays subsp. mays
  peptide (1)..(369): Ceres Seq. ID no. 13498723
  misc_feature (2)..(367): NCBI GI NO: 30680669 NR Description: transducin / WD-40 repeat protein family
  misc_feature (2)..(304): NCBI GI NO: 7486245 NR Description: probable WD-40 repeat protein
  misc_feature (105)..(304): NCBI GI NO: 22761350 NR Description: unnamed protein product [Homo sapiens]
  misc_feature (157)..(354): NCBI GI NO: 21358289 NR Description: CG5632-PA [Drosophila melanogaster]
  misc_feature (161)..(366): NCBI GI NO: 17230958 NR Description: WD-40 repeat protein [Nostoc sp. PCC 7120]
  misc_feature (161)..(312): NCBI GI NO: 17230958 NR Description: WD-40 repeat protein [Nostoc sp. PCC 7120]
  misc_feature (169)..(306): NCBI GI NO: 37520744 NR Description: WD-repeat protein [Gloeobacter violaceus]
  misc_feature (161)..(366): NCBI GI NO: 17230958 NR Description: WD-40 repeat protein [Nostoc sp. PCC 7120]
  misc_feature (162)..(343): NCBI GI NO: 17230958 NR Description: WD-40 repeat protein [Nostoc sp. PCC 7120]
  misc_feature (162)..(295): NCBI GI NO: 17225210 NR Description: beta transducin-like protein HET-D2Y
MDARRWDESSYRRGILRARDLSSRTLFRAVFFDHSDDPDTDILLAAASSDGSLASFSLSSCISACSATSQVETAATLVDPVCIVQAHSGPAYDVRFYPDQQQPLLFSCGDDGRIKGWRWHEMQSCLVPLSLQGDHLEPALDLVNPQHEGPWGARSPVPENNAIAINKQDGSILAAAGDACAYCWDVETSKCKITFKGHADYLHSIAVRESNRQVVTGSEDGTARIWDCRSGKCTRVIQPGKSKAFESSWVSCVAIDPSESWLACGTSSGISVWSLLSNECIFNLDCHAPVQDLLFDKNHILAVGAEPLLSRLTINGTVLSQVKCAPQSAFSVSIHSTGIAAVAGYGGLVDVISEVGSHLCTFGSRGLDK

SEQ ID NO: 28077 - DNA, 1495 bp, Zea mays subsp. mays
  misc_feature (1)..(1495): Ceres Seq. ID no. 12366927
acaacacctcatcacaaacacaaagacagccagccagagccagccagagccagccatcactgatcatagcatcagcagcttagtataccgtaccgctccacatccgagctagaagaagaagcccgcgcggccagtacctgcctagcggcgcgagcgaagcagagatggcgagagcgctgccgctggtgctcgcggcgtccgtcctgctggcggccgccgcgctgctgctggccgcggcgccggcgccggcggccgcggtcgacttcggcgcggaggacctggcgtcggaggaggcgctgtgggcgctgtacgagcgctggcgcggccgccacgcggtggcgcgggacctgggcgacaaggcgcgccgcttcaacgtcttcaaggccaacgtgcgcctcatccacgagttcaaccgccgggacgagccctacaagctccgcctcaaccgcttcggcgacatgaccgccgacgagttccgacgccactacgcgggctccagggtcgcgcaccaccgcatgttccgcggcgacaggcagggctcctcggcgtcggcgtcgttcatgtacgccgacgcgcgcgacgtcccggcctccgtcgactggaggcagaagggcgccgtcaccgacgtcaaggaccagggccagtgcggtagctgctgggcgttctcgacgatcgccgccgtggagggcatcaacgcgatcaagaccaagaacctgacgtcgctgtcggagcagcagctggtggactgcgacaccaaggccaacgccggctgcaacgggggcctcatggactacgcgttccagtacatcgccaagcacggcggggtggcggcggaggacgcgtacccgtacagagcgcgccaggcgtcctgcaagaagtcgccggccccggtcgtcaccatcgacggctacgaggacgtgccggccaacgacgagtcggcgctcaagaaggcggtggcgcaccagcccgtgtccgtcgccatcgaggccagtggctcgcacttccagttctactccgagggggtcttctccggcaggtgcgggacggagctggaccacggcgtcgcggcggtcggctacggggtcaccgcggacggcaccaagtactggctggtcaagaactcgtggggccccgagtggggcgagaaggggtacatccgcatggcgcgcgacgtggccgccaaggagggacactgcggcatcgccatggaggcatcctaccccgtcaagacctcgcccaaccccaaggtccacgccgtcgtcgacgaggacggctccagccacgacgagctctgaattgcgcactacactactacgtactagctatagcctatatagctatactatgattgatccatgtatgctcggacaggaacatcgccgactgtgaatgtctgaatggcatacgcacatcttacacctgcattcatgtaataccagtcgagagttgatcttccagcaactttcatttcattcggttattattatattatttg

SEQ ID NO: 28078 - protein, 376 aa, Zea mays subsp. mays
  peptide (1)..(376): Ceres Seq. ID no. 12366928
  misc_feature (140)..(354): Pfam Name: Pfam Description:  Papain family cysteine protease
  misc_feature (9)..(361): NCBI GI NO: 40806500 NR Description: putative cysteine protease 2 [Iris hollandica]
  misc_feature (12)..(368): NCBI GI NO: 537437 NR Description: cysteine proteinase [Hemerocallis hybrid cultivar]
  misc_feature (20)..(368): NCBI GI NO: 4731374 NR Description: papain-like cysteine protease
  misc_feature (13)..(376): NCBI GI NO: 7435798 NR Description: probable cysteine proteinase (EC 3
  misc_feature (17)..(368): NCBI GI NO: 1169186 NR Description: Thiol protease SEN102 precursor
  misc_feature (14)..(368): NCBI GI NO: 1173630 NR Description: cysteine proteinase
  misc_feature (19)..(360): NCBI GI NO: 18423124 NR Description: cysteine proteinase; protein id: At5g50260
  misc_feature (19)..(359): NCBI GI NO: 7435817 NR Description: cysteine endopeptidase (EC 3
  misc_feature (13)..(376): NCBI GI NO: 7435797 NR Description: cysteine proteinase (EC 3.4.22.-) - barley
  misc_feature (13)..(376): NCBI GI NO: 4100157 NR Description: cysteine proteinase precursor [Hordeum vulgare]
MARALPLVLAASVLLAAAALLLAAAPAPAAAVDFGAEDLASEEALWALYERWRGRHAVARDLGDKARRFNVFKANVRLIHEFNRRDEPYKLRLNRFGDMTADEFRRHYAGSRVAHHRMFRGDRQGSSASASFMYADARDVPASVDWRQKGAVTDVKDQGQCGSCWAFSTIAAVEGINAIKTKNLTSLSEQQLVDCDTKANAGCNGGLMDYAFQYIAKHGGVAAEDAYPYRARQASCKKSPAPVVTIDGYEDVPANDESALKKAVAHQPVSVAIEASGSHFQFYSEGVFSGRCGTELDHGVAAVGYGVTADGTKYWLVKNSWGPEWGEKGYIRMARDVAAKEGHCGIAMEASYPVKTSPNPKVHAVVDEDGSSHDEL

SEQ ID NO: 28079 - protein, 278 aa, Zea mays subsp. mays
  peptide (1)..(278): Ceres Seq. ID no. 12366929
  misc_feature (42)..(256): Pfam Name: Pfam Description:  Papain family cysteine protease
  misc_feature (1)..(263): NCBI GI NO: 40806500 NR Description: putative cysteine protease 2 [Iris hollandica]
  misc_feature (1)..(270): NCBI GI NO: 537437 NR Description: cysteine proteinase [Hemerocallis hybrid cultivar]
  misc_feature (1)..(270): NCBI GI NO: 4731374 NR Description: papain-like cysteine protease
  misc_feature (1)..(278): NCBI GI NO: 7435798 NR Description: probable cysteine proteinase (EC 3
  misc_feature (1)..(270): NCBI GI NO: 1169186 NR Description: Thiol protease SEN102 precursor
  misc_feature (1)..(270): NCBI GI NO: 1173630 NR Description: cysteine proteinase
  misc_feature (1)..(262): NCBI GI NO: 18423124 NR Description: cysteine proteinase; protein id: At5g50260
  misc_feature (1)..(261): NCBI GI NO: 7435817 NR Description: cysteine endopeptidase (EC 3
  misc_feature (1)..(278): NCBI GI NO: 7435797 NR Description: cysteine proteinase (EC 3.4.22.-) - barley
  misc_feature (1)..(278): NCBI GI NO: 4100157 NR Description: cysteine proteinase precursor [Hordeum vulgare]
MTADEFRRHYAGSRVAHHRMFRGDRQGSSASASFMYADARDVPASVDWRQKGAVTDVKDQGQCGSCWAFSTIAAVEGINAIKTKNLTSLSEQQLVDCDTKANAGCNGGLMDYAFQYIAKHGGVAAEDAYPYRARQASCKKSPAPVVTIDGYEDVPANDESALKKAVAHQPVSVAIEASGSHFQFYSEGVFSGRCGTELDHGVAAVGYGVTADGTKYWLVKNSWGPEWGEKGYIRMARDVAAKEGHCGIAMEASYPVKTSPNPKVHAVVDEDGSSHDEL

SEQ ID NO: 28080 - protein, 259 aa, Zea mays subsp. mays
  peptide (1)..(259): Ceres Seq. ID no. 12366930
  misc_feature (23)..(237): Pfam Name: Pfam Description:  Papain family cysteine protease
  misc_feature (1)..(244): NCBI GI NO: 40806500 NR Description: putative cysteine protease 2 [Iris hollandica]
  misc_feature (1)..(251): NCBI GI NO: 537437 NR Description: cysteine proteinase [Hemerocallis hybrid cultivar]
  misc_feature (1)..(251): NCBI GI NO: 4731374 NR Description: papain-like cysteine protease
  misc_feature (1)..(259): NCBI GI NO: 7435798 NR Description: probable cysteine proteinase (EC 3
  misc_feature (1)..(251): NCBI GI NO: 1169186 NR Description: Thiol protease SEN102 precursor
  misc_feature (1)..(251): NCBI GI NO: 1173630 NR Description: cysteine proteinase
  misc_feature (1)..(243): NCBI GI NO: 18423124 NR Description: cysteine proteinase; protein id: At5g50260
  misc_feature (1)..(242): NCBI GI NO: 7435817 NR Description: cysteine endopeptidase (EC 3
  misc_feature (1)..(259): NCBI GI NO: 7435797 NR Description: cysteine proteinase (EC 3.4.22.-) - barley
  misc_feature (1)..(259): NCBI GI NO: 4100157 NR Description: cysteine proteinase precursor [Hordeum vulgare]
MFRGDRQGSSASASFMYADARDVPASVDWRQKGAVTDVKDQGQCGSCWAFSTIAAVEGINAIKTKNLTSLSEQQLVDCDTKANAGCNGGLMDYAFQYIAKHGGVAAEDAYPYRARQASCKKSPAPVVTIDGYEDVPANDESALKKAVAHQPVSVAIEASGSHFQFYSEGVFSGRCGTELDHGVAAVGYGVTADGTKYWLVKNSWGPEWGEKGYIRMARDVAAKEGHCGIAMEASYPVKTSPNPKVHAVVDEDGSSHDEL

SEQ ID NO: 28081 - DNA, 1060 bp, Zea mays subsp. mays
  misc_feature (1)..(1060): Ceres Seq. ID no. 12344755
gtcagctcttgcgagaagcacccaaattggagtactgtgaagtctgaaccggctggcctggccgttgctgagggagaggataaaagaacaccgaaatgccactcctgctgctcccaccaccggcgtgcaccacggcagcgacgtcgctcgctttcttgcggccccggccttcgcgggcgcgttgggccaacctctcttacgcgttcccccgcctgaggaaatacgggcgtcgccaccgcgagcccgtggccggccccagcctcgatgatgatggcggcgaggaggatgagacggaggcagaggactgggagtccgacgagggcgaggaagagatggaggtagacgaggaggagtttctggcgatgcggcccaaaccggcgggatttggcgaggggaaaacatattccactgacattgaggagcagcttctccgggagatgggctttggtgggggcgcggcgcggcgaggagaggcggccccggccaatcgccgcgccggggatagttccaccaaagtagctgccgcagatgtcagtgccgatggtgttcaagttcgtgtttggaacctcccaaaaaagaaaaacatacacaaggacctgaagcaagcttttaaagggtttcatggccttttatccattgatccagcagtttccgcaaataagaaaacccgtgatcctatttgtaagggttttgcatatctcaaactagagtctgctgaggctgcaacaaggttcgtggagatatactctcatcaaactgtgtcatttggcaagattcagaagccaatcagttgcggtatcatcgataaacgcagctctgttgagcattcaaataagcatccagtagtcaggcaatccctcaattaatgtccaagcaccaaaacttggtagcggcaagttgagtaacacatatctgtcatctagcacaagtaatcacgcacttctagggatctcaagttttacgaaaaagctttgataaacagatagattagacagttctctgtattccaaataactgtttgtatcaagcaatttggtagtttggtcttgtttttttaggg

SEQ ID NO: 28082 - protein, 256 aa, Zea mays subsp. mays
  peptide (1)..(256): Ceres Seq. ID no. 12344756
  misc_feature (45)..(237): NCBI GI NO: 25406039 NR Description: F20P5.8 [imported] - Arabidopsis thaliana
  misc_feature (45)..(237): NCBI GI NO: 30698005 NR Description: RNA recognition motif (RRM)-containing protein
MPLLLLPPPACTTAATSLAFLRPRPSRARWANLSYAFPRLRKYGRRHREPVAGPSLDDDGGEEDETEAEDWESDEGEEEMEVDEEEFLAMRPKPAGFGEGKTYSTDIEEQLLREMGFGGGAARRGEAAPANRRAGDSSTKVAAADVSADGVQVRVWNLPKKKNIHKDLKQAFKGFHGLLSIDPAVSANKKTRDPICKGFAYLKLESAEAATRFVEIYSHQTVSFGKIQKPISCGIIDKRSSVEHSNKHPVVRQSLN

SEQ ID NO: 28083 - protein, 177 aa, Zea mays subsp. mays
  peptide (1)..(177): Ceres Seq. ID no. 12344757
  misc_feature (1)..(158): NCBI GI NO: 25406039 NR Description: F20P5.8 [imported] - Arabidopsis thaliana
  misc_feature (1)..(158): NCBI GI NO: 30698005 NR Description: RNA recognition motif (RRM)-containing protein
MEVDEEEFLAMRPKPAGFGEGKTYSTDIEEQLLREMGFGGGAARRGEAAPANRRAGDSSTKVAAADVSADGVQVRVWNLPKKKNIHKDLKQAFKGFHGLLSIDPAVSANKKTRDPICKGFAYLKLESAEAATRFVEIYSHQTVSFGKIQKPISCGIIDKRSSVEHSNKHPVVRQSLN

SEQ ID NO: 28084 - protein, 167 aa, Zea mays subsp. mays
  peptide (1)..(167): Ceres Seq. ID no. 12344758
  misc_feature (1)..(148): NCBI GI NO: 25406039 NR Description: F20P5.8 [imported] - Arabidopsis thaliana
  misc_feature (1)..(148): NCBI GI NO: 30698005 NR Description: RNA recognition motif (RRM)-containing protein
MRPKPAGFGEGKTYSTDIEEQLLREMGFGGGAARRGEAAPANRRAGDSSTKVAAADVSADGVQVRVWNLPKKKNIHKDLKQAFKGFHGLLSIDPAVSANKKTRDPICKGFAYLKLESAEAATRFVEIYSHQTVSFGKIQKPISCGIIDKRSSVEHSNKHPVVRQSLN

SEQ ID NO: 28085 - DNA, 1320 bp, Zea mays subsp. mays
  misc_feature (1)..(1320): Ceres Seq. ID no. 12407729
  misc_feature (740)..(740): n is a, c, t, g, unknown, or other
gtacaatccgatgtaaacgaacaaggcctaagacgtactgcagcggcagcgcaccacatctgaccctaccaccatggcatccgcggggacgacggcggtggtgcccgaggtggccctgcggtcgggcaacgcgaggacggcgatgccgatggtcggcatgggcacggcgtcgttccctctggtgcacgaggccgtcaaggacggccgtgctctccgccatcgaggtggggttccgccacttcgacactgcctccatgtacggcaccgagaagccgctgggcgacgccgtggccgaggcgctccggcgcgggaccctgcggtcccgggaggatctgttcgtgacgtccaagctgtggtgctcgcagaaccacccggacctcgtgctgccgtccctccgggaaacactcaagaacctgcagatggagtacgtggatctgtacctgatccactggccggtgtgcctgaaaccggggccgcccgagctcccgaccaggaaggagaacgccgtgccgctggacctcgcgggtgtgtggcgcgccatggaggagtgccagcggctgggcctcgccaaggcgatcggcgtgagcaacttcaccaccaggcacctcgacggggtcctggccgtcgccacggtcccgcccgcggtgaaccaggtggagctgaacccgggcgtggccagcagcggacgctcagggcgtactgcgccgacaggggcatccacgtcgcggcctactcgccgntggaagggcagaactgggacgggcagggcagcgccgtgctggactccgaggtgctcgccgcgatagccaaggcgagggggaaaaccgtcgcgcaggtggcgttgcgatggatacatgagcagggagtgacatgcatcgtcaagagttacagcaaggagaggctgaggcagaaccttgggatattcgactgggagctgaccgacgaggagcggctcaagatcagccagatcccgcagaggaaggttgtccagactagtagcttgttctcgcaagagggtgagttcacggctgttgatccagcggaacttaatattttagaggaatagggggaaaatgacccgccacacatacactgcatcagtgttgctgcatacaaaagtgtatttcgtagaccatttgaataaggctgttggaaacggtgacatctagtgctgtttggtttcgttgccgggacggtaacatctacagttaatgctgcaatccattaacggaacggaggggaatggatagcgctcgtttatgagtggtttcattactgttataagactgtttcagcaacatttactaaatttcattctct

SEQ ID NO: 28086 - protein, 330 aa, Zea mays subsp. mays
  peptide (1)..(330): Ceres Seq. ID no. 12407730
  misc_feature (202)..(330): NCBI GI NO: 38344824 NR Description: OSJNBa0064H22.5
  misc_feature (202)..(330): NCBI GI NO: 38344823 NR Description: OSJNBa0064H22.4
  misc_feature (202)..(329): NCBI GI NO: 38344822 NR Description: OSJNBa0064H22.3
  misc_feature (202)..(321): NCBI GI NO: 40781599 NR Description: reductase 1 [Hydrangea macrophylla]
  misc_feature (202)..(321): NCBI GI NO: 27357979 NR Description: Putative NADPH-dependent oxidoreductase
  misc_feature (202)..(321): NCBI GI NO: 6478216 NR Description: putative NADPH-dependent oxidoreductase
  misc_feature (202)..(321): NCBI GI NO: 37530522 NR Description: putative NADPH-dependent oxidoreductase
  misc_feature (202)..(321): NCBI GI NO: 40781598 NR Description: reductase 2 [Hydrangea macrophylla]
  misc_feature (202)..(305): NCBI GI NO: 112837 NR Description: NAD(P)H dependent 6'-deoxychalcone synthase
  misc_feature (202)..(301): NCBI GI NO: 37530540 NR Description: putative NADPH-dependent oxidoreductase
  misc_feature (223)..(223): Xaa is any aa, unknown or other
MASAGTTAVVPEVALRSGNARTAMPMVGMGTASFPLVHEAVKDGRALRHRGGVPPLRHCLHVRHREAAGRRRGRGAPARDPAVPGGSVRDVQAVVLAEPPGPRAAVPPGNTQEPADGVRGSVPDPLAGVPETGAARAPDQEGERRAAGPRGCVARHGGVPAAGPRQGDRREQLHHQAPRRGPGRRHGPARGEPGGAEPGRGQQRTLRAYCADRGIHVAAYSPXEGQNWDGQGSAVLDSEVLAAIAKARGKTVAQVALRWIHEQGVTCIVKSYSKERLRQNLGIFDWELTDEERLKISQIPQRKVVQTSSLFSQEGEFTAVDPAELNILEE

SEQ ID NO: 28087 - protein, 307 aa, Zea mays subsp. mays
  peptide (1)..(307): Ceres Seq. ID no. 12407731
  misc_feature (179)..(307): NCBI GI NO: 38344824 NR Description: OSJNBa0064H22.5
  misc_feature (179)..(307): NCBI GI NO: 38344823 NR Description: OSJNBa0064H22.4
  misc_feature (179)..(306): NCBI GI NO: 38344822 NR Description: OSJNBa0064H22.3
  misc_feature (179)..(298): NCBI GI NO: 40781599 NR Description: reductase 1 [Hydrangea macrophylla]
  misc_feature (179)..(298): NCBI GI NO: 27357979 NR Description: Putative NADPH-dependent oxidoreductase
  misc_feature (179)..(298): NCBI GI NO: 6478216 NR Description: putative NADPH-dependent oxidoreductase
  misc_feature (179)..(298): NCBI GI NO: 37530522 NR Description: putative NADPH-dependent oxidoreductase
  misc_feature (179)..(298): NCBI GI NO: 40781598 NR Description: reductase 2 [Hydrangea macrophylla]
  misc_feature (179)..(282): NCBI GI NO: 112837 NR Description: NAD(P)H dependent 6'-deoxychalcone synthase
  misc_feature (179)..(278): NCBI GI NO: 37530540 NR Description: putative NADPH-dependent oxidoreductase
  misc_feature (200)..(200): Xaa is any aa, unknown or other
MPMVGMGTASFPLVHEAVKDGRALRHRGGVPPLRHCLHVRHREAAGRRRGRGAPARDPAVPGGSVRDVQAVVLAEPPGPRAAVPPGNTQEPADGVRGSVPDPLAGVPETGAARAPDQEGERRAAGPRGCVARHGGVPAAGPRQGDRREQLHHQAPRRGPGRRHGPARGEPGGAEPGRGQQRTLRAYCADRGIHVAAYSPXEGQNWDGQGSAVLDSEVLAAIAKARGKTVAQVALRWIHEQGVTCIVKSYSKERLRQNLGIFDWELTDEERLKISQIPQRKVVQTSSLFSQEGEFTAVDPAELNILEE

SEQ ID NO: 28088 - protein, 305 aa, Zea mays subsp. mays
  peptide (1)..(305): Ceres Seq. ID no. 12407732
  misc_feature (177)..(305): NCBI GI NO: 38344824 NR Description: OSJNBa0064H22.5
  misc_feature (177)..(305): NCBI GI NO: 38344823 NR Description: OSJNBa0064H22.4
  misc_feature (177)..(304): NCBI GI NO: 38344822 NR Description: OSJNBa0064H22.3
  misc_feature (177)..(296): NCBI GI NO: 40781599 NR Description: reductase 1 [Hydrangea macrophylla]
  misc_feature (177)..(296): NCBI GI NO: 27357979 NR Description: Putative NADPH-dependent oxidoreductase
  misc_feature (177)..(296): NCBI GI NO: 6478216 NR Description: putative NADPH-dependent oxidoreductase
  misc_feature (177)..(296): NCBI GI NO: 37530522 NR Description: putative NADPH-dependent oxidoreductase
  misc_feature (177)..(296): NCBI GI NO: 40781598 NR Description: reductase 2 [Hydrangea macrophylla]
  misc_feature (177)..(280): NCBI GI NO: 112837 NR Description: NAD(P)H dependent 6'-deoxychalcone synthase
  misc_feature (177)..(276): NCBI GI NO: 37530540 NR Description: putative NADPH-dependent oxidoreductase
  misc_feature (198)..(198): Xaa is any aa, unknown or other
MVGMGTASFPLVHEAVKDGRALRHRGGVPPLRHCLHVRHREAAGRRRGRGAPARDPAVPGGSVRDVQAVVLAEPPGPRAAVPPGNTQEPADGVRGSVPDPLAGVPETGAARAPDQEGERRAAGPRGCVARHGGVPAAGPRQGDRREQLHHQAPRRGPGRRHGPARGEPGGAEPGRGQQRTLRAYCADRGIHVAAYSPXEGQNWDGQGSAVLDSEVLAAIAKARGKTVAQVALRWIHEQGVTCIVKSYSKERLRQNLGIFDWELTDEERLKISQIPQRKVVQTSSLFSQEGEFTAVDPAELNILEE

SEQ ID NO: 28089 - DNA, 1101 bp, Zea mays subsp. mays
  misc_feature (1)..(1101): Ceres Seq. ID no. 12356388
ctctcgcgtccccgtcttcctcttgtcgcctgcctctgcggctctgcctacctctctcgaagcttctcgctctcctgggtggccgtgtccagtctcccacgccaccgccccgaccgccggtaggtaataccagttccaagagcactcgacatggcggccgctaatgttggggaatcaacaagcggcggcggcagcagcagcagcagcggcgccgacgccgggggcggattcgagtgcaacatatgcttcgagctgccgcaggagccgatcgtgacgctgtgcgggcacctcttctgctggccgtgcctctacaagtggctgcgcatccactcgcactcgcccgagtgcccggtgtgcaaggccgtggtcgaggaggagaagctcgtgcccctgtacggccgcggcaaggaccgcgtcgacccgaggtccaagaacgtccccggggcggccgacatccccagccgtccggctgggcagaggccggccacggctccgcaggcggaccccaacaacgcccacttccccaacgccgccaacccggcgaacccgtggttcatgggcggcggcggcggaggcatcccgctggccaacgcgcgctgggggaactacaccttctcggcggcgttcggtgggctgttcccgctgctcagcttccaggtgcacgggttcccggacgccacggcctatggccagccagctgggttcccgtacgggtacggccacggccacgcttttcatggcgggcacgctggagcacatgcccacgccgcagctgcagctcctcgggcacgcgcagcaccagcagcagcaggcggatgtgtaccttaaggcgctgctcatcctagtcggcgttctggttatcgcgagcctcgtcacgttctagggcgtcgcctgttggtaggtgttcatcatattgttgctgccttgctggtaataaataagagagagagacagagacaacacgaccgaaactgaattattcagagcggtgcaatgtgttgatagaagggttgttgttgtacatgctgatacatgattgtatactgtggtctttgaacatacattattatcgaataataatctggaggctctgtttgaagt

SEQ ID NO: 28090 - protein, 225 aa, Zea mays subsp. mays
  peptide (1)..(225): Ceres Seq. ID no. 12356389
  misc_feature (29)..(69): Pfam Name: RING finger Pfam Description: Zinc finger, C3HC4 type
  misc_feature (3)..(212): NCBI GI NO: 29150403 NR Description: unknown protein
  misc_feature (1)..(207): NCBI GI NO: 34909840 NR Description: P0403C05.28
  misc_feature (16)..(205): NCBI GI NO: 18394721 NR Description: expressed protein; protein id: At1g19310
  misc_feature (7)..(197): NCBI GI NO: 15224062 NR Description: putative RING zinc finger protein
  misc_feature (7)..(197): NCBI GI NO: 21553849 NR Description: putative RING zinc finger protein
  misc_feature (22)..(114): NCBI GI NO: 15222064 NR Description: putative RING zinc finger protein
  misc_feature (16)..(216): NCBI GI NO: 17554742 NR Description: Ring finger protein RNF-5 (24.9 kD) (rnf-5)
  misc_feature (16)..(172): NCBI GI NO: 21912604 NR Description: putative ubiquitin ligase [Taenia solium]
  misc_feature (18)..(221): NCBI GI NO: 39581891 NR Description: Hypothetical protein CBG20152
  misc_feature (2)..(111): NCBI GI NO: 31542783 NR Description: hypothetical protein FLJ38628 [Homo sapiens]
MAAANVGESTSGGGSSSSSGADAGGGFECNICFELPQEPIVTLCGHLFCWPCLYKWLRIHSHSPECPVCKAVVEEEKLVPLYGRGKDRVDPRSKNVPGAADIPSRPAGQRPATAPQADPNNAHFPNAANPANPWFMGGGGGGIPLANARWGNYTFSAAFGGLFPLLSFQVHGFPDATAYGQPAGFPYGYGHGHAFHGGHAGAHAHAAAAAPRARAAPAAAGGCVP

SEQ ID NO: 28091 - protein, 200 aa, Zea mays subsp. mays
  peptide (1)..(200): Ceres Seq. ID no. 12356390
MLRAAAGADRDAVRAPLLLAVPLQVAAHPLALARVPGVQGRGRGGEARAPVRPRQGPRRPEVQERPRGGRHPQPSGWAEAGHGSAGGPQQRPLPQRRQPGEPVVHGRRRRRHPAGQRALGELHLLGGVRWAVPAAQLPGARVPGRHGLWPASWVPVRVRPRPRFSWRARWSTCPRRSCSSSGTRSTSSSRRMCTLRRCSS

SEQ ID NO: 28092 - DNA, 781 bp, Zea mays subsp. mays
  misc_feature (1)..(781): Ceres Seq. ID no. 12401310
agcacaagccgcaccgcaattagccgcgaccctccgcagaatcggctcacgtttccgatccagaggtccagactgttccccgagttttcctcgcgagtcccggcgaaccgcgaacatgtgccccactggaaggtacctggggctcgacctctccggcgctggcggcgacctgaggccggcgttcgacgtgcttgacgcggaccgggacggccgcatcagccgggacgacctcaagtccttctacgccgccgcggggcccgccgccggcgaccgggttcgacgacgacgacctcgcggccatgatcgcggccgccgacgccgaccgcgacggcttcgtgcagtacgacgagttcgagcgcctgctggccggccgcgccgcggcggccgccgccgcgggaggcgctgggcgccgctccgccatggagggcgccttccggctcatggaccgggacggggacggcatggtcggcttccaggacctcaaggcctacctcgactgggccgggatgcccgcggcggacgaggaggtccgcgccatgatccgcgtcgctggcggaggggacggcggtgaaggcgtggggctcgaggcgctagccggagtgctcgcggtcgacctggaaggcatcgccttttgattttgagagatccatggggatgttgtgcggagtactgtattctttttcttggggttttcggttggtgagcgtggtgcgttgtctgtcgattgtctgtggttgactggggttcacgaggaccattcaaaacgagataaaaagttcgc

SEQ ID NO: 28093 - protein, 189 aa, Zea mays subsp. mays
  peptide (1)..(189): Ceres Seq. ID no. 12401311
  misc_feature (56)..(82): Pfam Name: Pfam Description:  EF hand
  misc_feature (39)..(92): NCBI GI NO: 5702231 NR Description: hypersensitive reaction associated Ca2+-binding
  misc_feature (39)..(82): NCBI GI NO: 15239904 NR Description: NaCl-inducible Ca2+-binding protein-like
  misc_feature (39)..(82): NCBI GI NO: 2352828 NR Description: NaCl-inducible Ca2+-binding protein
AQAAPQLAATLRRIGSRFRSRGPDCSPSFPRESRRTANMCPTGRYLGLDLSGAGGDLRPAFDVLDADRDGRISRDDLKSFYAAAGPAAGDRVRRRRPRGHDRGRRRRPRRLRAVRRVRAPAGRPRRGGRRRGRRWAPLRHGGRLPAHGPGRGRHGRLPGPQGLPRLGRDARGGRGGPRHDPRRWRRGRR

SEQ ID NO: 28094 - protein, 151 aa, Zea mays subsp. mays
  peptide (1)..(151): Ceres Seq. ID no. 12401312
  misc_feature (18)..(44): Pfam Name: Pfam Description:  EF hand
  misc_feature (1)..(54): NCBI GI NO: 5702231 NR Description: hypersensitive reaction associated Ca2+-binding
  misc_feature (1)..(44): NCBI GI NO: 15239904 NR Description: NaCl-inducible Ca2+-binding protein-like
  misc_feature (1)..(44): NCBI GI NO: 2352828 NR Description: NaCl-inducible Ca2+-binding protein
MCPTGRYLGLDLSGAGGDLRPAFDVLDADRDGRISRDDLKSFYAAAGPAAGDRVRRRRPRGHDRGRRRRPRRLRAVRRVRAPAGRPRRGGRRRGRRWAPLRHGGRLPAHGPGRGRHGRLPGPQGLPRLGRDARGGRGGPRHDPRRWRRGRR

SEQ ID NO: 28095 - protein, 111 aa, Zea mays subsp. mays
  peptide (1)..(111): Ceres Seq. ID no. 12401313
  misc_feature (1)..(105): NCBI GI NO: 5702231 NR Description: hypersensitive reaction associated Ca2+-binding
  misc_feature (1)..(98): NCBI GI NO: 15239904 NR Description: NaCl-inducible Ca2+-binding protein-like
  misc_feature (1)..(99): NCBI GI NO: 2352828 NR Description: NaCl-inducible Ca2+-binding protein
  misc_feature (1)..(89): NCBI GI NO: 19386815 NR Description: B1147A04.10
  misc_feature (1)..(89): NCBI GI NO: 15991282 NR Description: Calmodulin-2
  misc_feature (1)..(103): NCBI GI NO: 8393159 NR Description: calmodulin-like skin protein [Homo sapiens]
  misc_feature (1)..(103): NCBI GI NO: 24657605 NR Description: calmodulin-like skin protein [Homo sapiens]
MIAAADADRDGFVQYDEFERLLAGRAAAAAAAGGAGRRSAMEGAFRLMDRDGDGMVGFQDLKAYLDWAGMPAADEEVRAMIRVAGGGDGGEGVGLEALAGVLAVDLEGIAF

SEQ ID NO: 28096 - DNA, 1322 bp, Zea mays subsp. mays
  misc_feature (1)..(1322): Ceres Seq. ID no. 13491098
atcgcaaaaaccccaatccatccaaacccatttccctcgctcccatcccgtcccgccccttgtctcttccgcttccccccgaccccgcgcgccgcggaccagcagccatgtcgtgctcccacctctccaccgcctggtcctcctcggcgctcgccagcagcgcctccaccacccgacggcgctcccccccgcgctcgggtctcctggtgcggtgttccctccgtgagctccgcacccgcatcgactccgtcaggaacacgcagaagatcacggaggccatgaagctggtggccgccgccaaggtccggcgcgcgcaggaggccgtcgtctcctctcgccctttctcggaggcgctggtggaggtgctcctacaacatgaaccaggagatccagacggaggacatcgacctgcccctcacccgcacccgccccgtcaagaaggtggccctcgtggtcctgaccggcgagcgcggcctctgcgggagcttcaacaacaacgtgctcaagaaggcggaaacccgcatcgatgagctcaagcagctgggcctccagtacaccgtcgtcagcgtggggaagaagggcaacgcctacttccagcgccgcccctacatcccgttggagcgcgatctagaggtgagcagcgtgcccaccgtcaaggactcgcaggccatctgcgacctcgtctactcgctcttcgtctccgaggaggtggacaaggtggagctgctctactccaagttcgtgtcgctggtgcgctccgaccccatcatccagacgctgctccccatgtcgcccaagggcgagatctgcgacgtcaacggcgtctgcgtggacgccaccgaggacgagctcttccgcctcaccaccaaggaggggaagctcaccgtggagcgcgagaaggtgaagatcgagacgcagcccttctcccccgtggtgcagttcgagcaggaccccgtgcagatcctggacgcgctgctcccgctctacctcaacagccagatcctccgtgccctgcaggagtcgctcgccagcgagctcgccgcccggatgagcgccatgagcagcgccaccgacaacgccatcgagctccgcaagaacctctccatcgcctacaaccgacagcgccaggccaagatcaccggggagatcctcgagatcgtcgccggtgccgacgccctcgctggctgagcctgagtccccttggtggtgcggtgctcctgctatatataattctttttcctcattttctccactctgcctgtaattcctgataatagcaaacacaacggagttctgtgttccttgcgacacacaagaatttc

SEQ ID NO: 28097 - protein, 270 aa, Zea mays subsp. mays
  peptide (1)..(270): Ceres Seq. ID no. 13491099
  misc_feature (1)..(268): Pfam Name: Pfam Description:  ATP synthase
  misc_feature (1)..(269): NCBI GI NO: 27818005 NR Description: putative ATP synthase gamma-subunit
  misc_feature (1)..(267): NCBI GI NO: 18412632 NR Description: ATP synthase gamma chain 1, chloroplast
  misc_feature (1)..(268): NCBI GI NO: 231610 NR Description: ATP synthase gamma chain, chloroplast precursor
  misc_feature (1)..(267): NCBI GI NO: 114643 NR Description: ATP synthase gamma chain, chloroplast precursor
  misc_feature (1)..(267): NCBI GI NO: 755801 NR Description: ATP synthase [Spinacia oleracea]
  misc_feature (1)..(264): NCBI GI NO: 114640 NR Description: ATP synthase gamma chain, chloroplast precursor
  misc_feature (1)..(267): NCBI GI NO: 5708095 NR Description: ATP synthase gamma chain, chloroplast precursor
  misc_feature (1)..(268): NCBI GI NO: 15218281 NR Description: ATP synthase gamma-subunit -related
  misc_feature (1)..(270): NCBI GI NO: 114638 NR Description: ATP synthase gamma chain, chloroplast precursor
  misc_feature (1)..(270): NCBI GI NO: 228698 NR Description: CF1 ATP synthase:SUBUNIT=gamma
MNQEIQTEDIDLPLTRTRPVKKVALVVLTGERGLCGSFNNNVLKKAETRIDELKQLGLQYTVVSVGKKGNAYFQRRPYIPLERDLEVSSVPTVKDSQAICDLVYSLFVSEEVDKVELLYSKFVSLVRSDPIIQTLLPMSPKGEICDVNGVCVDATEDELFRLTTKEGKLTVEREKVKIETQPFSPVVQFEQDPVQILDALLPLYLNSQILRALQESLASELAARMSAMSSATDNAIELRKNLSIAYNRQRQAKITGEILEIVAGADALAG

SEQ ID NO: 28098 - protein, 175 aa, Zea mays subsp. mays
  peptide (1)..(175): Ceres Seq. ID no. 13491100
  misc_feature (71)..(122): Pfam Name: Pfam Description:  ATP synthase
  misc_feature (36)..(122): NCBI GI NO: 27818005 NR Description: putative ATP synthase gamma-subunit
  misc_feature (36)..(122): NCBI GI NO: 18412632 NR Description: ATP synthase gamma chain 1, chloroplast
  misc_feature (33)..(122): NCBI GI NO: 231610 NR Description: ATP synthase gamma chain, chloroplast precursor
  misc_feature (36)..(122): NCBI GI NO: 114643 NR Description: ATP synthase gamma chain, chloroplast precursor
  misc_feature (69)..(122): NCBI GI NO: 755801 NR Description: ATP synthase [Spinacia oleracea]
  misc_feature (33)..(122): NCBI GI NO: 114640 NR Description: ATP synthase gamma chain, chloroplast precursor
  misc_feature (93)..(122): NCBI GI NO: 5708095 NR Description: ATP synthase gamma chain, chloroplast precursor
  misc_feature (60)..(122): NCBI GI NO: 15218281 NR Description: ATP synthase gamma-subunit -related
  misc_feature (64)..(122): NCBI GI NO: 114638 NR Description: ATP synthase gamma chain, chloroplast precursor
  misc_feature (64)..(122): NCBI GI NO: 228698 NR Description: CF1 ATP synthase:SUBUNIT=gamma
RKNPNPSKPISLAPIPSRPLSLPLPPDPARRGPAAMSCSHLSTAWSSSALASSASTTRRRSPPRSGLLVRCSLRELRTRIDSVRNTQKITEAMKLVAAAKVRRAQEAVVSSRPFSEALVEVLLQHEPGDPDGGHRPAPHPHPPRQEGGPRGPDRRARPLRELQQQRAQEGGNPHR

SEQ ID NO: 28099 - protein, 140 aa, Zea mays subsp. mays
  peptide (1)..(140): Ceres Seq. ID no. 13491101
  misc_feature (36)..(87): Pfam Name: Pfam Description:  ATP synthase
  misc_feature (1)..(87): NCBI GI NO: 27818005 NR Description: putative ATP synthase gamma-subunit
  misc_feature (1)..(87): NCBI GI NO: 18412632 NR Description: ATP synthase gamma chain 1, chloroplast
  misc_feature (1)..(87): NCBI GI NO: 231610 NR Description: ATP synthase gamma chain, chloroplast precursor
  misc_feature (1)..(87): NCBI GI NO: 114643 NR Description: ATP synthase gamma chain, chloroplast precursor
  misc_feature (34)..(87): NCBI GI NO: 755801 NR Description: ATP synthase [Spinacia oleracea]
  misc_feature (1)..(87): NCBI GI NO: 114640 NR Description: ATP synthase gamma chain, chloroplast precursor
  misc_feature (58)..(87): NCBI GI NO: 5708095 NR Description: ATP synthase gamma chain, chloroplast precursor
  misc_feature (25)..(87): NCBI GI NO: 15218281 NR Description: ATP synthase gamma-subunit -related
  misc_feature (29)..(87): NCBI GI NO: 114638 NR Description: ATP synthase gamma chain, chloroplast precursor
  misc_feature (29)..(87): NCBI GI NO: 228698 NR Description: CF1 ATP synthase:SUBUNIT=gamma
MSCSHLSTAWSSSALASSASTTRRRSPPRSGLLVRCSLRELRTRIDSVRNTQKITEAMKLVAAAKVRRAQEAVVSSRPFSEALVEVLLQHEPGDPDGGHRPAPHPHPPRQEGGPRGPDRRARPLRELQQQRAQEGGNPHR

SEQ ID NO: 28100 - DNA, 1127 bp, Zea mays subsp. mays
  misc_feature (1)..(1127): Ceres Seq. ID no. 13492997
gcaaccgaacgaacaaggctagaagctagctagccaagttattagctactacatactagtggccggccggacacgatcgatgggaaggccgccgtgctgcgacagggcgggggttaagaaggggccatggacgccggaggaggacatcgtcctggtgtcctacgtccaggagcacggccccggcaactggcgcgccgtgcccgtcagcacgggcctcatgcgctgcagcaagagctgccgcctccgctggaccaactacctccgccccggcatccggcgcggcaacttcacaccccacgaggaaggcatcatcgtccacctccaggccttgctaggcaacagatgggcggccattgcttcttacctcccacagagaaccgacaacgacatcaagaactactggaacacccacctcaagaagaagctccggaagcagcaagccatcggcgccatcttagcgccacctcccccctccgaacccaccgccggccatgccgattgccatcacgacatgacccgctcctccaaggacagccacgcttgcctggccgacagcacaccagcggctgatgaggtcgtcacccagctcatcgcccagcagttcgccgccaccgacggtgacacctcgtcgtcgtcgtcgtactcgtacgcctccagcacggacaacatctccaagctgctcaacggcttcatgaagagcgcctcgccggcgcgggacgacgctaccgacaccatcaagacttcctcggccattgacatcgaccctttcgaccacaagtccggcggggcactactaccaccacccaagaagcggcagcagcagcagcagcatctgtcctccatagagaactggttgttcgacgatgccactgagcaggtcgttgtccagctgatggaggagatctccggcggctcttgctcagttcccatgctgctttattagcaccaagaaaaagaagcgaacatgcatgatagccgatcgatagatgtgacttggataggagaatgaatgtgtgcatgggtgcaagttacccagctgataggagaattttatatgcacccatgcatgtttggttttatttacacaagcatgagccatgagacaagaacaatatatatgcatagtt

SEQ ID NO: 28101 - protein, 287 aa, Zea mays subsp. mays
  peptide (1)..(287): Ceres Seq. ID no. 15222896
  misc_feature (14)..(61): Pfam Name: Pfam Description:  Myb-like DNA-binding domain
  misc_feature (1)..(116): NCBI GI NO: 7438331 NR Description: myb protein homolog - rice
  misc_feature (148)..(211): NCBI GI NO: 7438331 NR Description: myb protein homolog - rice
  misc_feature (1)..(234): NCBI GI NO: 2129775 NR Description: myb-related protein Y13 - Arabidopsis thaliana
  misc_feature (1)..(234): NCBI GI NO: 15221336 NR Description: myb family transcription factor
  misc_feature (1)..(218): NCBI GI NO: 15228529 NR Description: myb family transcription factor
  misc_feature (1)..(218): NCBI GI NO: 11273960 NR Description: myb-related transcription factor MYB30
  misc_feature (1)..(121): NCBI GI NO: 11358548 NR Description: myb-related transcription factor MYB60
  misc_feature (1)..(121): NCBI GI NO: 15223917 NR Description: myb family transcription factor
  misc_feature (1)..(212): NCBI GI NO: 18071376 NR Description: putative transcription factor [Oryza sativa]
  misc_feature (1)..(212): NCBI GI NO: 19072762 NR Description: typical P-type R2R3 Myb protein [Oryza sativa]
MGRPPCCDRAGVKKGPWTPEEDIVLVSYVQEHGPGNWRAVPVSTGLMRCSKSCRLRWTNYLRPGIRRGNFTPHEEGIIVHLQALLGNRWAAIASYLPQRTDNDIKNYWNTHLKKKLRKQQAIGAILAPPPPSEPTAGHADCHHDMTRSSKDSHACLADSTPAADEVVTQLIAQQFAATDGDTSSSSSYSYASSTDNISKLLNGFMKSASPARDDATDTIKTSSAIDIDPFDHKSGGALLPPPKKRQQQQQHLSSIENWLFDDATEQVVVQLMEEISGGSCSVPMLLY

SEQ ID NO: 28102 - protein, 241 aa, Zea mays subsp. mays
  peptide (1)..(241): Ceres Seq. ID no. 15222897
  misc_feature (1)..(70): NCBI GI NO: 7438331 NR Description: myb protein homolog - rice
  misc_feature (102)..(165): NCBI GI NO: 7438331 NR Description: myb protein homolog - rice
  misc_feature (1)..(188): NCBI GI NO: 2129775 NR Description: myb-related protein Y13 - Arabidopsis thaliana
  misc_feature (1)..(188): NCBI GI NO: 15221336 NR Description: myb family transcription factor
  misc_feature (1)..(172): NCBI GI NO: 15228529 NR Description: myb family transcription factor
  misc_feature (1)..(172): NCBI GI NO: 11273960 NR Description: myb-related transcription factor MYB30
  misc_feature (1)..(75): NCBI GI NO: 11358548 NR Description: myb-related transcription factor MYB60
  misc_feature (1)..(75): NCBI GI NO: 15223917 NR Description: myb family transcription factor
  misc_feature (1)..(166): NCBI GI NO: 18071376 NR Description: putative transcription factor [Oryza sativa]
  misc_feature (1)..(166): NCBI GI NO: 19072762 NR Description: typical P-type R2R3 Myb protein [Oryza sativa]
MRCSKSCRLRWTNYLRPGIRRGNFTPHEEGIIVHLQALLGNRWAAIASYLPQRTDNDIKNYWNTHLKKKLRKQQAIGAILAPPPPSEPTAGHADCHHDMTRSSKDSHACLADSTPAADEVVTQLIAQQFAATDGDTSSSSSYSYASSTDNISKLLNGFMKSASPARDDATDTIKTSSAIDIDPFDHKSGGALLPPPKKRQQQQQHLSSIENWLFDDATEQVVVQLMEEISGGSCSVPMLLY

SEQ ID NO: 28103 - protein, 147 aa, Zea mays subsp. mays
  peptide (1)..(147): Ceres Seq. ID no. 15222898
MDAGGGHRPGVLRPGARPRQLARRARQHGPHALQQELPPPLDQLPPPRHPARQLHTPRGRHHRPPPGLARQQMGGHCFLPPTENRQRHQELLEHPPQEEAPEAASHRRHLSATSPLRTHRRPCRLPSRHDPLLQGQPRLPGRQHTSG

SEQ ID NO: 28104 - DNA, 1359 bp, Zea mays subsp. mays
  misc_feature (1)..(1359): Ceres Seq. ID no. 12408140
gcacgagaccattacctagaacatcctaatcgaaaaccattacggacacagccattccaccaaccaaccaagccaaacggtttatagccccgctcggttcaagccggtaccgtacacctccagagtagcttaccccaaccaaatccatccaaattcaatcggaattcgcgtgcgcaagcccaaatcggaccacggtaatccaaaggccgcggcgtagcggacgcgcgggcgctggtgataaagcgggggctgggcctcgacgcctctgctctgctctgctctccttgcataggttttatcttctcccctcctctgcccccatctcgcttctcgcacacggcagccggattccgaagcgcgccccctcggccccagccaaaagcatcgcagtttctaatcgtttggagagcacacaagaatgtcgttcgtgcagctctctggtgctggagtcgctgcagtggccttcacgaacaagagcctagtctctcggcacgcagcgctacgggtctgctcgtcgaggcgctcgatccgtagcctggtcgttaaggctgcaactgtcgtcaccccaaagtacacttcactgaagcctctgggagatagggtgcttgtgaagcttggtgccgcagaggagaagacagttggtggcattttgcttccatctactgcccagactaaaccacaaggaggtgaggttgttgctgttggagcaggaaggaccatcggggacaagaaaatagctgtggatatagagactggagcacaagtagtatactcaaagtatgctgggactgaggttgaattcaatgactcaaagcatcttattctcaaagaagacgatatcattggtattcttgagacagatgatgtgaaggacatgaagcctctcaatgaccgtgttctcatcaaggttgcagaagccgaagacaaaactcctgggggccttatcctcactgaaacaactaaagagaagccgtccataggaacggttgtagctgttggcccgggtcctctggacgaggaaggcaagagacagccactgtcagtgtcggcgggcagcacagtgctgtactccaagtatgcagggagtgagttcaagggcgcggatggcacggcctacattgtgttgagagcgtcggatgtgatggctgtcctgtcttgagcatttcgtttccggctcgttaatgtagtttgcagccaatagttgtcatgtggtatgaaacgatcgctttgtggtggtcatcacaccatgctggtgatcatcacaacatatgctgatactgttccggacaatcggctagaatttgttgtgtggcaggtataaacgtcagcatctgatagtgagagcactcggttacttct

SEQ ID NO: 28105 - protein, 246 aa, Zea mays subsp. mays
  peptide (1)..(246): Ceres Seq. ID no. 12408141
  misc_feature (151)..(246): Pfam Name: Pfam Description:  Chaperonin 10 Kd subunit
  misc_feature (4)..(246): NCBI GI NO: 15242045 NR Description: chloroplast Cpn21 protein; protein id: At5g20720
  misc_feature (1)..(246): NCBI GI NO: 7331143 NR Description: chaperonin 21 precursor [Lycopersicon esculentum]
  misc_feature (4)..(246): NCBI GI NO: 25453528 NR Description: chaperonin 10 [imported] - Arabidopsis thaliana
  misc_feature (2)..(246): NCBI GI NO: 21780187 NR Description: cp10-like protein [Gossypium hirsutum]
  misc_feature (35)..(246): NCBI GI NO: 399241 NR Description: 20 kDa chaperonin, chloroplast precursor
  misc_feature (150)..(245): NCBI GI NO: 22297730 NR Description: 10kD chaperonin
  misc_feature (152)..(246): NCBI GI NO: 3599923 NR Description: GroES/HSP10 homolog [Lawsonia intracellularis]
  misc_feature (55)..(146): NCBI GI NO: 2493659 NR Description: 10 kDa chaperonin (Protein Cpn10) (groES protein)
  misc_feature (55)..(146): NCBI GI NO: 20807075 NR Description: Co-chaperonin GroES (HSP10)
  misc_feature (54)..(145): NCBI GI NO: 23113174 NR Description: hypothetical protein
MSFVQLSGAGVAAVAFTNKSLVSRHAALRVCSSRRSIRSLVVKAATVVTPKYTSLKPLGDRVLVKLGAAEEKTVGGILLPSTAQTKPQGGEVVAVGAGRTIGDKKIAVDIETGAQVVYSKYAGTEVEFNDSKHLILKEDDIIGILETDDVKDMKPLNDRVLIKVAEAEDKTPGGLILTETTKEKPSIGTVVAVGPGPLDEEGKRQPLSVSAGSTVLYSKYAGSEFKGADGTAYIVLRASDVMAVLS

SEQ ID NO: 28106 - DNA, 913 bp, Zea mays subsp. mays
  misc_feature (1)..(913): Ceres Seq. ID no. 12352405
agatctctagcactagctttgatcctttccgccgccaactttggcttgggatttgtctctgacttgggacactcgctgaagagagtacatctccgacttgggatttgtcttacgaccagcagcggcggcggcggcggcgcgccaggacaaggagcagcgggactacagactcatcgcaaaagccgtggacgaagcgtaccgggcggtggagtgcgacggcggcgggtaccccttcggcgcggtcgtcgtccacggcggcggcgacgacgaggtggtcagcagcagccacaactcggtccggaaggacgccgacccgtcggcgcacgccgaagtgaccgccatcagacaggcgtgcaagaagctggggaaaaccagcctcgccggctgcgagatctacacgtcctgcgagccgtgcccgatgtgcctggggctcattcgcctggccaagataaagaaggtggtgtacggagccaagtcggaggtcgccgctgccgccgggctcaacggcgtcctcccagaggtcttcagagagtactaccagaaatccggcgtggagatgaggcaggccgagggcgaggcggcaacccgggatcgccgaggaggtgttcgaggagaccaagggcaagtttcgcaacaagtaaacgcgctggagatggcgccgggcggatggctgttgcctgttgctagtggaatggttgccgtttccaagctttttgtccgggggacctttgatcagaggtcacatgcccagagaccggaataaattcacccctttccccccctaaaaaatactccatttcacatggtttgttgtatcagtgtgttatttctttttttaacgcccgcctcgaccgtgtgacattttttttcttaataatgtagggtgttacttgttgggaacataattaggtgt

SEQ ID NO: 28107 - protein, 228 aa, Zea mays subsp. mays
  peptide (1)..(228): Ceres Seq. ID no. 12352406
  misc_feature (37)..(221): NCBI GI NO: 23018055 NR Description: hypothetical protein [Thermobifida fusca]
RSLALALILSAANFGLGFVSDLGHSLKRVHLRLGICLTTSSGGGGGAPGQGAAGLQTHRKSRGRSVPGGGVRRRRVPLRRGRRPRRRRRRGGQQQPQLGPEGRRPVGARRSDRHQTGVQEAGENQPRRLRDLHVLRAVPDVPGAHSPGQDKEGGVRSQVGGRRCRRAQRRPPRGLQRVLPEIRRGDEAGRGRGGNPGSPRRCSRRPRASFATSKRAGDGAGRMAVACC

SEQ ID NO: 28108 - protein, 114 aa, Zea mays subsp. mays
  peptide (1)..(114): Ceres Seq. ID no. 12352407
  misc_feature (1)..(55): NCBI GI NO: 23928436 NR Description: putative cytidine deaminase [Zea mays]
  misc_feature (1)..(55): NCBI GI NO: 40714681 NR Description: putative deoxycytidine deaminase
  misc_feature (1)..(55): NCBI GI NO: 3204108 NR Description: putative cytidine deaminase
  misc_feature (1)..(55): NCBI GI NO: 15241124 NR Description: putative cytidine deaminase - like
  misc_feature (1)..(55): NCBI GI NO: 18266045 NR Description: deoxycytidine deaminase [Brassica oleracea]
  misc_feature (1)..(54): NCBI GI NO: 23021911 NR Description: hypothetical protein
  misc_feature (1)..(55): NCBI GI NO: 39591749 NR Description: Hypothetical protein CBG18226
  misc_feature (1)..(55): NCBI GI NO: 17555996 NR Description: Cytidine, cytosine, dCTP et al deaminase (18.3 kD)
  misc_feature (1)..(41): NCBI GI NO: 17554608 NR Description: Cytidine, cytosine, dCTP et al deaminase
  misc_feature (1)..(55): NCBI GI NO: 21228824 NR Description: hypothetical protein [Methanosarcina mazei Goe1]
MCLGLIRLAKIKKVVYGAKSEVAAAAGLNGVLPEVFREYYQKSGVEMRQAEGEAATRDRRGGVRGDQGQVSQQVNALEMAPGGWLLPVASGMVAVSKLFVRGTFDQRSHAQRPE

SEQ ID NO: 28109 - DNA, 670 bp, Zea mays subsp. mays
  misc_feature (1)..(670): Ceres Seq. ID no. 13496088
aagacttcacaagaatctactcgtcgagtcaccaaagataaggctctatcggactcggagtctcggacagcacagcaaagcaagagccgctactcaagtatagtctgacaccggccgaccctgccccaacccaagccatggcggacaacaacaaccggcggaaccacgggcagaccttgctcgccggcgcgggcctgggcctgctcgccgtgaactcgggcctcgccatctaccgcgcgaggggcgacacggccgccgtcctcttcgtcgcggggtcctgcgccaccctgctcctcctcttcgcctgcctccgcgcctacgagcgggcggcgcccgggtcgccggcccgggaccgggcgcggcgcgccgtgtggccgctcgccacgctgctcacgctctcgttcgcctggaaggtggcggcggccatgccttccgccgccgcggccgccctcgtatggggcctggccgtggccaccaccgccggcggcttcgtggcactgtacgtgcagcaggcatgaacacgtgggcgcgggacggactaggcaagcagctgcagacttgcagctcgttcagggatctagatctgggcgccgcgcgcctgtgtagaaatgtacagtgtatttggctagcttttcgattttgtgcatatgtatgtagctgactggctgat

SEQ ID NO: 28110 - protein, 126 aa, Zea mays subsp. mays; identical to SEQ ID NO: 22982
  peptide (1)..(126): Ceres Seq. ID no. 13496089
  misc_feature (13)..(123): NCBI GI NO: 34912134 NR Description: OSJNBb0024F06.19
  misc_feature (15)..(125): NCBI GI NO: 34904462 NR Description: OSJNBa0086P08.10
  misc_feature (22)..(123): NCBI GI NO: 34910564 NR Description: B1131B07.10
  misc_feature (18)..(126): NCBI GI NO: 34906268 NR Description: P0489A01.19

SEQ ID NO: 28111 - protein, 68 aa, Zea mays subsp. mays
  peptide (1)..(68): Ceres Seq. ID no. 13496090
MGPGRGHHRRRLRGTVRAAGMNTWARDGLGKQLQTCSSFRDLDLGAARLCRNVQCIWLAFRFCAYVCS

SEQ ID NO: 28112 - DNA, 988 bp, Zea mays subsp. mays
  misc_feature (1)..(988): Ceres Seq. ID no. 12402534
  misc_feature (538)..(538): n is a, c, t, g, unknown, or other
  misc_feature (549)..(549): n is a, c, t, g, unknown, or other
  misc_feature (537)..(537): n is a, c, t, g, unknown, or other
  misc_feature (586)..(586): n is a, c, t, g, unknown, or other
  misc_feature (383)..(383): n is a, c, t, g, unknown, or other
  misc_feature (965)..(965): n is a, c, t, g, unknown, or other
  misc_feature (587)..(587): n is a, c, t, g, unknown, or other
  misc_feature (458)..(458): n is a, c, t, g, unknown, or other
  misc_feature (471)..(471): n is a, c, t, g, unknown, or other
  misc_feature (305)..(305): n is a, c, t, g, unknown, or other
  misc_feature (744)..(744): n is a, c, t, g, unknown, or other
  misc_feature (684)..(684): n is a, c, t, g, unknown, or other
  misc_feature (450)..(450): n is a, c, t, g, unknown, or other
  misc_feature (459)..(459): n is a, c, t, g, unknown, or other
  misc_feature (705)..(705): n is a, c, t, g, unknown, or other
  misc_feature (550)..(550): n is a, c, t, g, unknown, or other
agcagcagcagcagcaagcttgagccactgctgcacgtatattattaagatcgaaagccaccaccatggccttggcctctaataagctcctcatcaacagcttcgtcacggtggcattcttagtcgccagcactcgtgggagtggcaccatccagctgatcttggtgaacaactgcgcggaatccatctggcccgggcttctgggcaccgccggccagccgacgccgcagtcgggcggcctccacctggcccccggcgacgaggcggccttcgacgtgccggtggggtggtccggccgcgtgtgnccgcggcgcggctgctccttcgaccagcgcgagcgggggcagtgcgcgacgggggactgtggcggcgtgctccgctgngacgggcggcccggcgccgccccggccacggtggtagagatgacgctgggcacccccaagtccccgntccacttnnacgacgtgtcgntggtggacggcttcaacgcgccggtgtccatggcccccgtgggcggcggcgccgggtgcggcgtgnncgggtgccagnnggacctgaacgtctgctgcccgtcggcgctcgaggnnagggaccgggaggggagggtggccggctgccggagcgcctgcaaggccatgggaggggacaggtactgctgcacgggggactacgcgtcgccggacnaggtgccgccccaccatcttngcccacgtcttcaaggccgtgtgccccaaggcctatcantacgcgtacgacgacgccacctcgctgaaccggtgcaaggccagccggtacctcatcaccttctgcccaccgccgacatccaggaaatgacgaccacatccatggattgcatcttcaaaataataatacttactaaatgtcctacggtttttatatatcagtcatgtagagcttgtttaattaggatacttatttaaacatattccaatccgagaggtctntatccaacgcatcaattgttcgt

SEQ ID NO: 28113 - protein, 291 aa, Zea mays subsp. mays
  peptide (1)..(291): Ceres Seq. ID no. 12402535
  misc_feature (35)..(210): Pfam Name: Pfam Description:  Thaumatin family
  misc_feature (18)..(210): NCBI GI NO: 15241688 NR Description: thaumatin-like protein; protein id: At5g02140.1
  misc_feature (10)..(210): NCBI GI NO: 15221033 NR Description: pathogenesis-related group 5 protein, putative
  misc_feature (1)..(210): NCBI GI NO: 15219508 NR Description: thaumatin-like protein; protein id: At1g73620
  misc_feature (10)..(210): NCBI GI NO: 2129751 NR Description: thaumatin-like protein - Arabidopsis thaliana
  misc_feature (13)..(210): NCBI GI NO: 21553814 NR Description: thaumatin-like protein [Arabidopsis thaliana]
  misc_feature (12)..(226): NCBI GI NO: 15222088 NR Description: thaumatin-like protein
  misc_feature (18)..(210): NCBI GI NO: 4586372 NR Description: thaumatin-like protein SE39b [Nicotiana tabacum]
  misc_feature (12)..(226): NCBI GI NO: 2435406 NR Description: thaumatin-like protein [Arabidopsis thaliana]
  misc_feature (1)..(226): NCBI GI NO: 18420282 NR Description: putative thaumatin-like protein
  misc_feature (17)..(210): NCBI GI NO: 7442175 NR Description: thaumatin-like protein - turnip
  misc_feature (80)..(80): Xaa is any aa, unknown or other
  misc_feature (106)..(106): Xaa is any aa, unknown or other
  misc_feature (129)..(129): Xaa is any aa, unknown or other
  misc_feature (131)..(131): Xaa is any aa, unknown or other
  misc_feature (132)..(132): Xaa is any aa, unknown or other
  misc_feature (136)..(136): Xaa is any aa, unknown or other
  misc_feature (158)..(158): Xaa is any aa, unknown or other
  misc_feature (162)..(162): Xaa is any aa, unknown or other
  misc_feature (174)..(174): Xaa is any aa, unknown or other
  misc_feature (207)..(207): Xaa is any aa, unknown or other
  misc_feature (214)..(214): Xaa is any aa, unknown or other
  misc_feature (227)..(227): Xaa is any aa, unknown or other
MALASNKLLINSFVTVAFLVASTRGSGTIQLILVNNCAESIWPGLLGTAGQPTPQSGGLHLAPGDEAAFDVPVGWSGRVXPRRGCSFDQRERGQCATGDCGGVLRXDGRPGAAPATVVEMTLGTPKSPXHXXDVSXVDGFNAPVSMAPVGGGAGCGVXGCQXDLNVCCPSALEXRDREGRVAGCRSACKAMGGDRYCCTGDYASPDXVPPHHLXPRLQGRVPQGLSXRVRRRHLAEPVQGQPVPHHLLPTADIQEMTTTSMDCIFKIIILTKCPTVFIYQSCRACLIRILI

SEQ ID NO: 28114 - protein, 172 aa, Zea mays subsp. mays
  peptide (1)..(172): Ceres Seq. ID no. 12402536
  misc_feature (1)..(91): Pfam Name: Pfam Description:  Thaumatin family
  misc_feature (1)..(91): NCBI GI NO: 15241688 NR Description: thaumatin-like protein; protein id: At5g02140.1
  misc_feature (1)..(91): NCBI GI NO: 15221033 NR Description: pathogenesis-related group 5 protein, putative
  misc_feature (1)..(91): NCBI GI NO: 15219508 NR Description: thaumatin-like protein; protein id: At1g73620
  misc_feature (1)..(91): NCBI GI NO: 2129751 NR Description: thaumatin-like protein - Arabidopsis thaliana
  misc_feature (1)..(91): NCBI GI NO: 21553814 NR Description: thaumatin-like protein [Arabidopsis thaliana]
  misc_feature (1)..(107): NCBI GI NO: 15222088 NR Description: thaumatin-like protein
  misc_feature (1)..(91): NCBI GI NO: 4586372 NR Description: thaumatin-like protein SE39b [Nicotiana tabacum]
  misc_feature (1)..(107): NCBI GI NO: 2435406 NR Description: thaumatin-like protein [Arabidopsis thaliana]
  misc_feature (1)..(107): NCBI GI NO: 18420282 NR Description: putative thaumatin-like protein
  misc_feature (1)..(91): NCBI GI NO: 7442175 NR Description: thaumatin-like protein - turnip
  misc_feature (10)..(10): Xaa is any aa, unknown or other
  misc_feature (12)..(12): Xaa is any aa, unknown or other
  misc_feature (13)..(13): Xaa is any aa, unknown or other
  misc_feature (17)..(17): Xaa is any aa, unknown or other
  misc_feature (39)..(39): Xaa is any aa, unknown or other
  misc_feature (43)..(43): Xaa is any aa, unknown or other
  misc_feature (55)..(55): Xaa is any aa, unknown or other
  misc_feature (88)..(88): Xaa is any aa, unknown or other
  misc_feature (95)..(95): Xaa is any aa, unknown or other
  misc_feature (108)..(108): Xaa is any aa, unknown or other
MTLGTPKSPXHXXDVSXVDGFNAPVSMAPVGGGAGCGVXGCQXDLNVCCPSALEXRDREGRVAGCRSACKAMGGDRYCCTGDYASPDXVPPHHLXPRLQGRVPQGLSXRVRRRHLAEPVQGQPVPHHLLPTADIQEMTTTSMDCIFKIIILTKCPTVFIYQSCRACLIRILI

SEQ ID NO: 28115 - protein, 146 aa, Zea mays subsp. mays
  peptide (1)..(146): Ceres Seq. ID no. 12402537
  misc_feature (1)..(65): Pfam Name: Pfam Description:  Thaumatin family
  misc_feature (1)..(65): NCBI GI NO: 15241688 NR Description: thaumatin-like protein; protein id: At5g02140.1
  misc_feature (1)..(65): NCBI GI NO: 15221033 NR Description: pathogenesis-related group 5 protein, putative
  misc_feature (1)..(65): NCBI GI NO: 15219508 NR Description: thaumatin-like protein; protein id: At1g73620
  misc_feature (1)..(65): NCBI GI NO: 2129751 NR Description: thaumatin-like protein - Arabidopsis thaliana
  misc_feature (1)..(65): NCBI GI NO: 21553814 NR Description: thaumatin-like protein [Arabidopsis thaliana]
  misc_feature (1)..(81): NCBI GI NO: 15222088 NR Description: thaumatin-like protein
  misc_feature (1)..(65): NCBI GI NO: 4586372 NR Description: thaumatin-like protein SE39b [Nicotiana tabacum]
  misc_feature (1)..(81): NCBI GI NO: 2435406 NR Description: thaumatin-like protein [Arabidopsis thaliana]
  misc_feature (1)..(81): NCBI GI NO: 18420282 NR Description: putative thaumatin-like protein
  misc_feature (1)..(65): NCBI GI NO: 7442175 NR Description: thaumatin-like protein - turnip
  misc_feature (13)..(13): Xaa is any aa, unknown or other
  misc_feature (17)..(17): Xaa is any aa, unknown or other
  misc_feature (29)..(29): Xaa is any aa, unknown or other
  misc_feature (62)..(62): Xaa is any aa, unknown or other
  misc_feature (69)..(69): Xaa is any aa, unknown or other
  misc_feature (82)..(82): Xaa is any aa, unknown or other
MAPVGGGAGCGVXGCQXDLNVCCPSALEXRDREGRVAGCRSACKAMGGDRYCCTGDYASPDXVPPHHLXPRLQGRVPQGLSXRVRRRHLAEPVQGQPVPHHLLPTADIQEMTTTSMDCIFKIIILTKCPTVFIYQSCRACLIRILI

SEQ ID NO: 28116 - DNA, 899 bp, Zea mays subsp. mays
  misc_feature (1)..(899): Ceres Seq. ID no. 12403444
aaaaccctagcccatcagggcagcgaccttctagaaccgtctccaatggcgctactccgagcgctccggcgagcccttccggcgctctcctcgccggcggcggttctcccccgtcgcgccccgcacccactacctcctccgcccgctcctcgtcggttcctggacccgatcgggctccgctccttctccgccgccgccgccaccgcgtcgcaggcgccgcccatgggggccaccctgttcggcgggctcatggacacccggttcccgaagcgccggccgggcttcgccaaccgccggaagagggctagcttgcgccccaaaggtccgtactactgggtgaagtgcaagcctgacgagcccataccagttagtcagccgaaccaagggagcgtacgagggaggaaggagaagaagcggatcaagcagcgcaaggactttatcatggctgagaagaagaagcgcagagctcagtattctgctgctgttaagagaaaggaggcagaacgaacagaaaggaagatggctgctgtggcaagagagcgggcatgggcagcaaggttgatagagctaaaacagattgaggaagacgttaaagctgtaatggcataagggcctgctctggaaaatggcaaggcgtctaacctgtttctgctgctctattttctcctcctttgttcctacatagtttaaattgtcacaattctttgtgatggaatggaagaccagtaccacttctttcaacagtaatatcaaatgccggaactgtttttttaatacagactctcattagaccatgtttggagtttgtttacttttgatgtaatttagaataagtgatgcgatggtatctgtgtgcttgacatctgagatggctgttgtctgcaatatatagttttggt

SEQ ID NO: 28117 - protein, 202 aa, Zea mays subsp. mays
  peptide (1)..(202): Ceres Seq. ID no. 12403445
  misc_feature (19)..(202): NCBI GI NO: 21553452 NR Description: unknown [Arabidopsis thaliana]
  misc_feature (19)..(202): NCBI GI NO: 18409234 NR Description: expressed protein; protein id: At3g51010
KTLAHQGSDLLEPSPMALLRALRRALPALSSPAAVLPRRAPHPLPPPPAPRRFLDPIGLRSFSAAAATASQAPPMGATLFGGLMDTRFPKRRPGFANRRKRASLRPKGPYYWVKCKPDEPIPVSQPNQGSVRGRKEKKRIKQRKDFIMAEKKKRRAQYSAAVKRKEAERTERKMAAVARERAWAARLIELKQIEEDVKAVMA

SEQ ID NO: 28118 - protein, 187 aa, Zea mays subsp. mays
  peptide (1)..(187): Ceres Seq. ID no. 12403446
  misc_feature (4)..(187): NCBI GI NO: 21553452 NR Description: unknown [Arabidopsis thaliana]
  misc_feature (4)..(187): NCBI GI NO: 18409234 NR Description: expressed protein; protein id: At3g51010
MALLRALRRALPALSSPAAVLPRRAPHPLPPPPAPRRFLDPIGLRSFSAAAATASQAPPMGATLFGGLMDTRFPKRRPGFANRRKRASLRPKGPYYWVKCKPDEPIPVSQPNQGSVRGRKEKKRIKQRKDFIMAEKKKRRAQYSAAVKRKEAERTERKMAAVARERAWAARLIELKQIEEDVKAVMA

SEQ ID NO: 28119 - protein, 128 aa, Zea mays subsp. mays
  peptide (1)..(128): Ceres Seq. ID no. 12403447
  misc_feature (1)..(128): NCBI GI NO: 21553452 NR Description: unknown [Arabidopsis thaliana]
  misc_feature (1)..(128): NCBI GI NO: 18409234 NR Description: expressed protein; protein id: At3g51010
MGATLFGGLMDTRFPKRRPGFANRRKRASLRPKGPYYWVKCKPDEPIPVSQPNQGSVRGRKEKKRIKQRKDFIMAEKKKRRAQYSAAVKRKEAERTERKMAAVARERAWAARLIELKQIEEDVKAVMA

SEQ ID NO: 28120 - DNA, 1073 bp, Zea mays subsp. mays
  misc_feature (1)..(1073): Ceres Seq. ID no. 12368746
agttggagtcggagaattttggggtaacaggtgggttggcttcttggctgttagaaggaagggcgcctttgtgctgttctcctaatccaaaagtcgcgtgctgtgctctgctctcgcctcgcacggactcgtggtaaaggatggagaccatgtcggctctcgcgaggacggcgccgccccttgctgggaccattcgccggccgtcctgcgcgctgcggccgacggcgtccctctccttcgccgccgcttcaacgacgccccgcggccggctcgggctggggctgagcacggcgccggcggggagcgggagggcggccagggctcgcgccgtcccgcagcgcatcgtcgcctcctcggaggttgagcgaagctacattatgatcaaaccagatggtgttcagcgtggtctggttggagagattatttctcgctttgagaagaaagggtttttgttgaaaggcttaaaacttttccagtgccccaaggacttggcgcaggagcattacaaggatttgaaggataaacctttctttcctaagctgatcgattacataacttctggccctgttgtctgcatggcctgggagggtgctggtgttgttgcatcagctcgcaaattaataggagctactaacccccttcaagctgaaccagggactataaggggtgatcttgcagttcaaactggaaggaacgttgtccatggaagtgatagtcctgataatggcaagcgtgaaattgaactgtggttcaaagaaggcgagctctgccaatgggaatcagttcaagcaccgtggcttatagaataactcttgctaatcatttccagagttgtattcaatgtttttttttgtgttcgtcttgattcaaggagccatgcaagagtgtatgagtttagttcggctaagtaattagctcatgagggcttgaattatcggttctttttgaggattgaggatttttgcaactgaaacctttgatcagttgctcatgttgagaagctaatttcttgtcatatttacatgtaataaagtccctctactacagtaataaattagtatttcctatggtcc

SEQ ID NO: 28121 - protein, 222 aa, Zea mays subsp. mays
  peptide (1)..(222): Ceres Seq. ID no. 12368747
  misc_feature (75)..(212): Pfam Name: Pfam Description:  Nucleoside diphosphate kinase
  misc_feature (21)..(222): NCBI GI NO: 27807824 NR Description: nucleoside diphosphate kinase [Nicotiana tabacum]
  misc_feature (3)..(222): NCBI GI NO: 21832064 NR Description: nucloside diphosphate kinase 2 [Brassica rapa]
  misc_feature (64)..(222): NCBI GI NO: 266607 NR Description: Nucleoside diphosphate kinase II
  misc_feature (14)..(222): NCBI GI NO: 30697820 NR Description: nucleotide diphosphate kinase Ia (emb|CAB58230.1)
  misc_feature (73)..(222): NCBI GI NO: 11260887 NR Description: nucleoside-diphosphate kinase (EC 2.7.4.6) Ia
  misc_feature (14)..(222): NCBI GI NO: 3093480 NR Description: nucleoside diphosphate kinase type 2
  misc_feature (64)..(222): NCBI GI NO: 1346673 NR Description: Nucleoside diphosphate kinase II
  misc_feature (74)..(222): NCBI GI NO: 22297811 NR Description: nucleoside diphosphate kinase
  misc_feature (74)..(222): NCBI GI NO: 585551 NR Description: NUCLEOSIDE DIPHOSPHATE KINASE I
  misc_feature (75)..(222): NCBI GI NO: 9652119 NR Description: nucleoside diphosphate kinase [Lolium perenne]
METMSALARTAPPLAGTIRRPSCALRPTASLSFAAASTTPRGRLGLGLSTAPAGSGRAARARAVPQRIVASSEVERSYIMIKPDGVQRGLVGEIISRFEKKGFLLKGLKLFQCPKDLAQEHYKDLKDKPFFPKLIDYITSGPVVCMAWEGAGVVASARKLIGATNPLQAEPGTIRGDLAVQTGRNVVHGSDSPDNGKREIELWFKEGELCQWESVQAPWLIE

SEQ ID NO: 28122 - protein, 219 aa, Zea mays subsp. mays
  peptide (1)..(219): Ceres Seq. ID no. 12368748
  misc_feature (72)..(209): Pfam Name: Pfam Description:  Nucleoside diphosphate kinase
  misc_feature (18)..(219): NCBI GI NO: 27807824 NR Description: nucleoside diphosphate kinase [Nicotiana tabacum]
  misc_feature (1)..(219): NCBI GI NO: 21832064 NR Description: nucloside diphosphate kinase 2 [Brassica rapa]
  misc_feature (61)..(219): NCBI GI NO: 266607 NR Description: Nucleoside diphosphate kinase II
  misc_feature (11)..(219): NCBI GI NO: 30697820 NR Description: nucleotide diphosphate kinase Ia (emb|CAB58230.1)
  misc_feature (70)..(219): NCBI GI NO: 11260887 NR Description: nucleoside-diphosphate kinase (EC 2.7.4.6) Ia
  misc_feature (11)..(219): NCBI GI NO: 3093480 NR Description: nucleoside diphosphate kinase type 2
  misc_feature (61)..(219): NCBI GI NO: 1346673 NR Description: Nucleoside diphosphate kinase II
  misc_feature (71)..(219): NCBI GI NO: 22297811 NR Description: nucleoside diphosphate kinase
  misc_feature (71)..(219): NCBI GI NO: 585551 NR Description: NUCLEOSIDE DIPHOSPHATE KINASE I
  misc_feature (72)..(219): NCBI GI NO: 9652119 NR Description: nucleoside diphosphate kinase [Lolium perenne]
MSALARTAPPLAGTIRRPSCALRPTASLSFAAASTTPRGRLGLGLSTAPAGSGRAARARAVPQRIVASSEVERSYIMIKPDGVQRGLVGEIISRFEKKGFLLKGLKLFQCPKDLAQEHYKDLKDKPFFPKLIDYITSGPVVCMAWEGAGVVASARKLIGATNPLQAEPGTIRGDLAVQTGRNVVHGSDSPDNGKREIELWFKEGELCQWESVQAPWLIE

SEQ ID NO: 28123 - protein, 143 aa, Zea mays subsp. mays
  peptide (1)..(143): Ceres Seq. ID no. 12368749
  misc_feature (1)..(133): Pfam Name: Pfam Description:  Nucleoside diphosphate kinase
  misc_feature (1)..(143): NCBI GI NO: 27807824 NR Description: nucleoside diphosphate kinase [Nicotiana tabacum]
  misc_feature (1)..(143): NCBI GI NO: 21832064 NR Description: nucloside diphosphate kinase 2 [Brassica rapa]
  misc_feature (1)..(143): NCBI GI NO: 266607 NR Description: Nucleoside diphosphate kinase II
  misc_feature (1)..(143): NCBI GI NO: 30697820 NR Description: nucleotide diphosphate kinase Ia (emb|CAB58230.1)
  misc_feature (1)..(143): NCBI GI NO: 11260887 NR Description: nucleoside-diphosphate kinase (EC 2.7.4.6) Ia
  misc_feature (1)..(143): NCBI GI NO: 3093480 NR Description: nucleoside diphosphate kinase type 2
  misc_feature (1)..(143): NCBI GI NO: 1346673 NR Description: Nucleoside diphosphate kinase II
  misc_feature (1)..(143): NCBI GI NO: 22297811 NR Description: nucleoside diphosphate kinase
  misc_feature (1)..(143): NCBI GI NO: 585551 NR Description: NUCLEOSIDE DIPHOSPHATE KINASE I
  misc_feature (1)..(143): NCBI GI NO: 9652119 NR Description: nucleoside diphosphate kinase [Lolium perenne]
MIKPDGVQRGLVGEIISRFEKKGFLLKGLKLFQCPKDLAQEHYKDLKDKPFFPKLIDYITSGPVVCMAWEGAGVVASARKLIGATNPLQAEPGTIRGDLAVQTGRNVVHGSDSPDNGKREIELWFKEGELCQWESVQAPWLIE

SEQ ID NO: 28124 - DNA, 962 bp, Zea mays subsp. mays
  misc_feature (1)..(962): Ceres Seq. ID no. 12349152
agtcagtgggatgtgtggatgctaaccagtgcagtggaggattagcgatcttctagaatcgtgtgcgagctggacagcaggaagagccgtagagttcgacgcgaggagcgagcgagtgattagctcgtgcgtgctgtgcaaggaaagtaaccaagcagatcgatcggtcgaggcgggtaggacaggatccagaggtagctagccatggcggaggaagcgtctgcgcctgcggcggggacggaagcgccgccggggaagatgacgatggtggtaggggtcgacgagagcgagcacagcttctacgcgctgcagtgggcactgcagcacttcttcccgccgggccagccgcagcagtaccgcctcgtcgtcgtcaccgccaagcccaccgccgcctccgccgtcggcctcgccggcccaggcgccgcggatgtgctgccgtacgtggaggcggatctcaagcgctccgccctgcgcgtcgtcgaaaaagccaaaggcctctgcacacaggcgagcgacgctgtgtttgaggcgctggagggggacgctaggaacgtcctctgcgaggctgtcgagaggcacggggccgagatgctcgtcgtcggcagccatggttacggagccattaaaagggctgttcttggaagtgtgagcgactactgtgcccatcacgcgcactgcaccgtgatgatagtaaagaagcccaagcagcacaagcactgatcaatgccgactgatcactacgtgtactgcaaataatttgtactactgcaaagttatgtgtgcgtccgtccgtttgtgaataattgggtcatcaaccatcacatcttcggttgcttctacaagtatccgatccaatccttctacgagtggattgggatttacaaataattgattgctctctgaacctgaaaacaatgtatttgtattaatgtgttggaacacgtatatgtagttgcaacttc

SEQ ID NO: 28125 - protein, 171 aa, Zea mays subsp. mays
  peptide (1)..(171): Ceres Seq. ID no. 12349153
  misc_feature (23)..(171): NCBI GI NO: 38016525 NR Description: fiber protein Fb19 [Gossypium barbadense]
  misc_feature (17)..(167): NCBI GI NO: 18407428 NR Description: expressed protein; protein id: At2g47710
  misc_feature (17)..(167): NCBI GI NO: 21555580 NR Description: unknown [Arabidopsis thaliana]
  misc_feature (10)..(167): NCBI GI NO: 22831145 NR Description: contains ESTsAU063900
  misc_feature (10)..(167): NCBI GI NO: 20067187 NR Description: putative universal stress protein USP1
  misc_feature (4)..(168): NCBI GI NO: 18399413 NR Description: ethylene-responsive protein, putative
  misc_feature (4)..(168): NCBI GI NO: 30681955 NR Description: ethylene-responsive protein -related
  misc_feature (1)..(169): NCBI GI NO: 40539010 NR Description: putative stress-related protein
  misc_feature (4)..(168): NCBI GI NO: 21594903 NR Description: ethylene-responsive protein, putative
  misc_feature (10)..(165): NCBI GI NO: 34914610 NR Description: P0520B06.18
MAEEASAPAAGTEAPPGKMTMVVGVDESEHSFYALQWALQHFFPPGQPQQYRLVVVTAKPTAASAVGLAGPGAADVLPYVEADLKRSALRVVEKAKGLCTQASDAVFEALEGDARNVLCEAVERHGAEMLVVGSHGYGAIKRAVLGSVSDYCAHHAHCTVMIVKKPKQHKH

SEQ ID NO: 28126 - protein, 153 aa, Zea mays subsp. mays
  peptide (1)..(153): Ceres Seq. ID no. 12349154
  misc_feature (5)..(153): NCBI GI NO: 38016525 NR Description: fiber protein Fb19 [Gossypium barbadense]
  misc_feature (1)..(149): NCBI GI NO: 18407428 NR Description: expressed protein; protein id: At2g47710
  misc_feature (1)..(149): NCBI GI NO: 21555580 NR Description: unknown [Arabidopsis thaliana]
  misc_feature (1)..(149): NCBI GI NO: 22831145 NR Description: contains ESTsAU063900
  misc_feature (1)..(149): NCBI GI NO: 20067187 NR Description: putative universal stress protein USP1
  misc_feature (1)..(150): NCBI GI NO: 18399413 NR Description: ethylene-responsive protein, putative
  misc_feature (1)..(150): NCBI GI NO: 30681955 NR Description: ethylene-responsive protein -related
  misc_feature (1)..(151): NCBI GI NO: 40539010 NR Description: putative stress-related protein
  misc_feature (1)..(150): NCBI GI NO: 21594903 NR Description: ethylene-responsive protein, putative
  misc_feature (1)..(147): NCBI GI NO: 34914610 NR Description: P0520B06.18
MTMVVGVDESEHSFYALQWALQHFFPPGQPQQYRLVVVTAKPTAASAVGLAGPGAADVLPYVEADLKRSALRVVEKAKGLCTQASDAVFEALEGDARNVLCEAVERHGAEMLVVGSHGYGAIKRAVLGSVSDYCAHHAHCTVMIVKKPKQHKH

SEQ ID NO: 28127 - protein, 151 aa, Zea mays subsp. mays
  peptide (1)..(151): Ceres Seq. ID no. 12349155
  misc_feature (3)..(151): NCBI GI NO: 38016525 NR Description: fiber protein Fb19 [Gossypium barbadense]
  misc_feature (1)..(147): NCBI GI NO: 18407428 NR Description: expressed protein; protein id: At2g47710
  misc_feature (1)..(147): NCBI GI NO: 21555580 NR Description: unknown [Arabidopsis thaliana]
  misc_feature (1)..(147): NCBI GI NO: 22831145 NR Description: contains ESTsAU063900
  misc_feature (1)..(147): NCBI GI NO: 20067187 NR Description: putative universal stress protein USP1
  misc_feature (1)..(148): NCBI GI NO: 18399413 NR Description: ethylene-responsive protein, putative
  misc_feature (1)..(148): NCBI GI NO: 30681955 NR Description: ethylene-responsive protein -related
  misc_feature (1)..(149): NCBI GI NO: 40539010 NR Description: putative stress-related protein
  misc_feature (1)..(148): NCBI GI NO: 21594903 NR Description: ethylene-responsive protein, putative
  misc_feature (1)..(145): NCBI GI NO: 34914610 NR Description: P0520B06.18
MVVGVDESEHSFYALQWALQHFFPPGQPQQYRLVVVTAKPTAASAVGLAGPGAADVLPYVEADLKRSALRVVEKAKGLCTQASDAVFEALEGDARNVLCEAVERHGAEMLVVGSHGYGAIKRAVLGSVSDYCAHHAHCTVMIVKKPKQHKH

SEQ ID NO: 28128 - DNA, 934 bp, Zea mays subsp. mays; identical to SEQ ID NO: 19931
  misc_feature (1)..(934): Ceres Seq. ID no. 12368601

SEQ ID NO: 28129 - protein, 152 aa, Zea mays subsp. mays; identical to SEQ ID NO: 19932
  peptide (1)..(152): Ceres Seq. ID no. 12368602
  misc_feature (15)..(132): Pfam Name: Pfam Description:  Oleosin
  misc_feature (1)..(152): NCBI GI NO: 1076818 NR Description: oleosin 17 - maize
  misc_feature (1)..(152): NCBI GI NO: 129081 NR Description: Oleosin Zm-II
  misc_feature (1)..(152): NCBI GI NO: 28273373 NR Description: oleosin [Oryza sativa (japonica cultivar-group)]
  misc_feature (1)..(152): NCBI GI NO: 3334279 NR Description: OLEOSIN 18 KD (OSE721)
  misc_feature (1)..(152): NCBI GI NO: 1362166 NR Description: oleosin 1 - barley
  misc_feature (1)..(152): NCBI GI NO: 82051 NR Description: lipid body-associated membrane protein - carrot
  misc_feature (1)..(150): NCBI GI NO: 9963897 NR Description: oleosin [Perilla frutescens]
  misc_feature (1)..(150): NCBI GI NO: 10880961 NR Description: 19 kDa oleosin [Perilla frutescens]
  misc_feature (1)..(150): NCBI GI NO: 22651523 NR Description: oleosin [Olea europaea subsp. europaea]
  misc_feature (1)..(138): NCBI GI NO: 13161008 NR Description: oleosin variant B [Arachis hypogaea]

SEQ ID NO: 28130 - protein, 145 aa, Zea mays subsp. mays; identical to SEQ ID NO: 19933
  peptide (1)..(145): Ceres Seq. ID no. 12368603
  misc_feature (8)..(125): Pfam Name: Pfam Description:  Oleosin
  misc_feature (1)..(145): NCBI GI NO: 1076818 NR Description: oleosin 17 - maize
  misc_feature (1)..(145): NCBI GI NO: 129081 NR Description: Oleosin Zm-II
  misc_feature (1)..(145): NCBI GI NO: 28273373 NR Description: oleosin [Oryza sativa (japonica cultivar-group)]
  misc_feature (1)..(145): NCBI GI NO: 3334279 NR Description: OLEOSIN 18 KD (OSE721)
  misc_feature (1)..(145): NCBI GI NO: 1362166 NR Description: oleosin 1 - barley
  misc_feature (1)..(145): NCBI GI NO: 82051 NR Description: lipid body-associated membrane protein - carrot
  misc_feature (1)..(143): NCBI GI NO: 9963897 NR Description: oleosin [Perilla frutescens]
  misc_feature (1)..(143): NCBI GI NO: 10880961 NR Description: 19 kDa oleosin [Perilla frutescens]
  misc_feature (1)..(143): NCBI GI NO: 22651523 NR Description: oleosin [Olea europaea subsp. europaea]
  misc_feature (1)..(131): NCBI GI NO: 13161008 NR Description: oleosin variant B [Arachis hypogaea]

SEQ ID NO: 28131 - DNA, 2103 bp, Zea mays subsp. mays
  misc_feature (1)..(2103): Ceres Seq. ID no. 12343158
acattggaacgcgaacgctctcggatccatccacctccaaagtccaaaagcgaagcctacgcccgccccaacggtgaaaacgtcggaaccctagatccctctcacggtcgcgcctgtgctccaaaaccttagatccgacatgcatcagcccagagcccgctacccacccgggtatggctccagcgggggaggcggtggcgggggaggcggtagtggaggaggaagaggaggcagcggcggcggaggaaaccacaactactacggccggaacacacatccacagcatcaacaccactaccagcagcagcagcagcactcgcataggaactcctcgcaccagcagcagtggctgcggcgagaccagggccccgccgttgcggggccagtgtctggaaacgctgtgcctaagacggcgcctcagcttgacgctgttgactcgagttctcaagattggaaggctcaactaaatataccagctccagacacacgctacaggacagaggatgtcactgcaacaaaaggcaatgagtttgaggattatttcttgaaacgtgagttgcttatgggaatatatgagaagggatttgaaaggccatctcctattcaagaagaaagcattcctattgcgttgactggaagtgatattcttgcaagggcgaaaaatggcactggaaagactgctgccttttgcattccggcacttgaaaaaattgatcctgaaaataatgcaattcaagttgttatactagtaccaacaagggaactggctctgcaaacttcacaagtgtgtaaagagcttgggaaatacctaaacattgaagttatggttagcactggaggaaccagcttgaaggatgacatcatgcgtttataccaacctgttcatctactcgttgggactcctggccgaatacttgatcttaccaggaagggcatttgtgtgctgaaagattgttcaatgcttgtcatggatgaggcagacaagctattagctccagagtttcagccttctgtggaggcacttattcatttccttccacctagtcgacaactgttgatgttttcagcaacctttcctgtaactgtcaaggaattcaaagagaaatatctgcctagaccttatgtgattaatctaatggacgaactgaccctgaaaggaatcacacaatattatgcttttgttgaagaaaggcagaaagttcattgcctgaatacacttttctcaaagcttcaaattaatcaatccattatattctgcaactctgttaatagagttgagctgctggctaaaaaaataactgaactcggttattcatgcttctacattcatgctaagatgttgcaagaccacagaaatcgagtatttcatgattttcgtaatggtgcttgcagaaaccttgtgtgcacagatctgtttaccagaggaattgatattcaggctgttaatgtggttattaattttgacttccctaagacatctgagacatatttacacagggttggccgttctgggagatatggacaccttggtttagcagtgaacttgatcacttatgaggaccgtttcaacttgtataggattgagcaagagcttggaacagaaattaagacaatacccccgcagatcgacctggccgtatactgccaatgatgaatgcgacattcaggagcatcaaacacttctctttctatttgagaaacttatcaggcaaatacgtttgtacatagcaacccatcagggctttgttttggcaccttgatgacgtttgtaagcttacctggattagtagaggaagtgcttcctgtaggcactgatactaacccgtttagctgaggacatgcacgctgggctgcttggaggcccagaactatgatgagatgagacaatatcttacctcacttgacattttcactcgacttgtttgccagtctcagttctacttgacttgcctgttctcatttgattcatcttccgttttcttctttcctaatgttatgatgcatatggatgtctttctgtagctgtatgatgtgttgagtttattttttcttggtgtatgtatacagcttaacttgaaattatttccatatcaacttctttgc

SEQ ID NO: 28132 - protein, 503 aa, Zea mays subsp. mays
  peptide (1)..(503): Ceres Seq. ID no. 12343159
  misc_feature (142)..(344): Pfam Name: Pfam Description:  DEAD/DEAH box helicase
  misc_feature (8)..(503): NCBI GI NO: 37535822 NR Description: putative RNA helicase
  misc_feature (8)..(503): NCBI GI NO: 22758337 NR Description: putative RNA helicase
  misc_feature (4)..(503): NCBI GI NO: 32489827 NR Description: OSJNBb0039L24.10
  misc_feature (5)..(503): NCBI GI NO: 22328183 NR Description: DEAD/DEAH box RNA helicase, putative
  misc_feature (5)..(503): NCBI GI NO: 11267537 NR Description: RNA helicase RH8 [imported] - Arabidopsis thaliana
  misc_feature (5)..(503): NCBI GI NO: 7436453 NR Description: probable RNA helicase (EC 3
  misc_feature (1)..(503): NCBI GI NO: 15233064 NR Description: DEAD/DEAH box RNA helicase, putative
  misc_feature (41)..(503): NCBI GI NO: 15225898 NR Description: DEAD/DEAH box RNA helicase, putative
  misc_feature (1)..(503): NCBI GI NO: 11267538 NR Description: RNA helicase RH12
  misc_feature (41)..(503): NCBI GI NO: 14532476 NR Description: At2g45810/F4I18.21 [Arabidopsis thaliana]
MHQPRARYPPGYGSSGGGGGGGGGSGGGRGGSGGGGNHNYYGRNTHPQHQHHYQQQQQHSHRNSSHQQQWLRRDQGPAVAGPVSGNAVPKTAPQLDAVDSSSQDWKAQLNIPAPDTRYRTEDVTATKGNEFEDYFLKRELLMGIYEKGFERPSPIQEESIPIALTGSDILARAKNGTGKTAAFCIPALEKIDPENNAIQVVILVPTRELALQTSQVCKELGKYLNIEVMVSTGGTSLKDDIMRLYQPVHLLVGTPGRILDLTRKGICVLKDCSMLVMDEADKLLAPEFQPSVEALIHFLPPSRQLLMFSATFPVTVKEFKEKYLPRPYVINLMDELTLKGITQYYAFVEERQKVHCLNTLFSKLQINQSIIFCNSVNRVELLAKKITELGYSCFYIHAKMLQDHRNRVFHDFRNGACRNLVCTDLFTRGIDIQAVNVVINFDFPKTSETYLHRVGRSGRYGHLGLAVNLITYEDRFNLYRIEQELGTEIKTIPPQIDLAVYCQ

SEQ ID NO: 28133 - protein, 362 aa, Zea mays subsp. mays
  peptide (1)..(362): Ceres Seq. ID no. 12343160
  misc_feature (1)..(203): Pfam Name: Pfam Description:  DEAD/DEAH box helicase
  misc_feature (1)..(362): NCBI GI NO: 37535822 NR Description: putative RNA helicase
  misc_feature (1)..(362): NCBI GI NO: 22758337 NR Description: putative RNA helicase
  misc_feature (1)..(362): NCBI GI NO: 32489827 NR Description: OSJNBb0039L24.10
  misc_feature (1)..(362): NCBI GI NO: 22328183 NR Description: DEAD/DEAH box RNA helicase, putative
  misc_feature (1)..(362): NCBI GI NO: 11267537 NR Description: RNA helicase RH8 [imported] - Arabidopsis thaliana
  misc_feature (1)..(362): NCBI GI NO: 7436453 NR Description: probable RNA helicase (EC 3
  misc_feature (1)..(362): NCBI GI NO: 15233064 NR Description: DEAD/DEAH box RNA helicase, putative
  misc_feature (1)..(362): NCBI GI NO: 15225898 NR Description: DEAD/DEAH box RNA helicase, putative
  misc_feature (1)..(362): NCBI GI NO: 11267538 NR Description: RNA helicase RH12
  misc_feature (1)..(362): NCBI GI NO: 14532476 NR Description: At2g45810/F4I18.21 [Arabidopsis thaliana]
MGIYEKGFERPSPIQEESIPIALTGSDILARAKNGTGKTAAFCIPALEKIDPENNAIQVVILVPTRELALQTSQVCKELGKYLNIEVMVSTGGTSLKDDIMRLYQPVHLLVGTPGRILDLTRKGICVLKDCSMLVMDEADKLLAPEFQPSVEALIHFLPPSRQLLMFSATFPVTVKEFKEKYLPRPYVINLMDELTLKGITQYYAFVEERQKVHCLNTLFSKLQINQSIIFCNSVNRVELLAKKITELGYSCFYIHAKMLQDHRNRVFHDFRNGACRNLVCTDLFTRGIDIQAVNVVINFDFPKTSETYLHRVGRSGRYGHLGLAVNLITYEDRFNLYRIEQELGTEIKTIPPQIDLAVYCQ

SEQ ID NO: 28134 - protein, 275 aa, Zea mays subsp. mays
  peptide (1)..(275): Ceres Seq. ID no. 12343161
  misc_feature (1)..(116): Pfam Name: Pfam Description:  DEAD/DEAH box helicase
  misc_feature (1)..(275): NCBI GI NO: 37535822 NR Description: putative RNA helicase
  misc_feature (1)..(275): NCBI GI NO: 22758337 NR Description: putative RNA helicase
  misc_feature (1)..(275): NCBI GI NO: 32489827 NR Description: OSJNBb0039L24.10
  misc_feature (1)..(275): NCBI GI NO: 22328183 NR Description: DEAD/DEAH box RNA helicase, putative
  misc_feature (1)..(275): NCBI GI NO: 11267537 NR Description: RNA helicase RH8 [imported] - Arabidopsis thaliana
  misc_feature (1)..(275): NCBI GI NO: 7436453 NR Description: probable RNA helicase (EC 3
  misc_feature (1)..(275): NCBI GI NO: 15233064 NR Description: DEAD/DEAH box RNA helicase, putative
  misc_feature (1)..(275): NCBI GI NO: 15225898 NR Description: DEAD/DEAH box RNA helicase, putative
  misc_feature (1)..(275): NCBI GI NO: 11267538 NR Description: RNA helicase RH12
  misc_feature (1)..(275): NCBI GI NO: 14532476 NR Description: At2g45810/F4I18.21 [Arabidopsis thaliana]
MVSTGGTSLKDDIMRLYQPVHLLVGTPGRILDLTRKGICVLKDCSMLVMDEADKLLAPEFQPSVEALIHFLPPSRQLLMFSATFPVTVKEFKEKYLPRPYVINLMDELTLKGITQYYAFVEERQKVHCLNTLFSKLQINQSIIFCNSVNRVELLAKKITELGYSCFYIHAKMLQDHRNRVFHDFRNGACRNLVCTDLFTRGIDIQAVNVVINFDFPKTSETYLHRVGRSGRYGHLGLAVNLITYEDRFNLYRIEQELGTEIKTIPPQIDLAVYCQ

SEQ ID NO: 28135 - DNA, 1697 bp, Zea mays subsp. mays
  misc_feature (1)..(1697): Ceres Seq. ID no. 12387264
gtacctccggcgccccctccgacaccggtcctccggcctgcgcaggctagctagctctatataccaccgtgcctccgccgcgcaggcaggggagatccaagggtccgagcaaaaggccggcggcggcgagccagccagccagctaaagcgatcaatatatacatatatactatcgagcaacaagaaagaaaggaaaaaagaaggcaagcccaccagggccggcgaagagaggagctaataaggaaggaaggaaggaaggaaggaagatgatgagcaaggaggcagtggtgaacgcgttcctgggctgcttcatgcacgtggggctggcgctggtgctcgccgtctacctccccgtggcctttgtgtgccgcctcctccaccgcctcctcgtccgccccttcgccaggggcgaggacctccgcggcaaggtcatcctcgtcaccggcgcgtcctccggcatcggcgagcacctggtgtacgagtacgcgaggcacggcgcgtgcgtggcgctggtggcgcgcacggaggtggcgctgcgcgccgtggccaaggcggcgcgcgacctgggcgcccccgacgtgctggtcgtgccggccgacgtcaccaaggtcgacgacgccaagcgcgccgtcgaggagaccgtcgcgcacttcggcaaactgaatcacttggtggccaaacgccgggatctggtccagctgcttctttgaagagatcaccaacataaccgccttccataatgttattgatctcaacttctggggtgccgtgtacccgacctacttcgcgctgccgtacctcaaggccagccggggcaacatcgtggtgaccgcctccgtcgccggcagggtgccgacagccaggatgagcttctacaacgcaagcaaaggcgccgtgatacgtttctacgagacgctgagggctgagctggggtcccacgtgcacgtcaccatcctcacgcccggctacgtcgtctccaacctcaccaagggcaagggcctccagaaggacggccatgtcggcatcgacgaggaggcccgcgacgtacgtgatgagctcgatccaccgccctccctttatttatataatttcctcctcctacgtgcacgcgaacagtacagctacagcgacgaaatggcatgcatgcgcgcgcgcgcttgcagatcaacgtggggccgatgccggtgggcaagacggagtcgctggccgaggtggtggtggccagcgtgcgccgtcgggactactacgtcacgtggcccggctggtactggcccttccacatggtcatgtgcgccgcgccggagctggtggactggttctcccgcaccttctacgtctccaagtccggcgaccaggacggcggcggcggcgcgctcagcaagaagatcctggaggccgtcggcgggaagaagttcctctacccccagaccatacgctcacagaccgccatggcagccaataactgacaacttgcattgcactgtgttatatatatgtcattcatgagaatgcacggtcgatctgttgtttggattagaacacggtgatgatcgaacgggccagcacgggtcaaattgtttattcgtttcgtttcggattttttttccatttcctctgccttttctccacttccgattttacaaatggtcaatgtgtatcaagtaattaatacgaatgttcattcgtggttggcttgc

SEQ ID NO: 28136 - protein, 213 aa, Zea mays subsp. mays
  peptide (1)..(213): Ceres Seq. ID no. 12387265
  misc_feature (1)..(62): NCBI GI NO: 18423187 NR Description: 11-beta-hydroxysteroid dehydrogenase-like
  misc_feature (1)..(67): NCBI GI NO: 15824408 NR Description: steroleosin [Sesamum indicum]
  misc_feature (1)..(61): NCBI GI NO: 21311775 NR Description: steroleosin-B [Sesamum indicum]
  misc_feature (1)..(61): NCBI GI NO: 15234888 NR Description: putative oxidoreductase; protein id: At4g10020.1
  misc_feature (1)..(70): NCBI GI NO: 15241261 NR Description: putative protein; protein id: At5g50770.1
  misc_feature (1)..(41): NCBI GI NO: 15232777 NR Description: putative protein; protein id: At3g47350.1
  misc_feature (1)..(41): NCBI GI NO: 8777392 NR Description: 11-beta-hydroxysteroid dehydrogenase-like
  misc_feature (1)..(41): NCBI GI NO: 15241203 NR Description: 11-beta-hydroxysteroid dehydrogenase-like
  misc_feature (1)..(50): NCBI GI NO: 15232779 NR Description: putative protein; protein id: At3g47360.1
  misc_feature (1)..(42): NCBI GI NO: 24372033 NR Description: oxidoreductase
MSFYNASKGAVIRFYETLRAELGSHVHVTILTPGYVVSNLTKGKGLQKDGHVGIDEEARDVRDELDPPPSLYLYNFLLLRAREQYSYSDEMACMRARACRSTWGRCRWARRSRWPRWWWPACAVGTTTSRGPAGTGPSTWSCAPRRSWWTGSPAPSTSPSPATRTAAAARSARRSWRPSAGRSSSTPRPYAHRPPWQPITDNLHCTVLYICHS

SEQ ID NO: 28137 - protein, 148 aa, Zea mays subsp. mays
  peptide (1)..(148): Ceres Seq. ID no. 12387266
MSASTRRPATYVMSSIHRPPFIYIISSSYVHANSTATATKWHACARALADQRGADAGGQDGVAGRGGGGQRAPSGLLRHVARLVLALPHGHVRRAGAGGLVLPHLLRLQVRRPGRRRRRAQQEDPGGRRREEVPLPPDHTLTDRHGSQ

SEQ ID NO: 28138 - protein, 147 aa, Zea mays subsp. mays
  peptide (1)..(147): Ceres Seq. ID no. 12387267
  misc_feature (7)..(136): NCBI GI NO: 18423187 NR Description: 11-beta-hydroxysteroid dehydrogenase-like
  misc_feature (7)..(136): NCBI GI NO: 15824408 NR Description: steroleosin [Sesamum indicum]
  misc_feature (7)..(136): NCBI GI NO: 21311775 NR Description: steroleosin-B [Sesamum indicum]
  misc_feature (7)..(136): NCBI GI NO: 15234888 NR Description: putative oxidoreductase; protein id: At4g10020.1
  misc_feature (49)..(136): NCBI GI NO: 15241261 NR Description: putative protein; protein id: At5g50770.1
  misc_feature (24)..(136): NCBI GI NO: 15232777 NR Description: putative protein; protein id: At3g47350.1
  misc_feature (24)..(136): NCBI GI NO: 8777392 NR Description: 11-beta-hydroxysteroid dehydrogenase-like
  misc_feature (24)..(136): NCBI GI NO: 15241203 NR Description: 11-beta-hydroxysteroid dehydrogenase-like
  misc_feature (22)..(136): NCBI GI NO: 15232779 NR Description: putative protein; protein id: At3g47360.1
  misc_feature (49)..(136): NCBI GI NO: 24372033 NR Description: oxidoreductase
MMSKEAVVNAFLGCFMHVGLALVLAVYLPVAFVCRLLHRLLVRPFARGEDLRGKVILVTGASSGIGEHLVYEYARHGACVALVARTEVALRAVAKAARDLGAPDVLVVPADVTKVDDAKRAVEETVAHFGKLNHLVAKRRDLVQLLL

SEQ ID NO: 28139 - DNA, 1517 bp, Zea mays subsp. mays
  misc_feature (1)..(1517): Ceres Seq. ID no. 12404731
acacaatcacgctacagagcgcagagctgcacgctccaccggcgaactcacctcggccgccctcctctgccagatagcctccctctactattcaagcccaaaccctaaatcctcggttcccaaatggcgacgccgccgactgcgctgctgttgctcctcgcggcggcagcggcattccacggcgcgacggcgaagacgacgatcgagccgtgctctggcgcggacgcgtgcccggctcttctgggctacaagctctacgcggacatgaaggtgtccgaggtggcggcgctcttcggcgccgacccggcagcggtactggctgccaacgcgctcgacttcgcctctccaggcgccgccaaccgcatcctccccgcgggaacacccctccgcgtgcccacccgctgcgcctgcgccgacggcgtccgcaagtccgtcgccatccgctacgccgcccggccttccgacacgctcggctccatctccgaggtcgtcttcgccggcctcccctcggccgaccagatccgcaccgccaacgggctcgccgccgaggaccccgacgcgccgctcaacccgggccaggagctcgtcatcccgctcccctgcgtctgcttcaactccaccgacaacaacctccccgctgtgtacctctcctatgtcgtgcaggtcggggacaccgtggaatccatcgccgccagccacacaaccaccgtcactgatatcagcaatgtgaacgccatggggagccccattgtcgcaccaggcgacatccttgccataccattgtctgcttgtgcctcagcatttcctaactctgcttcggactatggattgcttgtggcaaatggaacctatgcactgactgctggtaactgtgtggagtgcagttgtgggccagcgaatctcaatttgtattgcatgccgtcttcactatcagcatcatgttcaagtatgcaatgctctaatagcagcctaattcttggtaatgtgactgcacaacccaccactggtggctgcagtgtctcatcttgcaactatggtggctatgtcaatggaaccattgcaacatcgctatcctcaggtcttcaacccatgtgtccaggaccgcatcaatttcccccactcacggcggtgccaactgcggcaaaccatgggtcttattccccatcacctgcaccaggacctggagatgctggtggtgccaccccaggaggttccagcctttctccatcaaatgagcctgctgggaacagctcacaagcggctgcgataaatcaaccatgccgtttcctcctcattttcattctttctgtgacattgtccttgcgggtgtggattcctgtgtagagtattgttttttttaaataactatgtagagtatttgttggctgtatttgtattgagcgtggaaggccttatttggggccaggtggaacctgaatgaagaatgcagtagcctgtcttcgttagtgtccggtgaaactttggtatgattttggtttctccagaatttgtatatg

SEQ ID NO: 28140 - protein, 406 aa, Zea mays subsp. mays
  peptide (1)..(406): Ceres Seq. ID no. 12404732
  misc_feature (177)..(219): Pfam Name: Pfam Description:  LysM domain
  misc_feature (10)..(396): NCBI GI NO: 18395044 NR Description: expressed protein; protein id: At1g21880
  misc_feature (1)..(375): NCBI GI NO: 30699276 NR Description: expressed protein [Arabidopsis thaliana]
  misc_feature (10)..(314): NCBI GI NO: 30687570 NR Description: expressed protein [Arabidopsis thaliana]
  misc_feature (1)..(375): NCBI GI NO: 25406518 NR Description: unknown protein T5M16.22
  misc_feature (30)..(325): NCBI GI NO: 28207683 NR Description: Erwinia induced protein 1 [Solanum tuberosum]
  misc_feature (1)..(324): NCBI GI NO: 22758281 NR Description: Unknown protein
  misc_feature (1)..(330): NCBI GI NO: 18398317 NR Description: expressed protein; protein id: At2g17120
  misc_feature (1)..(330): NCBI GI NO: 21593990 NR Description: unknown [Arabidopsis thaliana]
  misc_feature (323)..(380): NCBI GI NO: 1084362 NR Description: extensin-like protein S3 - alfalfa
  misc_feature (187)..(385): NCBI GI NO: 13592175 NR Description: ppg3 [Leishmania major]
MATPPTALLLLLAAAAAFHGATAKTTIEPCSGADACPALLGYKLYADMKVSEVAALFGADPAAVLAANALDFASPGAANRILPAGTPLRVPTRCACADGVRKSVAIRYAARPSDTLGSISEVVFAGLPSADQIRTANGLAAEDPDAPLNPGQELVIPLPCVCFNSTDNNLPAVYLSYVVQVGDTVESIAASHTTTVTDISNVNAMGSPIVAPGDILAIPLSACASAFPNSASDYGLLVANGTYALTAGNCVECSCGPANLNLYCMPSSLSASCSSMQCSNSSLILGNVTAQPTTGGCSVSSCNYGGYVNGTIATSLSSGLQPMCPGPHQFPPLTAVPTAANHGSYSPSPAPGPGDAGGATPGGSSLSPSNEPAGNSSQAAAINQPCRFLLIFILSVTLSLRVWIPV

SEQ ID NO: 28141 - protein, 359 aa, Zea mays subsp. mays
  peptide (1)..(359): Ceres Seq. ID no. 12404733
  misc_feature (130)..(172): Pfam Name: Pfam Description:  LysM domain
  misc_feature (1)..(349): NCBI GI NO: 18395044 NR Description: expressed protein; protein id: At1g21880
  misc_feature (1)..(328): NCBI GI NO: 30699276 NR Description: expressed protein [Arabidopsis thaliana]
  misc_feature (1)..(267): NCBI GI NO: 30687570 NR Description: expressed protein [Arabidopsis thaliana]
  misc_feature (1)..(328): NCBI GI NO: 25406518 NR Description: unknown protein T5M16.22
  misc_feature (1)..(278): NCBI GI NO: 28207683 NR Description: Erwinia induced protein 1 [Solanum tuberosum]
  misc_feature (1)..(277): NCBI GI NO: 22758281 NR Description: Unknown protein
  misc_feature (1)..(283): NCBI GI NO: 18398317 NR Description: expressed protein; protein id: At2g17120
  misc_feature (1)..(283): NCBI GI NO: 21593990 NR Description: unknown [Arabidopsis thaliana]
  misc_feature (276)..(333): NCBI GI NO: 1084362 NR Description: extensin-like protein S3 - alfalfa
  misc_feature (140)..(338): NCBI GI NO: 13592175 NR Description: ppg3 [Leishmania major]
MKVSEVAALFGADPAAVLAANALDFASPGAANRILPAGTPLRVPTRCACADGVRKSVAIRYAARPSDTLGSISEVVFAGLPSADQIRTANGLAAEDPDAPLNPGQELVIPLPCVCFNSTDNNLPAVYLSYVVQVGDTVESIAASHTTTVTDISNVNAMGSPIVAPGDILAIPLSACASAFPNSASDYGLLVANGTYALTAGNCVECSCGPANLNLYCMPSSLSASCSSMQCSNSSLILGNVTAQPTTGGCSVSSCNYGGYVNGTIATSLSSGLQPMCPGPHQFPPLTAVPTAANHGSYSPSPAPGPGDAGGATPGGSSLSPSNEPAGNSSQAAAINQPCRFLLIFILSVTLSLRVWIPV

SEQ ID NO: 28142 - DNA, 1061 bp, Zea mays subsp. mays
  misc_feature (1)..(1061): Ceres Seq. ID no. 13598842
  misc_feature (809)..(809): n is a, c, t, g, unknown, or other
gtgtctcctctcttcttcctccgctccacttcctgcacccgcttcttcccccaaaggccaaaaccctaaatctcctccctccctccctccaaacacctagctgccgccggttcccgcgtatgggagggtcgcggcgcaaattgaagcgctcgcgcactaaggtccgcgtggggcttccccgccggaaacccaatgaattcaaggcggccttcgaactccccgaggcactcgccgccgccgccggggccggggcgggctgggacgcggagggcagcgtagtgaagaactacgccgcgttcggggtggtggccaacccaaacctactcggtgcgcactcccgcggcacgccgcggctcgtccagagcgcggcgctgcaggcgcccgacgtcgccgccgcgcatgcacccgtcccggagttcgagccaatcgataccggcagcgatctcgagaacgacgacctgaagtctgctcttgggaagaaaaggaaggatggcaaatctgcaccattgcaaccacttactaaagttcaacgtgtttgcattggcagattaatagagaagtacggtgatgactacaaggccatgttcatggataccaagctgaacgcgatgcagcactctgtgggtacattgaagaaactatgcgaaagacaccacgttgatggcaagatctttgtctatccactttagtattgtgccggcacctacttcagcctcagtgtactcttttcgtcccgttaatggaacaagaacaattttgcaatttgccccaaagaggaagccgcaattcagaactattgtgtacttaanaaaaaaaaaaaaaaaaaaaaaaaaaaaaaaaaaaaaaaaaaaaaaaaaaaaaaaaaaaaaaaaaaaaaaaaaaaaaaaaaaaaaaaaaaaaaaaaagaagaatttttaaaaaaaaaaaaaattttttccccccccccccccggggggggggggcgggccccctttccccctttggggggggtttttccccgccccccgggggggggtttttaccccggggggggggggaaaccccggggggccccccttttt

SEQ ID NO: 28143 - protein, 228 aa, Zea mays subsp. mays
  peptide (1)..(228): Ceres Seq. ID no. 13598843
  misc_feature (40)..(219): NCBI GI NO: 18379024 NR Description: expressed protein [Arabidopsis thaliana]
  misc_feature (40)..(151): NCBI GI NO: 25372996 NR Description: hypothetical protein F22D16
VSSLLPPLHFLHPLLPPKAKTLNLLPPSLQTPSCRRFPRMGGSRRKLKRSRTKVRVGLPRRKPNEFKAAFELPEALAAAAGAGAGWDAEGSVVKNYAAFGVVANPNLLGAHSRGTPRLVQSAALQAPDVAAAHAPVPEFEPIDTGSDLENDDLKSALGKKRKDGKSAPLQPLTKVQRVCIGRLIEKYGDDYKAMFMDTKLNAMQHSVGTLKKLCERHHVDGKIFVYPL

SEQ ID NO: 28144 - protein, 189 aa, Zea mays subsp. mays
  peptide (1)..(189): Ceres Seq. ID no. 13598844
  misc_feature (1)..(180): NCBI GI NO: 18379024 NR Description: expressed protein [Arabidopsis thaliana]
  misc_feature (1)..(112): NCBI GI NO: 25372996 NR Description: hypothetical protein F22D16
MGGSRRKLKRSRTKVRVGLPRRKPNEFKAAFELPEALAAAAGAGAGWDAEGSVVKNYAAFGVVANPNLLGAHSRGTPRLVQSAALQAPDVAAAHAPVPEFEPIDTGSDLENDDLKSALGKKRKDGKSAPLQPLTKVQRVCIGRLIEKYGDDYKAMFMDTKLNAMQHSVGTLKKLCERHHVDGKIFVYPL

SEQ ID NO: 28145 - DNA, 889 bp, Zea mays subsp. mays
  misc_feature (1)..(889): Ceres Seq. ID no. 12365562
gttttacaaaaggcactaggcaccacctttcgtggcttcctctgctctcctccacaaaggcagggaagcagcaacactgtagcagggaggagagggtaggcagtctgtccactgtccacgctgcagaagagagagatgggggtgcgggcggcggcggcagcagtggcgctggtggcgatgatgggcatgctggcgccccgagcggcggcgcagacgccgaactgcgcggcgaagctggtcccgtgctcgtcgtacatgaacacgacggggacgccgccggacacctgctgcggcccgctcaaggacgccgtcaagaacgacctcaagtgcctctgcgatctctacgccacgccggagatcttcaaggccttcaacatcagcctcgacgaggccctcggcctctccaagcgttgcggcctcagcgacaccaccgccgcctgcaagggcctttcacctacccaatctcctccaggttcaccatcaggtggtggcagtggcagcaactccggtcatcacactctgtcggtcggtttctcaggattcatgagcttcttgtcgctagccttgtggtctgtattagcataaagtttaggatgctgcagtggacattgcctgtcttatcccacaagatgatttgcacctacgacacaatcaacatttgtcttgctgtgtattgatatggccagccagtagactgatgtctctgaaccatgtgcttgcattagactgcacaattggtccttcgcccaattgttccaaagagtgcttccatgaacttagaccgaagagtgtctccaaggtcagctgtgggaaggttcttaagtccttcgcccaattgttccaaacctctgcaagattattggtaatgtgatcacattttatctcctcc

SEQ ID NO: 28146 - protein, 224 aa, Zea mays subsp. mays
  peptide (1)..(224): Ceres Seq. ID no. 12365563
FTKGTRHHLSWLPLLSSTKAGKQQHCSREERVGSLSTVHAAEERDGGAGGGGSSGAGGDDGHAGAPSGGADAELRGEAGPVLVVHEHDGDAAGHLLRPAQGRRQERPQVPLRSLRHAGDLQGLQHQPRRGPRPLQALRPQRHHRRLQGPFTYPISSRFTIRWWQWQQLRSSHSVGRFLRIHELLVASLVVCISIKFRMLQWTLPVLSHKMICTYDTINICLAVY

SEQ ID NO: 28147 - protein, 149 aa, Zea mays subsp. mays
  peptide (1)..(149): Ceres Seq. ID no. 12365564
  misc_feature (30)..(102): Pfam Name: Pfam Description:  Protease inhibitor/seed storage/LTP family
  misc_feature (9)..(142): NCBI GI NO: 15221585 NR Description: unknown protein; protein id: At1g62790.1
  misc_feature (9)..(141): NCBI GI NO: 30696757 NR Description: protease inhibitor/seed storage/lipid transfer
  misc_feature (9)..(104): NCBI GI NO: 6630451 NR Description: F23N19.16 [Arabidopsis thaliana]
  misc_feature (7)..(141): NCBI GI NO: 18410388 NR Description: lipid transfer protein, putative
  misc_feature (1)..(141): NCBI GI NO: 21593596 NR Description: lipid transfer protein, putative
  misc_feature (25)..(104): NCBI GI NO: 15223104 NR Description: lipid transfer protein, putative
  misc_feature (7)..(106): NCBI GI NO: 25406276 NR Description: probable lipid transfer protein F6D5.5
  misc_feature (30)..(132): NCBI GI NO: 15221052 NR Description: lipid transfer protein, putative
  misc_feature (26)..(121): NCBI GI NO: 15219496 NR Description: hypothetical protein; protein id: At1g73550.1
  misc_feature (26)..(120): NCBI GI NO: 25406275 NR Description: hypothetical protein F6D5.6
MGVRAAAAAVALVAMMGMLAPRAAAQTPNCAAKLVPCSSYMNTTGTPPDTCCGPLKDAVKNDLKCLCDLYATPEIFKAFNISLDEALGLSKRCGLSDTTAACKGLSPTQSPPGSPSGGGSGSNSGHHTLSVGFSGFMSFLSLALWSVLA

SEQ ID NO: 28148 - protein, 135 aa, Zea mays subsp. mays
  peptide (1)..(135): Ceres Seq. ID no. 12365565
  misc_feature (16)..(88): Pfam Name: Pfam Description:  Protease inhibitor/seed storage/LTP family
  misc_feature (1)..(128): NCBI GI NO: 15221585 NR Description: unknown protein; protein id: At1g62790.1
  misc_feature (1)..(127): NCBI GI NO: 30696757 NR Description: protease inhibitor/seed storage/lipid transfer
  misc_feature (1)..(90): NCBI GI NO: 6630451 NR Description: F23N19.16 [Arabidopsis thaliana]
  misc_feature (1)..(127): NCBI GI NO: 18410388 NR Description: lipid transfer protein, putative
  misc_feature (1)..(127): NCBI GI NO: 21593596 NR Description: lipid transfer protein, putative
  misc_feature (11)..(90): NCBI GI NO: 15223104 NR Description: lipid transfer protein, putative
  misc_feature (1)..(92): NCBI GI NO: 25406276 NR Description: probable lipid transfer protein F6D5.5
  misc_feature (16)..(118): NCBI GI NO: 15221052 NR Description: lipid transfer protein, putative
  misc_feature (12)..(107): NCBI GI NO: 15219496 NR Description: hypothetical protein; protein id: At1g73550.1
  misc_feature (12)..(106): NCBI GI NO: 25406275 NR Description: hypothetical protein F6D5.6
MMGMLAPRAAAQTPNCAAKLVPCSSYMNTTGTPPDTCCGPLKDAVKNDLKCLCDLYATPEIFKAFNISLDEALGLSKRCGLSDTTAACKGLSPTQSPPGSPSGGGSGSNSGHHTLSVGFSGFMSFLSLALWSVLA

SEQ ID NO: 28149 - DNA, 1565 bp, Zea mays subsp. mays
  misc_feature (1)..(1565): Ceres Seq. ID no. 12344180
aaacgatctccggggaatattttattccgtgggattccgatgcggccagtcgtcctcctcctcctcccctctctctcccgtttcttctagtagtagtacaaataaagaagaagctgagctgctcgaggcacggcgagggaggggagggagacacaaggcgagtgtccctactccgagggcagtccggtgtgcaagcgcatagcatagcaggagccacaagaaaaaaagccccatggattccttctcgccgagtggccggatgacacggacggcagcatcatctctggcagcgcgcgcggtcctcgcgctcctcctcatcggggtatccggttccggagccacccaggcagcgtctccccacacccaccacagtcggcagctggatgtgaaccacaaggagccagtccagacgtttcggcccatcaacattgcccaccgagggtcaaatggcgaactgcccgaagagacagcggccgcctacctgagggcgatcgaagaaggcgcggacttcatcgagacgaacgtactcgcgtccaaggacgggcatctcgtctgcttccacgatgtgacgctggacgcgaccaccgacgtcgcggaccacgcggagttcgctggcaggaagaggacctacgaggtccaaggagaagatgtcaccggatggttcatcgtggacttcactcttgaagagctcagatcactgagggtgaagcagcggttcagtttcagggaccagcggtacaacggcaagtaccagatcattacgttcgaagagtacatcctgatcgcgctctacgctgacaggaccgtcgggatctacccggagatcaagaaccccgtgttcatcaaccagcacgtgaagtggtcggacggaaagcgattcgaggacaagttcgtggagacgctgctcaggtacggctacggaggcgagtacatgtccgatggctggctccggcagccgctgttcatccagtccttcgcgccgacctcgctcatctacgtctccaacatgacggactcccccaagctgctcctgatcgacgacacgacggtcccgacgcaggacaccaaccagtcgtaccacgagataacctcggacgcctacctcgcgttcatcgggagctacgtggtggggatcgggccgtggaaggacacgctggtgcctccggacccgacagacaaccgcctgggacgccccgccgacctcgtcgcgcgagcgcacgctctgcgtctccaggtgcacccgtacaccttcaggaacgagaaccagtacctgcacttcgacttccggcaggacccctacgccgagtacgcgtactggctcgacgaggtcgccgtcgacgggctgttcaccgatttcactggtagtctgcacaagtaccaggagtggactaggccgtaccggaaggagcaggagaagacgagcccggaggcactcttgcgcgagatcgcgggcatgctcaagaacgacggctatgactgatgacttaggttgccttcagttttccccgtctgtcactctctctgtaatggttaactaaataataaagcgacggtttcatggatgc

SEQ ID NO: 28150 - protein, 415 aa, Zea mays subsp. mays
  peptide (1)..(415): Ceres Seq. ID no. 12344181
  misc_feature (55)..(414): NCBI GI NO: 34909788 NR Description: putative glycerophosphoryl diesterphosphodiesterase
  misc_feature (18)..(393): NCBI GI NO: 15241502 NR Description: glycerophosphodiester phosphodiesterase
  misc_feature (55)..(409): NCBI GI NO: 15221164 NR Description: putative glycerophosphodiester phosphodiesterase
  misc_feature (34)..(391): NCBI GI NO: 34394918 NR Description: putative glycerophosphoryl diesterphosphodiesterase
  misc_feature (58)..(375): NCBI GI NO: 23126501 NR Description: hypothetical protein [Nostoc punctiforme]
  misc_feature (49)..(374): NCBI GI NO: 15595544 NR Description: glycerophosphoryl diester phosphodiesterase
  misc_feature (14)..(374): NCBI GI NO: 32141147 NR Description: putative glycerophosphoryl diesterphosphodiesterase
  misc_feature (23)..(374): NCBI GI NO: 32997080 NR Description: glycerophosphoryl diester phosphodiesterase
  misc_feature (1)..(374): NCBI GI NO: 23105793 NR Description: hypothetical protein [Azotobacter vinelandii]
  misc_feature (59)..(375): NCBI GI NO: 16127502 NR Description: glycerophosphoryl diester phosphodiesterase
MDSFSPSGRMTRTAASSLAARAVLALLLIGVSGSGATQAASPHTHHSRQLDVNHKEPVQTFRPINIAHRGSNGELPEETAAAYLRAIEEGADFIETNVLASKDGHLVCFHDVTLDATTDVADHAEFAGRKRTYEVQGEDVTGWFIVDFTLEELRSLRVKQRFSFRDQRYNGKYQIITFEEYILIALYADRTVGIYPEIKNPVFINQHVKWSDGKRFEDKFVETLLRYGYGGEYMSDGWLRQPLFIQSFAPTSLIYVSNMTDSPKLLLIDDTTVPTQDTNQSYHEITSDAYLAFIGSYVVGIGPWKDTLVPPDPTDNRLGRPADLVARAHALRLQVHPYTFRNENQYLHFDFRQDPYAEYAYWLDEVAVDGLFTDFTGSLHKYQEWTRPYRKEQEKTSPEALLREIAGMLKNDGYD

SEQ ID NO: 28151 - protein, 406 aa, Zea mays subsp. mays
  peptide (1)..(406): Ceres Seq. ID no. 12344182
  misc_feature (46)..(405): NCBI GI NO: 34909788 NR Description: putative glycerophosphoryl diesterphosphodiesterase
  misc_feature (9)..(384): NCBI GI NO: 15241502 NR Description: glycerophosphodiester phosphodiesterase
  misc_feature (46)..(400): NCBI GI NO: 15221164 NR Description: putative glycerophosphodiester phosphodiesterase
  misc_feature (25)..(382): NCBI GI NO: 34394918 NR Description: putative glycerophosphoryl diesterphosphodiesterase
  misc_feature (49)..(366): NCBI GI NO: 23126501 NR Description: hypothetical protein [Nostoc punctiforme]
  misc_feature (40)..(365): NCBI GI NO: 15595544 NR Description: glycerophosphoryl diester phosphodiesterase
  misc_feature (5)..(365): NCBI GI NO: 32141147 NR Description: putative glycerophosphoryl diesterphosphodiesterase
  misc_feature (14)..(365): NCBI GI NO: 32997080 NR Description: glycerophosphoryl diester phosphodiesterase
  misc_feature (1)..(365): NCBI GI NO: 23105793 NR Description: hypothetical protein [Azotobacter vinelandii]
  misc_feature (50)..(366): NCBI GI NO: 16127502 NR Description: glycerophosphoryl diester phosphodiesterase
MTRTAASSLAARAVLALLLIGVSGSGATQAASPHTHHSRQLDVNHKEPVQTFRPINIAHRGSNGELPEETAAAYLRAIEEGADFIETNVLASKDGHLVCFHDVTLDATTDVADHAEFAGRKRTYEVQGEDVTGWFIVDFTLEELRSLRVKQRFSFRDQRYNGKYQIITFEEYILIALYADRTVGIYPEIKNPVFINQHVKWSDGKRFEDKFVETLLRYGYGGEYMSDGWLRQPLFIQSFAPTSLIYVSNMTDSPKLLLIDDTTVPTQDTNQSYHEITSDAYLAFIGSYVVGIGPWKDTLVPPDPTDNRLGRPADLVARAHALRLQVHPYTFRNENQYLHFDFRQDPYAEYAYWLDEVAVDGLFTDFTGSLHKYQEWTRPYRKEQEKTSPEALLREIAGMLKNDGYD

SEQ ID NO: 28152 - DNA, 1295 bp, Zea mays subsp. mays
  misc_feature (1)..(1295): Ceres Seq. ID no. 12409068
aatcaagtgacggttacattcttatcgtaaatagtttttgcacaaatagaacggaaaaaaggaacaatttttgtggaggtgactcctcgcctgtgtcgtcaaatcctccacaccctggactggagtggctgctgctcgtgcccggcgatgagcggcggcgggcccggaggtgcgtgcgggccggactcccgcgtggagaccatctcccggctggcgcagtggcgcatcgataccttcggcccctgctcctaccgccggtcggacccctttaagctcggcatctggaactggtacctgtcggtggagaagagccgctccatctttgtgcgcctcttcccggagcccggccgggtggccaaggagcagccccctctcgcgcgcttcctgctccgcgtctcctgggccggcccgccgcgacgctcctgcgtctcccctgtgcacgagcatctcctgcgtaccagcgatgattttatatggcaagtcgatgcgatgccccatgggcgttttacgattgatgttgagtttctagacctgaggatagccacgaacaatgctacggaatcgtcatcggtgtggccaaacgaaggcatggtgcagaagatcgcgagcaagagcgccctgggctgcctgtcgcacatgctggcggactccatccacgcggacgtgaccatcaacacgacggacggggtgctgaaggcgcacaaggcggtgctggcggcgtgctcccccgtgttcaagagcatgttcgtgcacgacctgagggagaaggagtcgtcgacggtggacatcggcgacatgtgcgtggagtcgtgctcggcgctgctgggtttcgtgtacgggacgatcgagcaggggcagttctggaagcaccggctgccgctgctggcggcggcggacaagtacgggatcggcgacatcaaggactgctgcgaggagagcctgctggaggacataggctcgggcaacgtgctggagcggctccacgtggcgtggctgtaccggctggagcggctgaagaaagggtgcctcacctacctgttcgtgttcgggaagatctatgacgtgagggacgagatgcacggcttcttccaccacgcggaccgcgagctcatgcacgacatgttccaggaggtgctcagcgtgtggaagcccatgtgaatggaagtgtccctttccacgcgagctgtgtgtgtgtgtgtgtgtcgtgcttgttcagtcagcagtgtgtggagagcatgctggttatgcatatttgaaacgaaaaggatgctcagaatttgaatggaagctaaatt

SEQ ID NO: 28153 - protein, 336 aa, Zea mays subsp. mays
  peptide (1)..(336): Ceres Seq. ID no. 12409069
  misc_feature (161)..(269): Pfam Name: Pfam Description:  BTB/POZ domain
  misc_feature (49)..(336): NCBI GI NO: 38637050 NR Description: POZ domain protein family-like
  misc_feature (13)..(336): NCBI GI NO: 15219092 NR Description: unknown protein; protein id: At1g21780
  misc_feature (15)..(334): NCBI GI NO: 15222771 NR Description: hypothetical protein; protein id: At1g55760.1
  misc_feature (15)..(301): NCBI GI NO: 8778495 NR Description: F20N2.15 [Arabidopsis thaliana]
  misc_feature (144)..(299): NCBI GI NO: 34858199 NR Description: similar to POZ 56 protein [Rattus norvegicus]
  misc_feature (151)..(299): NCBI GI NO: 27661061 NR Description: similar to speckle-type POZ protein
  misc_feature (151)..(299): NCBI GI NO: 34858214 NR Description: similar to speckle-type POZ protein-like 1
  misc_feature (169)..(300): NCBI GI NO: 34766460 NR Description: TDPOZ4 [Mus musculus]
  misc_feature (183)..(299): NCBI GI NO: 34858197 NR Description: similar to speckle-type POZ protein-like 1
  misc_feature (161)..(336): NCBI GI NO: 34858183 NR Description: similar to speckle-type POZ protein-like 1
MSGGGPGGACGPDSRVETISRLAQWRIDTFGPCSYRRSDPFKLGIWNWYLSVEKSRSIFVRLFPEPGRVAKEQPPLARFLLRVSWAGPPRRSCVSPVHEHLLRTSDDFIWQVDAMPHGRFTIDVEFLDLRIATNNATESSSVWPNEGMVQKIASKSALGCLSHMLADSIHADVTINTTDGVLKAHKAVLAACSPVFKSMFVHDLREKESSTVDIGDMCVESCSALLGFVYGTIEQGQFWKHRLPLLAAADKYGIGDIKDCCEESLLEDIGSGNVLERLHVAWLYRLERLKKGCLTYLFVFGKIYDVRDEMHGFFHHADRELMHDMFQEVLSVWKPM

SEQ ID NO: 28154 - protein, 222 aa, Zea mays subsp. mays
  peptide (1)..(222): Ceres Seq. ID no. 12409070
  misc_feature (47)..(155): Pfam Name: Pfam Description:  BTB/POZ domain
  misc_feature (1)..(222): NCBI GI NO: 38637050 NR Description: POZ domain protein family-like
  misc_feature (1)..(222): NCBI GI NO: 15219092 NR Description: unknown protein; protein id: At1g21780
  misc_feature (1)..(220): NCBI GI NO: 15222771 NR Description: hypothetical protein; protein id: At1g55760.1
  misc_feature (1)..(187): NCBI GI NO: 8778495 NR Description: F20N2.15 [Arabidopsis thaliana]
  misc_feature (30)..(185): NCBI GI NO: 34858199 NR Description: similar to POZ 56 protein [Rattus norvegicus]
  misc_feature (37)..(185): NCBI GI NO: 27661061 NR Description: similar to speckle-type POZ protein
  misc_feature (37)..(185): NCBI GI NO: 34858214 NR Description: similar to speckle-type POZ protein-like 1
  misc_feature (55)..(186): NCBI GI NO: 34766460 NR Description: TDPOZ4 [Mus musculus]
  misc_feature (69)..(185): NCBI GI NO: 34858197 NR Description: similar to speckle-type POZ protein-like 1
  misc_feature (47)..(222): NCBI GI NO: 34858183 NR Description: similar to speckle-type POZ protein-like 1
MPHGRFTIDVEFLDLRIATNNATESSSVWPNEGMVQKIASKSALGCLSHMLADSIHADVTINTTDGVLKAHKAVLAACSPVFKSMFVHDLREKESSTVDIGDMCVESCSALLGFVYGTIEQGQFWKHRLPLLAAADKYGIGDIKDCCEESLLEDIGSGNVLERLHVAWLYRLERLKKGCLTYLFVFGKIYDVRDEMHGFFHHADRELMHDMFQEVLSVWKPM

SEQ ID NO: 28155 - protein, 189 aa, Zea mays subsp. mays
  peptide (1)..(189): Ceres Seq. ID no. 12409071
  misc_feature (14)..(122): Pfam Name: Pfam Description:  BTB/POZ domain
  misc_feature (1)..(189): NCBI GI NO: 38637050 NR Description: POZ domain protein family-like
  misc_feature (1)..(189): NCBI GI NO: 15219092 NR Description: unknown protein; protein id: At1g21780
  misc_feature (1)..(187): NCBI GI NO: 15222771 NR Description: hypothetical protein; protein id: At1g55760.1
  misc_feature (1)..(154): NCBI GI NO: 8778495 NR Description: F20N2.15 [Arabidopsis thaliana]
  misc_feature (1)..(152): NCBI GI NO: 34858199 NR Description: similar to POZ 56 protein [Rattus norvegicus]
  misc_feature (4)..(152): NCBI GI NO: 27661061 NR Description: similar to speckle-type POZ protein
  misc_feature (4)..(152): NCBI GI NO: 34858214 NR Description: similar to speckle-type POZ protein-like 1
  misc_feature (22)..(153): NCBI GI NO: 34766460 NR Description: TDPOZ4 [Mus musculus]
  misc_feature (36)..(152): NCBI GI NO: 34858197 NR Description: similar to speckle-type POZ protein-like 1
  misc_feature (14)..(189): NCBI GI NO: 34858183 NR Description: similar to speckle-type POZ protein-like 1
MVQKIASKSALGCLSHMLADSIHADVTINTTDGVLKAHKAVLAACSPVFKSMFVHDLREKESSTVDIGDMCVESCSALLGFVYGTIEQGQFWKHRLPLLAAADKYGIGDIKDCCEESLLEDIGSGNVLERLHVAWLYRLERLKKGCLTYLFVFGKIYDVRDEMHGFFHHADRELMHDMFQEVLSVWKPM

SEQ ID NO: 28156 - DNA, 621 bp, Zea mays subsp. mays
  misc_feature (1)..(621): Ceres Seq. ID no. 12403452
atgagaggagagaagaaaggccatcagtgatgaacgctttcgagttaatctctacgtctcagggcctcaatctcgggacgctcttcgagaagcaaacgggttctgttaagcgagaaacaaggtttgcgtcaaggcttcctgcaaatgagatactgtcgaagatcgaagcagcagcgggacccatgggcttcaacgttcagaagcgcaactataagctgaagctgcaaggggagaaccctggaaggaaaggtcagctggccatcgcaacagaggttttcgaggtcacgccttccctgtacatggttgagctgcgcaagtccaacggcgacacccttgaattccacaagttctaccacaacatctcaaatggactgaaggacgtgatgtggaagccggagagcggcatcgtggaaggcgacgaggcgcggcaaaggaggtccccgtgatgggggtctgcaaccaagttttagaagtagcgctgcagataactagtcatcagggagcctggcgggaactgagcctgtgactgcttcctgtttgtttggatgttttgtttttgtctaaggtgctttctgactaaagtatgctggataatgtgaatgaagaatgtgcagagttttc

SEQ ID NO: 28157 - protein, 147 aa, Zea mays subsp. mays
  peptide (1)..(147): Ceres Seq. ID no. 12403453
  misc_feature (7)..(66): Pfam Name: Pfam Description:  NAF domain
  misc_feature (1)..(147): NCBI GI NO: 34393400 NR Description: putative CBL-interacting protein kinase 23
  misc_feature (1)..(130): NCBI GI NO: 18397430 NR Description: serine/threonine kinase, putative
  misc_feature (1)..(130): NCBI GI NO: 25387051 NR Description: probable serine/threonine kinase
  misc_feature (3)..(142): NCBI GI NO: 19172407 NR Description: putative serine threonine kinase
  misc_feature (1)..(133): NCBI GI NO: 34902248 NR Description: Putative serine/threonine kinase
  misc_feature (3)..(137): NCBI GI NO: 14423524 NR Description: similar to wpk4 protein kinase
  misc_feature (3)..(137): NCBI GI NO: 30677898 NR Description: CBL-interacting protein kinase 9
  misc_feature (3)..(137): NCBI GI NO: 15223317 NR Description: serine threonine kinase, putative
  misc_feature (1)..(132): NCBI GI NO: 7446371 NR Description: probable serine/threonine kinase (EC 2
  misc_feature (3)..(137): NCBI GI NO: 25387057 NR Description: protein T25K16.13
ERREERPSVMNAFELISTSQGLNLGTLFEKQTGSVKRETRFASRLPANEILSKIEAAAGPMGFNVQKRNYKLKLQGENPGRKGQLAIATEVFEVTPSLYMVELRKSNGDTLEFHKFYHNISNGLKDVMWKPESGIVEGDEARQRRSP

SEQ ID NO: 28158 - protein, 138 aa, Zea mays subsp. mays
  peptide (1)..(138): Ceres Seq. ID no. 12403454
  misc_feature (1)..(57): Pfam Name: Pfam Description:  NAF domain
  misc_feature (1)..(138): NCBI GI NO: 34393400 NR Description: putative CBL-interacting protein kinase 23
  misc_feature (1)..(121): NCBI GI NO: 18397430 NR Description: serine/threonine kinase, putative
  misc_feature (1)..(121): NCBI GI NO: 25387051 NR Description: probable serine/threonine kinase
  misc_feature (1)..(133): NCBI GI NO: 19172407 NR Description: putative serine threonine kinase
  misc_feature (1)..(124): NCBI GI NO: 34902248 NR Description: Putative serine/threonine kinase
  misc_feature (1)..(128): NCBI GI NO: 14423524 NR Description: similar to wpk4 protein kinase
  misc_feature (1)..(128): NCBI GI NO: 15223317 NR Description: serine threonine kinase, putative
  misc_feature (1)..(128): NCBI GI NO: 30677898 NR Description: CBL-interacting protein kinase 9
  misc_feature (1)..(123): NCBI GI NO: 7446371 NR Description: probable serine/threonine kinase (EC 2
  misc_feature (1)..(128): NCBI GI NO: 25387057 NR Description: protein T25K16.13
MNAFELISTSQGLNLGTLFEKQTGSVKRETRFASRLPANEILSKIEAAAGPMGFNVQKRNYKLKLQGENPGRKGQLAIATEVFEVTPSLYMVELRKSNGDTLEFHKFYHNISNGLKDVMWKPESGIVEGDEARQRRSP

SEQ ID NO: 28159 - protein, 87 aa, Zea mays subsp. mays
  peptide (1)..(87): Ceres Seq. ID no. 12403455
  misc_feature (1)..(87): NCBI GI NO: 34393400 NR Description: putative CBL-interacting protein kinase 23
  misc_feature (1)..(70): NCBI GI NO: 18397430 NR Description: serine/threonine kinase, putative
  misc_feature (1)..(70): NCBI GI NO: 25387051 NR Description: probable serine/threonine kinase
  misc_feature (1)..(82): NCBI GI NO: 19172407 NR Description: putative serine threonine kinase
  misc_feature (1)..(73): NCBI GI NO: 34902248 NR Description: Putative serine/threonine kinase
  misc_feature (1)..(77): NCBI GI NO: 14423524 NR Description: similar to wpk4 protein kinase
  misc_feature (1)..(77): NCBI GI NO: 30677898 NR Description: CBL-interacting protein kinase 9
  misc_feature (1)..(77): NCBI GI NO: 15223317 NR Description: serine threonine kinase, putative
  misc_feature (1)..(72): NCBI GI NO: 7446371 NR Description: probable serine/threonine kinase (EC 2
  misc_feature (1)..(77): NCBI GI NO: 25387057 NR Description: protein T25K16.13
MGFNVQKRNYKLKLQGENPGRKGQLAIATEVFEVTPSLYMVELRKSNGDTLEFHKFYHNISNGLKDVMWKPESGIVEGDEARQRRSP

SEQ ID NO: 28160 - DNA, 1252 bp, Zea mays subsp. mays
  misc_feature (1)..(1252): Ceres Seq. ID no. 12360523
gcacgagaccattacctagaacatcctaatcgaaaaaaccccgtcagcccgtgcggccgtgccctctgcctcctctgccactcctcgcccaaagcgccagaggcgcagcccgagccacaggttgcctcctctccctctcctcgtggcctcgtccttctcgttcaagacgaaaccgtacgcgagcgagctggtgagggaggaagagcagggaggtgggatcaggccggctccatggacgccacgctcctcctcctccccgccaactgcacggccgccgccagcgggcggatgcggcctcgactgcctgcaggcccacatgtggcttcccctggtccctccgcgcggccaaggacctccatccgggcctcagccgtgtccgcagccctcgccgttcgtggcctcccgcaacacgcttccgtggccgggcaaagcactggaagttatagggttggtgatgttatgaccaaaagggaagagctccatgttgtgaaaccaacaacttcagttgatgacgcccttgagatgctggtgaagcataggatctctggctttcctgttattgatgatgactggaatttggttggcgttgtgtcagattatgatttattggcactggatacaatatcaggagctggaccggctgaagcagacatatttcctgaggtggatagcacttggaagacatttcatgagatacagaagcttttgagcaaaaccaacgggaaggttattgctgatgttatgaccccagcgcctctcgtggtgcgtgaaacaactaaccttgaagatgctgcaaggttactccttgtgactaagtaccgcaggcttccagtggtcgatagctcaggcaaactggttgggatcattacaagagggaacgtcgtccaagccgccctcgaaatcaagaaaaaggttgaagggacactctgagatgactacctccaggtatcctttttgctgccacatggggggcttaggacttggacacatctctagttggcaactgatcaatcaaagcgactgtcagagtgagcgatgaaagtcgctatgtttatgaagatttgcccggagaagcacaggtgtatgtgtagtgtttgttatatatgctgatgcagtccttgctggccaaaacacaggttaccgattgttctggtttcctgggcttctttggacaccaaattcttaacctaggtcttgtttgggtgcacacgtatctagttcaacttacttgtattgaggttcattgaagtgc

SEQ ID NO: 28161 - protein, 309 aa, Zea mays subsp. mays
  peptide (1)..(309): Ceres Seq. ID no. 12360524
  misc_feature (154)..(207): Pfam Name: Pfam Description:  CBS domain
  misc_feature (123)..(309): NCBI GI NO: 34015153 NR Description: putative CBS domain containing protein
  misc_feature (78)..(303): NCBI GI NO: 15234564 NR Description: putative protein; protein id: At4g36910.1
  misc_feature (119)..(308): NCBI GI NO: 18418376 NR Description: putative protein; protein id: At4g34120
  misc_feature (119)..(209): NCBI GI NO: 7486280 NR Description: hypothetical protein F28A23
  misc_feature (227)..(288): NCBI GI NO: 7486280 NR Description: hypothetical protein F28A23
  misc_feature (150)..(297): NCBI GI NO: 17231305 NR Description: hypothetical protein [Nostoc sp. PCC 7120]
  misc_feature (147)..(297): NCBI GI NO: 16331252 NR Description: IMP dehydrogenase [Synechocystis sp. PCC 6803]
  misc_feature (150)..(297): NCBI GI NO: 23040753 NR Description: hypothetical protein
  misc_feature (149)..(297): NCBI GI NO: 15678671 NR Description: conserved protein
  misc_feature (150)..(297): NCBI GI NO: 23127710 NR Description: hypothetical protein [Nostoc punctiforme]
ARDHYLEHPNRKNPVSPCGRALCLLCHSSPKAPEAQPEPQVASSPSPRGLVLLVQDETVRERAGEGGRAGRWDQAGSMDATLLLLPANCTAAASGRMRPRLPAGPHVASPGPSARPRTSIRASAVSAALAVRGLPQHASVAGQSTGSYRVGDVMTKREELHVVKPTTSVDDALEMLVKHRISGFPVIDDDWNLVGVVSDYDLLALDTISGAGPAEADIFPEVDSTWKTFHEIQKLLSKTNGKVIADVMTPAPLVVRETTNLEDAARLLLVTKYRRLPVVDSSGKLVGIITRGNVVQAALEIKKKVEGTL

SEQ ID NO: 28162 - protein, 232 aa, Zea mays subsp. mays
  peptide (1)..(232): Ceres Seq. ID no. 12360525
  misc_feature (77)..(130): Pfam Name: Pfam Description:  CBS domain
  misc_feature (46)..(232): NCBI GI NO: 34015153 NR Description: putative CBS domain containing protein
  misc_feature (1)..(226): NCBI GI NO: 15234564 NR Description: putative protein; protein id: At4g36910.1
  misc_feature (42)..(231): NCBI GI NO: 18418376 NR Description: putative protein; protein id: At4g34120
  misc_feature (42)..(132): NCBI GI NO: 7486280 NR Description: hypothetical protein F28A23
  misc_feature (150)..(211): NCBI GI NO: 7486280 NR Description: hypothetical protein F28A23
  misc_feature (73)..(220): NCBI GI NO: 17231305 NR Description: hypothetical protein [Nostoc sp. PCC 7120]
  misc_feature (70)..(220): NCBI GI NO: 16331252 NR Description: IMP dehydrogenase [Synechocystis sp. PCC 6803]
  misc_feature (73)..(220): NCBI GI NO: 23040753 NR Description: hypothetical protein
  misc_feature (72)..(220): NCBI GI NO: 15678671 NR Description: conserved protein
  misc_feature (73)..(220): NCBI GI NO: 23127710 NR Description: hypothetical protein [Nostoc punctiforme]
MDATLLLLPANCTAAASGRMRPRLPAGPHVASPGPSARPRTSIRASAVSAALAVRGLPQHASVAGQSTGSYRVGDVMTKREELHVVKPTTSVDDALEMLVKHRISGFPVIDDDWNLVGVVSDYDLLALDTISGAGPAEADIFPEVDSTWKTFHEIQKLLSKTNGKVIADVMTPAPLVVRETTNLEDAARLLLVTKYRRLPVVDSSGKLVGIITRGNVVQAALEIKKKVEGTL

SEQ ID NO: 28163 - protein, 213 aa, Zea mays subsp. mays
  peptide (1)..(213): Ceres Seq. ID no. 12360526
  misc_feature (58)..(111): Pfam Name: Pfam Description:  CBS domain
  misc_feature (27)..(213): NCBI GI NO: 34015153 NR Description: putative CBS domain containing protein
  misc_feature (1)..(207): NCBI GI NO: 15234564 NR Description: putative protein; protein id: At4g36910.1
  misc_feature (23)..(212): NCBI GI NO: 18418376 NR Description: putative protein; protein id: At4g34120
  misc_feature (23)..(113): NCBI GI NO: 7486280 NR Description: hypothetical protein F28A23
  misc_feature (131)..(192): NCBI GI NO: 7486280 NR Description: hypothetical protein F28A23
  misc_feature (54)..(201): NCBI GI NO: 17231305 NR Description: hypothetical protein [Nostoc sp. PCC 7120]
  misc_feature (51)..(201): NCBI GI NO: 16331252 NR Description: IMP dehydrogenase [Synechocystis sp. PCC 6803]
  misc_feature (54)..(201): NCBI GI NO: 23040753 NR Description: hypothetical protein
  misc_feature (53)..(201): NCBI GI NO: 15678671 NR Description: conserved protein
  misc_feature (54)..(201): NCBI GI NO: 23127710 NR Description: hypothetical protein [Nostoc punctiforme]
MRPRLPAGPHVASPGPSARPRTSIRASAVSAALAVRGLPQHASVAGQSTGSYRVGDVMTKREELHVVKPTTSVDDALEMLVKHRISGFPVIDDDWNLVGVVSDYDLLALDTISGAGPAEADIFPEVDSTWKTFHEIQKLLSKTNGKVIADVMTPAPLVVRETTNLEDAARLLLVTKYRRLPVVDSSGKLVGIITRGNVVQAALEIKKKVEGTL

SEQ ID NO: 28164 - DNA, 759 bp, Zea mays subsp. mays
  misc_feature (1)..(759): Ceres Seq. ID no. 12343174
aggatgctgcggctgcgctggcgtgccgtcctccccccactcccactccctccgctgcctggcttgcttcgccgcctgcctccgcaccggcgcgccctctcgtcctcttccggctctatcccgcttccaccgccggtgatggaggcttcctacaagtttgggccctacaaaatcgacgccagggaggtcttccacgccacgcccctctcctacgccatggtgaatctccgcccgctgctcccgggtcatgttcttgtgtgccccaagcgtgaagtgaaaagattcgccgatctaagttctgatgagattagtgacttatgggttactgcaaaggaagttggtgcacgtcttgagcagtaccacaaagcatcttcacttacctttgctatccaggatggtcctcaagctggccaaacagttgcacatgtccacatccacctcatcccaaggaagaaaggggattttgagaaaaatgatgaaatatatgatgcgattgatgtgaaggagaaagaattgaaggagaagcttgacctggacatcgagaggaaagataggagcatggaagagatggctaatgaggccaatgagtaccgtgctctttttagttagtttctaagctgagctgactgtttgctagaaataaggtttgctacctgttcttcattgttgcagttcagttatggttgcgcactgacattgtgatgatgtcccgttctgtaccgtggagaattaataatttgttgcaaggaatgcattctc

SEQ ID NO: 28165 - protein, 202 aa, Zea mays subsp. mays
  peptide (1)..(202): Ceres Seq. ID no. 12343175
  misc_feature (47)..(202): NCBI GI NO: 27542770 NR Description: ATPase-like protein [Sorghum bicolor]
  misc_feature (49)..(201): NCBI GI NO: 27808510 NR Description: At5g58240 [Arabidopsis thaliana]
  misc_feature (49)..(201): NCBI GI NO: 8777325 NR Description: bis(5'-adenosyl)-triphosphatase-like protein
  misc_feature (49)..(201): NCBI GI NO: 30697031 NR Description: bis
  misc_feature (49)..(202): NCBI GI NO: 37589828 NR Description: Unknown (protein for MGC:73176) [Danio rerio]
  misc_feature (47)..(201): NCBI GI NO: 28828402 NR Description: similar to diadenosine tetraphosphatase
  misc_feature (50)..(201): NCBI GI NO: 11120730 NR Description: fragile histidine triad protein
  misc_feature (50)..(201): NCBI GI NO: 4503719 NR Description: fragile histidine triad gene; bis
  misc_feature (50)..(201): NCBI GI NO: 15215093 NR Description: Similar to fragile histidine triad gene
  misc_feature (50)..(201): NCBI GI NO: 3318791 NR Description: Substrate Analog
RMLRLRWRAVLPPLPLPPLPGLLRRLPPHRRALSSSSGSIPLPPPVMEASYKFGPYKIDAREVFHATPLSYAMVNLRPLLPGHVLVCPKREVKRFADLSSDEISDLWVTAKEVGARLEQYHKASSLTFAIQDGPQAGQTVAHVHIHLIPRKKGDFEKNDEIYDAIDVKEKELKEKLDLDIERKDRSMEEMANEANEYRALFS

SEQ ID NO: 28166 - protein, 201 aa, Zea mays subsp. mays
  peptide (1)..(201): Ceres Seq. ID no. 12343176
  misc_feature (46)..(201): NCBI GI NO: 27542770 NR Description: ATPase-like protein [Sorghum bicolor]
  misc_feature (48)..(200): NCBI GI NO: 27808510 NR Description: At5g58240 [Arabidopsis thaliana]
  misc_feature (48)..(200): NCBI GI NO: 8777325 NR Description: bis(5'-adenosyl)-triphosphatase-like protein
  misc_feature (48)..(200): NCBI GI NO: 30697031 NR Description: bis
  misc_feature (48)..(201): NCBI GI NO: 37589828 NR Description: Unknown (protein for MGC:73176) [Danio rerio]
  misc_feature (46)..(200): NCBI GI NO: 28828402 NR Description: similar to diadenosine tetraphosphatase
  misc_feature (49)..(200): NCBI GI NO: 11120730 NR Description: fragile histidine triad protein
  misc_feature (49)..(200): NCBI GI NO: 4503719 NR Description: fragile histidine triad gene; bis
  misc_feature (49)..(200): NCBI GI NO: 15215093 NR Description: Similar to fragile histidine triad gene
  misc_feature (49)..(200): NCBI GI NO: 3318791 NR Description: Substrate Analog
MLRLRWRAVLPPLPLPPLPGLLRRLPPHRRALSSSSGSIPLPPPVMEASYKFGPYKIDAREVFHATPLSYAMVNLRPLLPGHVLVCPKREVKRFADLSSDEISDLWVTAKEVGARLEQYHKASSLTFAIQDGPQAGQTVAHVHIHLIPRKKGDFEKNDEIYDAIDVKEKELKEKLDLDIERKDRSMEEMANEANEYRALFS

SEQ ID NO: 28167 - protein, 156 aa, Zea mays subsp. mays
  peptide (1)..(156): Ceres Seq. ID no. 12343177
  misc_feature (1)..(156): NCBI GI NO: 27542770 NR Description: ATPase-like protein [Sorghum bicolor]
  misc_feature (3)..(155): NCBI GI NO: 27808510 NR Description: At5g58240 [Arabidopsis thaliana]
  misc_feature (3)..(155): NCBI GI NO: 8777325 NR Description: bis(5'-adenosyl)-triphosphatase-like protein
  misc_feature (3)..(155): NCBI GI NO: 30697031 NR Description: bis
  misc_feature (3)..(156): NCBI GI NO: 37589828 NR Description: Unknown (protein for MGC:73176) [Danio rerio]
  misc_feature (1)..(155): NCBI GI NO: 28828402 NR Description: similar to diadenosine tetraphosphatase
  misc_feature (4)..(155): NCBI GI NO: 11120730 NR Description: fragile histidine triad protein
  misc_feature (4)..(155): NCBI GI NO: 4503719 NR Description: fragile histidine triad gene; bis
  misc_feature (4)..(155): NCBI GI NO: 15215093 NR Description: Similar to fragile histidine triad gene
  misc_feature (4)..(155): NCBI GI NO: 3318791 NR Description: Substrate Analog
MEASYKFGPYKIDAREVFHATPLSYAMVNLRPLLPGHVLVCPKREVKRFADLSSDEISDLWVTAKEVGARLEQYHKASSLTFAIQDGPQAGQTVAHVHIHLIPRKKGDFEKNDEIYDAIDVKEKELKEKLDLDIERKDRSMEEMANEANEYRALFS

SEQ ID NO: 28168 - DNA, 692 bp, Zea mays subsp. mays
  misc_feature (1)..(692): Ceres Seq. ID no. 12401633
atcatcgcttgcacttgcagcgtcacaagcaaaccgaagctagtcagtcacacacagctctccagcttccatccacaaagaagaaggaaacaagctaaccatgatgatgagcgccaagaagattgctcatctcgccaagaaatggcagaggatggccgcgcaagggaggaagcgcctcaccttgggggcggcggcggcaaaggaagtcgacgagtgctgcggctctgtggcgagcaagggccattgtgcggtgtacacggccgacggggcacggttcgaggtgccgctggcgtgccttagcacccctgtcttcagggagctcctgcagatgtcacaggaggagttcggcttcgcgggcggcgatggcaggatcacgctgccctgcgacgcggcggtcatggagtacgccatgtgtttgctcaggagaggagcctctgctgagctagagcaggcgttccttagcaccatggccatgtcatgccactgtgccatctacatggcgccgtatgttggacgagccaggcagcagcagatcgttgtttagttagttgctgttccgtgtatgtagacgtgtagtgtagagcaatgattttaactaggtgggtactattattcaaagccttctgatccagcaaccgatcaagtgaggtgttgtaagtacaagagaataaagagatatgattcttgtttcg

SEQ ID NO: 28169 - protein, 147 aa, Zea mays subsp. mays
  peptide (1)..(147): Ceres Seq. ID no. 12401634
  misc_feature (2)..(108): Pfam Name: Pfam Description:  Auxin responsive protein
  misc_feature (2)..(142): NCBI GI NO: 32187718 NR Description: auxin induced protein [Zea mays]
  misc_feature (2)..(130): NCBI GI NO: 20149052 NR Description: auxin-induced SAUR-like protein [Capsicum annuum]
  misc_feature (2)..(147): NCBI GI NO: 21592571 NR Description: auxin-induced protein, putative
  misc_feature (2)..(147): NCBI GI NO: 18397101 NR Description: auxin-induced protein, putative
  misc_feature (1)..(147): NCBI GI NO: 18397123 NR Description: auxin-induced protein, putative
  misc_feature (1)..(124): NCBI GI NO: 26452075 NR Description: putative auxin-induced protein
  misc_feature (1)..(147): NCBI GI NO: 26452170 NR Description: putative auxin-induced protein
  misc_feature (1)..(124): NCBI GI NO: 15218924 NR Description: auxin-induced protein, putative
  misc_feature (2)..(131): NCBI GI NO: 15218951 NR Description: auxin-induced protein, putative
  misc_feature (2)..(131): NCBI GI NO: 38603942 NR Description: At1g29420 [Arabidopsis thaliana]
MMMSAKKIAHLAKKWQRMAAQGRKRLTLGAAAAKEVDECCGSVASKGHCAVYTADGARFEVPLACLSTPVFRELLQMSQEEFGFAGGDGRITLPCDAAVMEYAMCLLRRGASAELEQAFLSTMAMSCHCAIYMAPYVGRARQQQIVV

SEQ ID NO: 28170 - protein, 146 aa, Zea mays subsp. mays
  peptide (1)..(146): Ceres Seq. ID no. 12401635
  misc_feature (1)..(107): Pfam Name: Pfam Description:  Auxin responsive protein
  misc_feature (1)..(141): NCBI GI NO: 32187718 NR Description: auxin induced protein [Zea mays]
  misc_feature (1)..(129): NCBI GI NO: 20149052 NR Description: auxin-induced SAUR-like protein [Capsicum annuum]
  misc_feature (1)..(146): NCBI GI NO: 21592571 NR Description: auxin-induced protein, putative
  misc_feature (1)..(146): NCBI GI NO: 18397101 NR Description: auxin-induced protein, putative
  misc_feature (1)..(146): NCBI GI NO: 18397123 NR Description: auxin-induced protein, putative
  misc_feature (1)..(123): NCBI GI NO: 26452075 NR Description: putative auxin-induced protein
  misc_feature (1)..(146): NCBI GI NO: 26452170 NR Description: putative auxin-induced protein
  misc_feature (1)..(123): NCBI GI NO: 15218924 NR Description: auxin-induced protein, putative
  misc_feature (1)..(130): NCBI GI NO: 15218951 NR Description: auxin-induced protein, putative
  misc_feature (1)..(130): NCBI GI NO: 38603942 NR Description: At1g29420 [Arabidopsis thaliana]
MMSAKKIAHLAKKWQRMAAQGRKRLTLGAAAAKEVDECCGSVASKGHCAVYTADGARFEVPLACLSTPVFRELLQMSQEEFGFAGGDGRITLPCDAAVMEYAMCLLRRGASAELEQAFLSTMAMSCHCAIYMAPYVGRARQQQIVV

SEQ ID NO: 28171 - protein, 145 aa, Zea mays subsp. mays
  peptide (1)..(145): Ceres Seq. ID no. 12401636
  misc_feature (1)..(106): Pfam Name: Pfam Description:  Auxin responsive protein
  misc_feature (1)..(140): NCBI GI NO: 32187718 NR Description: auxin induced protein [Zea mays]
  misc_feature (1)..(128): NCBI GI NO: 20149052 NR Description: auxin-induced SAUR-like protein [Capsicum annuum]
  misc_feature (1)..(145): NCBI GI NO: 21592571 NR Description: auxin-induced protein, putative
  misc_feature (1)..(145): NCBI GI NO: 18397101 NR Description: auxin-induced protein, putative
  misc_feature (1)..(145): NCBI GI NO: 18397123 NR Description: auxin-induced protein, putative
  misc_feature (1)..(122): NCBI GI NO: 26452075 NR Description: putative auxin-induced protein
  misc_feature (1)..(145): NCBI GI NO: 26452170 NR Description: putative auxin-induced protein
  misc_feature (1)..(122): NCBI GI NO: 15218924 NR Description: auxin-induced protein, putative
  misc_feature (1)..(129): NCBI GI NO: 15218951 NR Description: auxin-induced protein, putative
  misc_feature (1)..(129): NCBI GI NO: 38603942 NR Description: At1g29420 [Arabidopsis thaliana]
MSAKKIAHLAKKWQRMAAQGRKRLTLGAAAAKEVDECCGSVASKGHCAVYTADGARFEVPLACLSTPVFRELLQMSQEEFGFAGGDGRITLPCDAAVMEYAMCLLRRGASAELEQAFLSTMAMSCHCAIYMAPYVGRARQQQIVV

SEQ ID NO: 28172 - DNA, 1765 bp, Zea mays subsp. mays
  misc_feature (1)..(1765): Ceres Seq. ID no. 13492636
ctccccaaaattctcatctagtcaccggccattccgttgtgtccataggctgtcagtcacttccagtcctagcccactcctccgatgctccaatcatcaacactctctacctgtgtccgtgtgctcttctcctctgcaccaccaaccaaccagtgctgtcctccgccgatccactgacctaccgcgagcgccaatggcgacccgccgcggtcctcgccgccacattagcgctgttcctcggcgccgccgccgcaacggccgcgacggctgcggcggaggcggaccggatcggcaggctgccgggccagccgccggtcaacttctccatgtactccggctacgtcaccgtggacgcggcggcggggcgggccctcttctactggttcatcgaggcggccggcgtgcccgcggagtccgcgccgctcgtgctgtggctcaacggcgggcccgggtgctcctccgtcggctacggcgcgtcagaggagctcggcgccttccggatcaacgccgacggcaggacgctctacttgaacccctacccctggaataaagtggcgaacatgctgttcttggactcgccggccggcgtcggctactcatactccaactccacctccgatctgtacactgccggtgacaacaagacagcccatgactcgtacaatttcttggtgaactggctggagcggtttccacaatacaagcatcgcgatttctacatcacaggagagagctacgcaggccactacgtgcctcagttgtctcagctagtctaccggaacaacaaaggcatcgagaagccgatcctaaacttcaaaggcttcatggttggaaatgcggtaattgacgattaccacgacttcatcggcacattcgagtacttgtggacgcacgggctgatctctgacgaaacctacgagaagctgcggcttgcctgccagttcgacgtatctgagcatgcgtcgaaggagtgcaacaaggtcttcgacatcgccgaggccgaggaaggcaatatcgatgcgtacagcatctacacgccgacttgcaagaagacttcactccacaagcgcaggctaatcagaggaagaacgccctggttgcccagagggtacgatccctgcacggagaagtactccacgaagtactacaacctacctgaggtgcagagagctctacacgccaatgtcaccggaataccgtatccctgggtaacctgcagtgacccagtgtatgatttttggaaagattcaccgaggtccatgcttcctatctaccgtgaactcatcgccgcgggcataaggatatgggttttcagtggcgacgctgattccgttgtcccgctcaccgcgacaaggtactccattgacgccctctttctaccgactatcacgaactggtatccttggtacgacgacgaagaggtcggtgggtggtgccaggtgtacgaggggctgacactggtgacggtccgaggcgcagggcacgaggttcccctgcaccggccgcggcagggcctgaagctgttcgagcacttcctgcggggtgagcccatgcccaggcctgtagatagcgtccagtcgttttagaactggttgctgtctccccgcttggtgaaggaggagacctggctgcgctgcgcattcttgttgctgtaaactcatccgtcacactccgttgttaggatggatttgctgaaaatcagaacataatgttgctcgtttcagtgagcagattgggtatttagcaatgtctcgttttgacagtg

SEQ ID NO: 28173 - protein, 527 aa, Zea mays subsp. mays
  peptide (1)..(527): Ceres Seq. ID no. 13492637
  misc_feature (80)..(527): NCBI GI NO: 34895992 NR Description: putative carboxypeptidase D
  misc_feature (72)..(518): NCBI GI NO: 34908012 NR Description: putative carboxypeptidase D
  misc_feature (68)..(518): NCBI GI NO: 7428204 NR Description: carboxypeptidase D (EC 3
  misc_feature (68)..(518): NCBI GI NO: 20455471 NR Description: Serine carboxypeptidase II precursor
  misc_feature (84)..(518): NCBI GI NO: 15227493 NR Description: serine carboxypeptidase -related
  misc_feature (71)..(518): NCBI GI NO: 15231911 NR Description: serine carboxypeptidase -related
  misc_feature (205)..(527): NCBI GI NO: 2493493 NR Description: Serine carboxypeptidase II-1 precursor (CP-MII.1)
  misc_feature (93)..(518): NCBI GI NO: 7428205 NR Description: carboxypeptidase D (EC 3.4.16.6) - wheat
  misc_feature (73)..(524): NCBI GI NO: 18417667 NR Description: serine carboxypeptidase -related
  misc_feature (75)..(519): NCBI GI NO: 13877871 NR Description: putative serine carboxypeptidase II
PQNSHLVTGHSVVSIGCQSLPVLAHSSDAPIINTLYLCPCALLLCTTNQPVLSSADPLTYRERQWRPAAVLAATLALFLGAAAATAATAAAEADRIGRLPGQPPVNFSMYSGYVTVDAAAGRALFYWFIEAAGVPAESAPLVLWLNGGPGCSSVGYGASEELGAFRINADGRTLYLNPYPWNKVANMLFLDSPAGVGYSYSNSTSDLYTAGDNKTAHDSYNFLVNWLERFPQYKHRDFYITGESYAGHYVPQLSQLVYRNNKGIEKPILNFKGFMVGNAVIDDYHDFIGTFEYLWTHGLISDETYEKLRLACQFDVSEHASKECNKVFDIAEAEEGNIDAYSIYTPTCKKTSLHKRRLIRGRTPWLPRGYDPCTEKYSTKYYNLPEVQRALHANVTGIPYPWVTCSDPVYDFWKDSPRSMLPIYRELIAAGIRIWVFSGDADSVVPLTATRYSIDALFLPTITNWYPWYDDEEVGGWCQVYEGLTLVTVRGAGHEVPLHRPRQGLKLFEHFLRGEPMPRPVDSVQSF

SEQ ID NO: 28174 - protein, 419 aa, Zea mays subsp. mays
  peptide (1)..(419): Ceres Seq. ID no. 13492638
  misc_feature (1)..(419): NCBI GI NO: 34895992 NR Description: putative carboxypeptidase D
  misc_feature (1)..(410): NCBI GI NO: 34908012 NR Description: putative carboxypeptidase D
  misc_feature (1)..(410): NCBI GI NO: 7428204 NR Description: carboxypeptidase D (EC 3
  misc_feature (1)..(410): NCBI GI NO: 20455471 NR Description: Serine carboxypeptidase II precursor
  misc_feature (1)..(410): NCBI GI NO: 15227493 NR Description: serine carboxypeptidase -related
  misc_feature (1)..(410): NCBI GI NO: 15231911 NR Description: serine carboxypeptidase -related
  misc_feature (97)..(419): NCBI GI NO: 2493493 NR Description: Serine carboxypeptidase II-1 precursor (CP-MII.1)
  misc_feature (1)..(410): NCBI GI NO: 7428205 NR Description: carboxypeptidase D (EC 3.4.16.6) - wheat
  misc_feature (1)..(416): NCBI GI NO: 18417667 NR Description: serine carboxypeptidase -related
  misc_feature (1)..(411): NCBI GI NO: 13877871 NR Description: putative serine carboxypeptidase II
MYSGYVTVDAAAGRALFYWFIEAAGVPAESAPLVLWLNGGPGCSSVGYGASEELGAFRINADGRTLYLNPYPWNKVANMLFLDSPAGVGYSYSNSTSDLYTAGDNKTAHDSYNFLVNWLERFPQYKHRDFYITGESYAGHYVPQLSQLVYRNNKGIEKPILNFKGFMVGNAVIDDYHDFIGTFEYLWTHGLISDETYEKLRLACQFDVSEHASKECNKVFDIAEAEEGNIDAYSIYTPTCKKTSLHKRRLIRGRTPWLPRGYDPCTEKYSTKYYNLPEVQRALHANVTGIPYPWVTCSDPVYDFWKDSPRSMLPIYRELIAAGIRIWVFSGDADSVVPLTATRYSIDALFLPTITNWYPWYDDEEVGGWCQVYEGLTLVTVRGAGHEVPLHRPRQGLKLFEHFLRGEPMPRPVDSVQSF

SEQ ID NO: 28175 - protein, 341 aa, Zea mays subsp. mays
  peptide (1)..(341): Ceres Seq. ID no. 13492639
  misc_feature (1)..(341): NCBI GI NO: 34895992 NR Description: putative carboxypeptidase D
  misc_feature (1)..(332): NCBI GI NO: 34908012 NR Description: putative carboxypeptidase D
  misc_feature (1)..(332): NCBI GI NO: 7428204 NR Description: carboxypeptidase D (EC 3
  misc_feature (1)..(332): NCBI GI NO: 20455471 NR Description: Serine carboxypeptidase II precursor
  misc_feature (1)..(332): NCBI GI NO: 15227493 NR Description: serine carboxypeptidase -related
  misc_feature (1)..(332): NCBI GI NO: 15231911 NR Description: serine carboxypeptidase -related
  misc_feature (19)..(341): NCBI GI NO: 2493493 NR Description: Serine carboxypeptidase II-1 precursor (CP-MII.1)
  misc_feature (1)..(332): NCBI GI NO: 7428205 NR Description: carboxypeptidase D (EC 3.4.16.6) - wheat
  misc_feature (1)..(338): NCBI GI NO: 18417667 NR Description: serine carboxypeptidase -related
  misc_feature (1)..(333): NCBI GI NO: 13877871 NR Description: putative serine carboxypeptidase II
MLFLDSPAGVGYSYSNSTSDLYTAGDNKTAHDSYNFLVNWLERFPQYKHRDFYITGESYAGHYVPQLSQLVYRNNKGIEKPILNFKGFMVGNAVIDDYHDFIGTFEYLWTHGLISDETYEKLRLACQFDVSEHASKECNKVFDIAEAEEGNIDAYSIYTPTCKKTSLHKRRLIRGRTPWLPRGYDPCTEKYSTKYYNLPEVQRALHANVTGIPYPWVTCSDPVYDFWKDSPRSMLPIYRELIAAGIRIWVFSGDADSVVPLTATRYSIDALFLPTITNWYPWYDDEEVGGWCQVYEGLTLVTVRGAGHEVPLHRPRQGLKLFEHFLRGEPMPRPVDSVQSF

SEQ ID NO: 28176 - DNA, 1318 bp, Zea mays subsp. mays
  misc_feature (1)..(1318): Ceres Seq. ID no. 12365566
aagcaaccagaaccatacaattcttgccaaagcagaatctatttaacggcgacaacacaaccaaagcgtggcattcttccttccttctttccttcaccaatggccacgagaatagccttgtgtcttctcggccacgtcctcctcgccgtcgcgtcgatggcagtggcggcggcggccggtgacgcgggcaagatcggcatctgccacggccgcgttggcagtaacctcccgccgccgtcggccgccgcggcactgctcaagcggaacgggatcaccaaggcgcggctcttcctgccggacccggccgtgctcccggccttcgccgcggcgggcatcgacctcatggtgggcgtgcccaacgagaacctcaccttcctggccgcggcggggcccgagggcgcggcgcagtggctgcggtccgcggtcctgggcccacgcccccgccgagcgcgtccggtgcctcgccgtcggcaacgaggtgctgtacaacaaccagttctatgcgcctcacctcgtgccggccatgcggaacctgcacgccgcgctcgccaccctggggctggacggcagggtcaaggtctcctccgcgcacgcctcctcggtgctggccgcctcgtacccgccctccgccggcgcgttcgacgccgcctccctccccgtcctccgccccatgctgcggttcctggccgacaccggtgcgcccttcatggtgaacgcctaccctttcatcagccacgtgaacgacccggcgaacgtgcagctcgcgtacgcgctcttcggagcgggcgcggcgccggtgcaggacggcgcgctggtgtacacgaacctgttcgacgccacggtagacgcgctggtggccgcgctggagaaggaggggttcggcggcgtgccggtcgcggtgaccgagaccgggtggccaaccgcggggcacccggccgccaccccgcagaacgccgcagcgtacaacgccaagattgtggagagggcggcgcgcggcgtcggcacgccgaagcggcccggcgtgcccgtggaggtgttcctgttcgacttgtacgacgaggacggcaagcccggccccgagttcgagcgccactttggcatcttcagggcggacggcagtaaggcgtatgacatcaactttgcctagagctggtagtttctggagcgatggacggcttgttgattagtggatcaactggtgtatgctgaagaaaaaatgcctcacatcccctcttgttttacatgtctcgtgactactgtgtcgtttattgatttattatagttgcccacatgcgaagactaataactgattcttagc

SEQ ID NO: 28177 - protein, 373 aa, Zea mays subsp. mays
  peptide (1)..(373): Ceres Seq. ID no. 12365567
  misc_feature (65)..(142): Pfam Name: Pfam Description:  Glycosyl hydrolases family 17
  misc_feature (34)..(142): NCBI GI NO: 1076625 NR Description: glucan endo-1,3-beta-D-glucosidase (EC 3
  misc_feature (34)..(143): NCBI GI NO: 6006371 NR Description: Similar to hypothetical protein - potato (S31196)
  misc_feature (46)..(142): NCBI GI NO: 37531294 NR Description: putative beta-1,3-glucanase
  misc_feature (34)..(147): NCBI GI NO: 6073860 NR Description: beta-1, 3-glucananse [Musa acuminata]
  misc_feature (48)..(143): NCBI GI NO: 31126737 NR Description: putative beta 1,3-glucanase
  misc_feature (46)..(147): NCBI GI NO: 11279331 NR Description: beta-1,3-glucanase (EC 3.2.1.-) precursor
  misc_feature (34)..(142): NCBI GI NO: 34908492 NR Description: putative beta-1,3-glucanase
  misc_feature (65)..(147): NCBI GI NO: 6448757 NR Description: beta-1,3-glucanase [Musa acuminata]
  misc_feature (48)..(142): NCBI GI NO: 7447966 NR Description: 1,3-beta-glucanase (EC 3.2.1.-) PRm 6b - maize
  misc_feature (48)..(151): NCBI GI NO: 1352327 NR Description: Glucan endo-1
KQPEPYNSCQSRIYLTATTQPKRGILPSFFPSPMATRIALCLLGHVLLAVASMAVAAAAGDAGKIGICHGRVGSNLPPPSAAAALLKRNGITKARLFLPDPAVLPAFAAAGIDLMVGVPNENLTFLAAAGPEGAAQWLRSAVLGPRPRRARPVPRRRQRGAVQQPVLCASPRAGHAEPARRARHPGAGRQGQGLLRARLLGAGRLVPALRRRVRRRLPPRPPPHAAVPGRHRCALHGERLPFHQPRERPGERAARVRALRSGRGAGAGRRAGVHEPVRRHGRRAGGRAGEGGVRRRAGRGDRDRVANRGAPGRHPAERRSVQRQDCGEGGARRRHAEAARRARGGVPVRLVRRGRQARPRVRAPLWHLQGGRQ

SEQ ID NO: 28178 - protein, 340 aa, Zea mays subsp. mays
  peptide (1)..(340): Ceres Seq. ID no. 12365568
  misc_feature (32)..(109): Pfam Name: Pfam Description:  Glycosyl hydrolases family 17
  misc_feature (1)..(109): NCBI GI NO: 1076625 NR Description: glucan endo-1,3-beta-D-glucosidase (EC 3
  misc_feature (1)..(110): NCBI GI NO: 6006371 NR Description: Similar to hypothetical protein - potato (S31196)
  misc_feature (13)..(109): NCBI GI NO: 37531294 NR Description: putative beta-1,3-glucanase
  misc_feature (1)..(114): NCBI GI NO: 6073860 NR Description: beta-1, 3-glucananse [Musa acuminata]
  misc_feature (15)..(110): NCBI GI NO: 31126737 NR Description: putative beta 1,3-glucanase
  misc_feature (13)..(114): NCBI GI NO: 11279331 NR Description: beta-1,3-glucanase (EC 3.2.1.-) precursor
  misc_feature (1)..(109): NCBI GI NO: 34908492 NR Description: putative beta-1,3-glucanase
  misc_feature (32)..(114): NCBI GI NO: 6448757 NR Description: beta-1,3-glucanase [Musa acuminata]
  misc_feature (15)..(109): NCBI GI NO: 7447966 NR Description: 1,3-beta-glucanase (EC 3.2.1.-) PRm 6b - maize
  misc_feature (15)..(118): NCBI GI NO: 1352327 NR Description: Glucan endo-1
MATRIALCLLGHVLLAVASMAVAAAAGDAGKIGICHGRVGSNLPPPSAAAALLKRNGITKARLFLPDPAVLPAFAAAGIDLMVGVPNENLTFLAAAGPEGAAQWLRSAVLGPRPRRARPVPRRRQRGAVQQPVLCASPRAGHAEPARRARHPGAGRQGQGLLRARLLGAGRLVPALRRRVRRRLPPRPPPHAAVPGRHRCALHGERLPFHQPRERPGERAARVRALRSGRGAGAGRRAGVHEPVRRHGRRAGGRAGEGGVRRRAGRGDRDRVANRGAPGRHPAERRSVQRQDCGEGGARRRHAEAARRARGGVPVRLVRRGRQARPRVRAPLWHLQGGRQ

SEQ ID NO: 28179 - protein, 321 aa, Zea mays subsp. mays
  peptide (1)..(321): Ceres Seq. ID no. 12365569
  misc_feature (13)..(90): Pfam Name: Pfam Description:  Glycosyl hydrolases family 17
  misc_feature (1)..(90): NCBI GI NO: 1076625 NR Description: glucan endo-1,3-beta-D-glucosidase (EC 3
  misc_feature (1)..(91): NCBI GI NO: 6006371 NR Description: Similar to hypothetical protein - potato (S31196)
  misc_feature (1)..(90): NCBI GI NO: 37531294 NR Description: putative beta-1,3-glucanase
  misc_feature (1)..(95): NCBI GI NO: 6073860 NR Description: beta-1, 3-glucananse [Musa acuminata]
  misc_feature (1)..(91): NCBI GI NO: 31126737 NR Description: putative beta 1,3-glucanase
  misc_feature (1)..(95): NCBI GI NO: 11279331 NR Description: beta-1,3-glucanase (EC 3.2.1.-) precursor
  misc_feature (1)..(90): NCBI GI NO: 34908492 NR Description: putative beta-1,3-glucanase
  misc_feature (13)..(95): NCBI GI NO: 6448757 NR Description: beta-1,3-glucanase [Musa acuminata]
  misc_feature (1)..(90): NCBI GI NO: 7447966 NR Description: 1,3-beta-glucanase (EC 3.2.1.-) PRm 6b - maize
  misc_feature (1)..(99): NCBI GI NO: 1352327 NR Description: Glucan endo-1
MAVAAAAGDAGKIGICHGRVGSNLPPPSAAAALLKRNGITKARLFLPDPAVLPAFAAAGIDLMVGVPNENLTFLAAAGPEGAAQWLRSAVLGPRPRRARPVPRRRQRGAVQQPVLCASPRAGHAEPARRARHPGAGRQGQGLLRARLLGAGRLVPALRRRVRRRLPPRPPPHAAVPGRHRCALHGERLPFHQPRERPGERAARVRALRSGRGAGAGRRAGVHEPVRRHGRRAGGRAGEGGVRRRAGRGDRDRVANRGAPGRHPAERRSVQRQDCGEGGARRRHAEAARRARGGVPVRLVRRGRQARPRVRAPLWHLQGGRQ

SEQ ID NO: 28180 - DNA, 1287 bp, Zea mays subsp. mays
  misc_feature (1)..(1287): Ceres Seq. ID no. 12403690
aaacacccagtggttcaggctggccaaagttatgagttatctgccctgtcctcccaaactaatctagtcccaggaaactaatttcaacacacaactggacgacggtgcgttgcgttggtggccgccggcgacgatgtcgtcgtccgcgggcgacaagaggaagaagacggcgtgcgtgaccggagggaacgggtacatcggctccgcgctcatcaagatgctgctggaggacggatacgccgtcaagacgacggtcaggaacccagacgacatggacaagaactcccacctcaagggcctgcagcagctcgggccgctgacggtcctccgcggcgacatggacgaggagggcagcttcgacgacgccgtcgccggctgcgactacgtcttcctcgtcgccgcaccggtgaacctcgcagcacaggatccagagaaagagcagatcgagccgtccgtccgaggcacgctgaacgcgatgaggtcgtgcgcgaaggccgggacggtgcggcgcgtgatcctgacctcgtcggtggccggagtctacatcaggccggacctgctgcaactgcgaggcgacgggcacgtgctggacgaggagtcctggtccgacgtcgagtacctcagagccaacaggccaccgacctgggggtactgcgtgtcgaaggtgctcctcgagaaggaggcgtgcaggttcgcgggcgagcacggcatcagcctggtcaccgtctgccccgtcatcaccgtgggcgcggcgccggcgcccaaggtccgcacgagcatcatcgacagcctctccatgctgtccggcgacgagcgagggctcgccgtgctcaaaggcatcgagaagacctccggcgcggtgcagctggtccacgtcgacgacctctgccgcgccgagctgttcctggcagaggcggcggcggccgacgggaggtacatctgctgcggcctcaacacgaccgtcctcgagctcgcgcgtttcctggcacacaagtacccgcagtacggcgtgaaaacaaacctccacgacgatgaacagcagctactcgagaagccgagggtgaaggtgtcgtcggagaagctcgtccgggaagggtttgagtacaggcacaacacgctggacgagatctacgacaatgtggtcgagtacgtcaaggcgttagggattctgccctactgatacttagatgcccgagcttaattaagtaggagggcagcatatatgttgtcggacatatacgagtcttggaaagtacttaaataatttatggacatatttttcattgg

SEQ ID NO: 28181 - protein, 348 aa, Zea mays subsp. mays
  peptide (1)..(348): Ceres Seq. ID no. 12403691
  misc_feature (13)..(159): Pfam Name: Pfam Description:  3-beta hydroxysteroid dehydrogenase/ isomerase family
  misc_feature (10)..(348): NCBI GI NO: 39546249 NR Description: OSJNBa0089N06.19
  misc_feature (5)..(347): NCBI GI NO: 39546252 NR Description: OSJNBa0089N06.22
  misc_feature (45)..(323): NCBI GI NO: 39546254 NR Description: OSJNBa0089N06.24
  misc_feature (10)..(29): NCBI GI NO: 39546254 NR Description: OSJNBa0089N06.24
  misc_feature (10)..(300): NCBI GI NO: 39546251 NR Description: OSJNBa0089N06.21
  misc_feature (304)..(348): NCBI GI NO: 39546251 NR Description: OSJNBa0089N06.21
  misc_feature (10)..(345): NCBI GI NO: 27966032 NR Description: anthocyanidin reductase [Medicago truncatula]
  misc_feature (11)..(346): NCBI GI NO: 15220598 NR Description: dihydroflavonol 4-reductase, putative
  misc_feature (11)..(346): NCBI GI NO: 6689826 NR Description: DFR-like protein [Arabidopsis thaliana]
  misc_feature (1)..(347): NCBI GI NO: 1706374 NR Description: DIHYDROFLAVONOL-4-REDUCTASE
MSSSAGDKRKKTACVTGGNGYIGSALIKMLLEDGYAVKTTVRNPDDMDKNSHLKGLQQLGPLTVLRGDMDEEGSFDDAVAGCDYVFLVAAPVNLAAQDPEKEQIEPSVRGTLNAMRSCAKAGTVRRVILTSSVAGVYIRPDLLQLRGDGHVLDEESWSDVEYLRANRPPTWGYCVSKVLLEKEACRFAGEHGISLVTVCPVITVGAAPAPKVRTSIIDSLSMLSGDERGLAVLKGIEKTSGAVQLVHVDDLCRAELFLAEAAAADGRYICCGLNTTVLELARFLAHKYPQYGVKTNLHDDEQQLLEKPRVKVSSEKLVREGFEYRHNTLDEIYDNVVEYVKALGILPY

SEQ ID NO: 28182 - protein, 320 aa, Zea mays subsp. mays
  peptide (1)..(320): Ceres Seq. ID no. 12403692
  misc_feature (1)..(131): Pfam Name: Pfam Description:  3-beta hydroxysteroid dehydrogenase/ isomerase family
  misc_feature (1)..(320): NCBI GI NO: 39546249 NR Description: OSJNBa0089N06.19
  misc_feature (1)..(319): NCBI GI NO: 39546252 NR Description: OSJNBa0089N06.22
  misc_feature (17)..(295): NCBI GI NO: 39546254 NR Description: OSJNBa0089N06.24
  misc_feature (1)..(272): NCBI GI NO: 39546251 NR Description: OSJNBa0089N06.21
  misc_feature (276)..(320): NCBI GI NO: 39546251 NR Description: OSJNBa0089N06.21
  misc_feature (1)..(317): NCBI GI NO: 27966032 NR Description: anthocyanidin reductase [Medicago truncatula]
  misc_feature (1)..(318): NCBI GI NO: 15220598 NR Description: dihydroflavonol 4-reductase, putative
  misc_feature (1)..(318): NCBI GI NO: 6689826 NR Description: DFR-like protein [Arabidopsis thaliana]
  misc_feature (1)..(319): NCBI GI NO: 1706374 NR Description: DIHYDROFLAVONOL-4-REDUCTASE
  misc_feature (1)..(319): NCBI GI NO: 7427700 NR Description: dihydrokaempferol 4-reductase (EC 1
MLLEDGYAVKTTVRNPDDMDKNSHLKGLQQLGPLTVLRGDMDEEGSFDDAVAGCDYVFLVAAPVNLAAQDPEKEQIEPSVRGTLNAMRSCAKAGTVRRVILTSSVAGVYIRPDLLQLRGDGHVLDEESWSDVEYLRANRPPTWGYCVSKVLLEKEACRFAGEHGISLVTVCPVITVGAAPAPKVRTSIIDSLSMLSGDERGLAVLKGIEKTSGAVQLVHVDDLCRAELFLAEAAAADGRYICCGLNTTVLELARFLAHKYPQYGVKTNLHDDEQQLLEKPRVKVSSEKLVREGFEYRHNTLDEIYDNVVEYVKALGILPY

SEQ ID NO: 28183 - protein, 302 aa, Zea mays subsp. mays
  peptide (1)..(302): Ceres Seq. ID no. 12403693
  misc_feature (1)..(113): Pfam Name: Pfam Description:  3-beta hydroxysteroid dehydrogenase/ isomerase family
  misc_feature (1)..(302): NCBI GI NO: 39546249 NR Description: OSJNBa0089N06.19
  misc_feature (1)..(301): NCBI GI NO: 39546252 NR Description: OSJNBa0089N06.22
  misc_feature (1)..(277): NCBI GI NO: 39546254 NR Description: OSJNBa0089N06.24
  misc_feature (1)..(254): NCBI GI NO: 39546251 NR Description: OSJNBa0089N06.21
  misc_feature (258)..(302): NCBI GI NO: 39546251 NR Description: OSJNBa0089N06.21
  misc_feature (1)..(299): NCBI GI NO: 27966032 NR Description: anthocyanidin reductase [Medicago truncatula]
  misc_feature (1)..(300): NCBI GI NO: 15220598 NR Description: dihydroflavonol 4-reductase, putative
  misc_feature (1)..(300): NCBI GI NO: 6689826 NR Description: DFR-like protein [Arabidopsis thaliana]
  misc_feature (1)..(301): NCBI GI NO: 1706374 NR Description: DIHYDROFLAVONOL-4-REDUCTASE
  misc_feature (1)..(301): NCBI GI NO: 7427700 NR Description: dihydrokaempferol 4-reductase (EC 1
MDKNSHLKGLQQLGPLTVLRGDMDEEGSFDDAVAGCDYVFLVAAPVNLAAQDPEKEQIEPSVRGTLNAMRSCAKAGTVRRVILTSSVAGVYIRPDLLQLRGDGHVLDEESWSDVEYLRANRPPTWGYCVSKVLLEKEACRFAGEHGISLVTVCPVITVGAAPAPKVRTSIIDSLSMLSGDERGLAVLKGIEKTSGAVQLVHVDDLCRAELFLAEAAAADGRYICCGLNTTVLELARFLAHKYPQYGVKTNLHDDEQQLLEKPRVKVSSEKLVREGFEYRHNTLDEIYDNVVEYVKALGILPY

SEQ ID NO: 28184 - DNA, 1190 bp, Zea mays subsp. mays
  misc_feature (1)..(1190): Ceres Seq. ID no. 12351164
agaaccacagaccaagaagtgccctccactttgtaagctcgtttccgaaaagagctctagagccgccacacacacacacaccatggcaccgcgttctctgctggcagtgctcgccgtcgccgccctcgcgctcttgcacgccgcctcggccaagtcgtcgtggcttgacaggaggttcaccacggacggcaccgtccgcacgggatacgacgattcgggccagcaggtggtgatgctccgcctcgaccagcactccggcgctgccggcttcaactccaaggagcagtacctttacggcgagttcagcgtcgagatgaagctcatccgggggaactccgccggcaccgtctcgtgcttctacctctcttccggcgacggcgacgggtcgcgacgagatcgacatggagttcatgggcaactcgagcggggcagccggtggtgctgaacaccaacgtgtgggccagcggcgacggcaagaaggagcaccagttcgacctctggttcgacccctccgccgactaccacacctacaccatcatctggaacccgaccaacatcctgttcaaggtcgacgacctcttcatccgctccttcaagcgctacgccgacctgccgtacccgagctccaggcccatgacgctgcacgccacgctgtgggacggcagctactgggccaccgagaagggcagggtcggcatcgactggtccgacgcgcccttcgtcgtctcctaccgcagctactacgccagcgcctgcgtcagcggcggcgcgtgccgggccgccggcagcggcgggtggatgaacaggcagcttgacagcgccgagtggggcaccgtcaggtgggcggagcgcaacttcatgcgctacaactactgccaggatgggtggaggttcccgcaaggactccccgccgagtgcgcccgccactgatatgcgtccgccggttaattcttcgtcgacgatccagcttggcgtcgtttgttctttgttttgttgggtattcttttttttctacgggtatatgattcttgctcttctttgtggatttgtgattaaaaagcagccctgcagcttgcaacgtgtgggcggttgttgtacaccttgcttttcctaaaccgaagcatgtattttatttttaatcgtgcctttggacgatacaggcatgcagcatatatagtatttacgtacgc

SEQ ID NO: 28185 - protein, 147 aa, Zea mays subsp. mays
  peptide (1)..(147): Ceres Seq. ID no. 12351165
  misc_feature (65)..(128): Pfam Name: Pfam Description:  Glycosyl hydrolases family 16
  misc_feature (28)..(128): NCBI GI NO: 7447410 NR Description: xyloglucan endo-1,4-beta-D-glucanase (EC 3
  misc_feature (28)..(128): NCBI GI NO: 40253521 NR Description: putative end-xyloglucan transferase
  misc_feature (28)..(125): NCBI GI NO: 7447415 NR Description: xyloglucan endotransglycosylase (EC 2
  misc_feature (28)..(125): NCBI GI NO: 14330334 NR Description: Xet2 protein [Festuca pratensis]
  misc_feature (28)..(128): NCBI GI NO: 7447411 NR Description: end-xyloglucan transferase (EC 2.4.1.-) - rice
  misc_feature (36)..(127): NCBI GI NO: 32489753 NR Description: OSJNBb0015N08.5
  misc_feature (35)..(132): NCBI GI NO: 7447403 NR Description: xyloglucan endo-1,4-beta-D-glucanase (EC 3
  misc_feature (75)..(123): NCBI GI NO: 8886865 NR Description: xyloglucan endotransglycosylase XET1
  misc_feature (37)..(123): NCBI GI NO: 7447413 NR Description: xyloglucan endo-1,4-beta-D-glucanase (EC 3
  misc_feature (28)..(123): NCBI GI NO: 29500891 NR Description: putative xyloglucan endotransglycosylase
EPQTKKCPPLCKLVSEKSSRAATHTHTMAPRSLLAVLAVAALALLHAASAKSSWLDRRFTTDGTVRTGYDDSGQQVVMLRLDQHSGAAGFNSKEQYLYGEFSVEMKLIRGNSAGTVSCFYLSSGDGDGSRRDRHGVHGQLERGSRWC

SEQ ID NO: 28186 - protein, 137 aa, Zea mays subsp. mays
  peptide (1)..(137): Ceres Seq. ID no. 12351166
  misc_feature (1)..(14): NCBI GI NO: 13592175 NR Description: ppg3 [Leishmania major]
  misc_feature (1)..(14): NCBI GI NO: 13592175 NR Description: ppg3 [Leishmania major]
  misc_feature (1)..(14): NCBI GI NO: 13592175 NR Description: ppg3 [Leishmania major]
  misc_feature (1)..(29): NCBI GI NO: 13592175 NR Description: ppg3 [Leishmania major]
  misc_feature (1)..(14): NCBI GI NO: 13592175 NR Description: ppg3 [Leishmania major]
  misc_feature (1)..(14): NCBI GI NO: 13592175 NR Description: ppg3 [Leishmania major]
  misc_feature (1)..(14): NCBI GI NO: 13592175 NR Description: ppg3 [Leishmania major]
  misc_feature (1)..(29): NCBI GI NO: 5420387 NR Description: proteophosphoglycan [Leishmania major]
  misc_feature (1)..(21): NCBI GI NO: 17384256 NR Description: mucin 5 [Homo sapiens]
  misc_feature (1)..(14): NCBI GI NO: 11359723 NR Description: proteophosphoglycan, membrane-associated
MEFMGNSSGAAGGAEHQRVGQRRRQEGAPVRPLVRPLRRLPHLHHHLEPDQHPVQGRRPLHPLLQALRRPAVPELQAHDAARHAVGRQLLGHREGQGRHRLVRRALRRLLPQLLRQRLRQRRRVPGRRQRRVDEQAA

SEQ ID NO: 28187 - protein, 134 aa, Zea mays subsp. mays
  peptide (1)..(134): Ceres Seq. ID no. 12351167
  misc_feature (1)..(11): NCBI GI NO: 13592175 NR Description: ppg3 [Leishmania major]
  misc_feature (1)..(11): NCBI GI NO: 13592175 NR Description: ppg3 [Leishmania major]
  misc_feature (1)..(11): NCBI GI NO: 13592175 NR Description: ppg3 [Leishmania major]
  misc_feature (1)..(26): NCBI GI NO: 13592175 NR Description: ppg3 [Leishmania major]
  misc_feature (1)..(11): NCBI GI NO: 13592175 NR Description: ppg3 [Leishmania major]
  misc_feature (1)..(11): NCBI GI NO: 13592175 NR Description: ppg3 [Leishmania major]
  misc_feature (1)..(11): NCBI GI NO: 13592175 NR Description: ppg3 [Leishmania major]
  misc_feature (1)..(26): NCBI GI NO: 5420387 NR Description: proteophosphoglycan [Leishmania major]
  misc_feature (1)..(18): NCBI GI NO: 17384256 NR Description: mucin 5 [Homo sapiens]
  misc_feature (1)..(11): NCBI GI NO: 11359723 NR Description: proteophosphoglycan, membrane-associated
MGNSSGAAGGAEHQRVGQRRRQEGAPVRPLVRPLRRLPHLHHHLEPDQHPVQGRRPLHPLLQALRRPAVPELQAHDAARHAVGRQLLGHREGQGRHRLVRRALRRLLPQLLRQRLRQRRRVPGRRQRRVDEQAA

SEQ ID NO: 28188 - protein, 120 aa, Zea mays subsp. mays
  peptide (1)..(120): Ceres Seq. ID no. 12351168
  misc_feature (38)..(101): Pfam Name: Pfam Description:  Glycosyl hydrolases family 16
  misc_feature (1)..(101): NCBI GI NO: 7447410 NR Description: xyloglucan endo-1,4-beta-D-glucanase (EC 3
  misc_feature (1)..(101): NCBI GI NO: 40253521 NR Description: putative end-xyloglucan transferase
  misc_feature (1)..(98): NCBI GI NO: 7447415 NR Description: xyloglucan endotransglycosylase (EC 2
  misc_feature (1)..(98): NCBI GI NO: 14330334 NR Description: Xet2 protein [Festuca pratensis]
  misc_feature (1)..(101): NCBI GI NO: 7447411 NR Description: end-xyloglucan transferase (EC 2.4.1.-) - rice
  misc_feature (9)..(100): NCBI GI NO: 32489753 NR Description: OSJNBb0015N08.5
  misc_feature (8)..(105): NCBI GI NO: 7447403 NR Description: xyloglucan endo-1,4-beta-D-glucanase (EC 3
  misc_feature (48)..(96): NCBI GI NO: 8886865 NR Description: xyloglucan endotransglycosylase XET1
  misc_feature (10)..(96): NCBI GI NO: 7447413 NR Description: xyloglucan endo-1,4-beta-D-glucanase (EC 3
  misc_feature (1)..(96): NCBI GI NO: 29500891 NR Description: putative xyloglucan endotransglycosylase
MAPRSLLAVLAVAALALLHAASAKSSWLDRRFTTDGTVRTGYDDSGQQVVMLRLDQHSGAAGFNSKEQYLYGEFSVEMKLIRGNSAGTVSCFYLSSGDGDGSRRDRHGVHGQLERGSRWC

SEQ ID NO: 28189 - DNA, 1035 bp, Zea mays subsp. mays
  misc_feature (1)..(1035): Ceres Seq. ID no. 12403456
aacatataaattacgtgctccctcttcgccgccgtctctcgcgccgccacttccctcccgacccactcgcccaaaaccgtagcgccctcgcctgctcgccgccgccgtcgttgcgagctccccatcttcctccgttaaccatggcgacccagatcagcaagaagaagaagttcgtcagcgacggcgtgttctacgccgagctcaatgagatgctgacgcgggagctcgcggaggacggctactccggcgtggaggtgcgtgtcacaccgatgcgcacggagatcatcatccgcgcaacgcgcacgcagaacgtgctcggcgagaagggccgcaggatcagggagctcacgtctgtggtccagaagaggttcaacttccccgagaacggcgtcgagctctacgccgagaaggtcgtcaaccgcggcctctgcgccatcgcgcaggctgagtccctccgctacaagctcctcggaggccttgccgtccggagggcctgctatggtgttcttcgctttgttatggagagtggtgccgagggttgtgaggtcattgtgagtggaaagctcagggctcaaagagccaagtccatgaagttcaaggatggctacatgatctcatctggtcagccagtgaatgagtacatcgactcagctgtgagacacgtcctcctcagacagggtgttctgggtatcaaggtgaagatcatgcttgactgggacccgaagggcaaggttggcccgatcacccctcttccggacctggtgaccatccataccccgaaggaggaggacgagctgcgccctcctgtcttggcagctgaggtctaaggtcccaacagcgtcctcgaaatggcagtttgatcgggtcctagctaggtttgatcttatgataagggcagtgctaagacagttcgttccgtgtcacttctgtttaaaattaagttttgccgagacaagctatatgtaccggatgaaagtgtggttccttattgtatgctctggaattttatttttggtatgtttatttttttgccct

SEQ ID NO: 28190 - protein, 274 aa, Zea mays subsp. mays
  peptide (1)..(274): Ceres Seq. ID no. 12403457
  misc_feature (150)..(234): Pfam Name: Pfam Description:  Ribosomal protein S3, C-terminal domain
  misc_feature (47)..(270): NCBI GI NO: 22204124 NR Description: putative 40S ribosomal protein S3
  misc_feature (49)..(274): NCBI GI NO: 14192875 NR Description: Putative 40S ribosomal protein
  misc_feature (47)..(263): NCBI GI NO: 15238533 NR Description: 40S ribosomal protein S3; protein id: At5g35530
  misc_feature (47)..(272): NCBI GI NO: 15232352 NR Description: 40S ribosomal protein S3, putative
  misc_feature (47)..(272): NCBI GI NO: 15225107 NR Description: 40S ribosomal protein S3, putative
  misc_feature (47)..(269): NCBI GI NO: 28374213 NR Description: similar to 40S ribosomal protein S3 [Danio rerio]
  misc_feature (47)..(262): NCBI GI NO: 37595356 NR Description: ribosomal protein S3 [Danio rerio]
  misc_feature (47)..(262): NCBI GI NO: 38512247 NR Description: Ribosomal protein S3 [Silurana tropicalis]
  misc_feature (47)..(273): NCBI GI NO: 12847921 NR Description: unnamed protein product [Mus musculus]
  misc_feature (47)..(273): NCBI GI NO: 6755372 NR Description: ribosomal protein S3 [Mus musculus]
HINYVLPLRRRLSRRHFPPDPLAQNRSALACSPPPSLRAPHLPPLTMATQISKKKKFVSDGVFYAELNEMLTRELAEDGYSGVEVRVTPMRTEIIIRATRTQNVLGEKGRRIRELTSVVQKRFNFPENGVELYAEKVVNRGLCAIAQAESLRYKLLGGLAVRRACYGVLRFVMESGAEGCEVIVSGKLRAQRAKSMKFKDGYMISSGQPVNEYIDSAVRHVLLRQGVLGIKVKIMLDWDPKGKVGPITPLPDLVTIHTPKEEDELRPPVLAAEV

SEQ ID NO: 28191 - protein, 228 aa, Zea mays subsp. mays
  peptide (1)..(228): Ceres Seq. ID no. 12403458
  misc_feature (104)..(188): Pfam Name: Pfam Description:  Ribosomal protein S3, C-terminal domain
  misc_feature (1)..(224): NCBI GI NO: 22204124 NR Description: putative 40S ribosomal protein S3
  misc_feature (3)..(228): NCBI GI NO: 14192875 NR Description: Putative 40S ribosomal protein
  misc_feature (1)..(217): NCBI GI NO: 15238533 NR Description: 40S ribosomal protein S3; protein id: At5g35530
  misc_feature (1)..(226): NCBI GI NO: 15232352 NR Description: 40S ribosomal protein S3, putative
  misc_feature (1)..(226): NCBI GI NO: 15225107 NR Description: 40S ribosomal protein S3, putative
  misc_feature (1)..(223): NCBI GI NO: 28374213 NR Description: similar to 40S ribosomal protein S3 [Danio rerio]
  misc_feature (1)..(216): NCBI GI NO: 37595356 NR Description: ribosomal protein S3 [Danio rerio]
  misc_feature (1)..(216): NCBI GI NO: 38512247 NR Description: Ribosomal protein S3 [Silurana tropicalis]
  misc_feature (1)..(227): NCBI GI NO: 12847921 NR Description: unnamed protein product [Mus musculus]
  misc_feature (1)..(227): NCBI GI NO: 6755372 NR Description: ribosomal protein S3 [Mus musculus]
MATQISKKKKFVSDGVFYAELNEMLTRELAEDGYSGVEVRVTPMRTEIIIRATRTQNVLGEKGRRIRELTSVVQKRFNFPENGVELYAEKVVNRGLCAIAQAESLRYKLLGGLAVRRACYGVLRFVMESGAEGCEVIVSGKLRAQRAKSMKFKDGYMISSGQPVNEYIDSAVRHVLLRQGVLGIKVKIMLDWDPKGKVGPITPLPDLVTIHTPKEEDELRPPVLAAEV

SEQ ID NO: 28192 - protein, 205 aa, Zea mays subsp. mays
  peptide (1)..(205): Ceres Seq. ID no. 12403459
  misc_feature (81)..(165): Pfam Name: Pfam Description:  Ribosomal protein S3, C-terminal domain
  misc_feature (1)..(201): NCBI GI NO: 22204124 NR Description: putative 40S ribosomal protein S3
  misc_feature (1)..(205): NCBI GI NO: 14192875 NR Description: Putative 40S ribosomal protein
  misc_feature (1)..(194): NCBI GI NO: 15238533 NR Description: 40S ribosomal protein S3; protein id: At5g35530
  misc_feature (1)..(203): NCBI GI NO: 15232352 NR Description: 40S ribosomal protein S3, putative
  misc_feature (1)..(203): NCBI GI NO: 15225107 NR Description: 40S ribosomal protein S3, putative
  misc_feature (1)..(200): NCBI GI NO: 28374213 NR Description: similar to 40S ribosomal protein S3 [Danio rerio]
  misc_feature (1)..(193): NCBI GI NO: 37595356 NR Description: ribosomal protein S3 [Danio rerio]
  misc_feature (1)..(193): NCBI GI NO: 38512247 NR Description: Ribosomal protein S3 [Silurana tropicalis]
  misc_feature (1)..(204): NCBI GI NO: 12847921 NR Description: unnamed protein product [Mus musculus]
  misc_feature (1)..(204): NCBI GI NO: 6755372 NR Description: ribosomal protein S3 [Mus musculus]
MLTRELAEDGYSGVEVRVTPMRTEIIIRATRTQNVLGEKGRRIRELTSVVQKRFNFPENGVELYAEKVVNRGLCAIAQAESLRYKLLGGLAVRRACYGVLRFVMESGAEGCEVIVSGKLRAQRAKSMKFKDGYMISSGQPVNEYIDSAVRHVLLRQGVLGIKVKIMLDWDPKGKVGPITPLPDLVTIHTPKEEDELRPPVLAAEV

SEQ ID NO: 28193 - DNA, 1491 bp, Zea mays subsp. mays
  misc_feature (1)..(1491): Ceres Seq. ID no. 12408460
accaccagtagtcctactggtccttgacgtccgtggccactcaggttgtgttctcggagttctttcgccgggtggggaggcggagtgcgcggtcgaggaaggccttagcggtcgatcgatcggcgccgcgcttgactgcctgtacatgaggagcggctgcggcggcggcggagggagacaacctggggaaggaggcgggggaggcgctggggctgctgggctgcgtcaatgaggtggtggcggcggtggcggccacgtgggggcccatgaccgacggcgcgcgcgtcgagacggcgcccaggctcgcccaatggcgcgtcgacccgctcccctgctacacctaccgcaagtcactccccttcctcatcggcctctggaactggtgcatatctgtggagagaaataacaagcaaacctgtgttaagctctttgcagagaatacaagttctctcaagaacggttcctcagccccaatagcttcctttatcgccaaacttattgtatctcttccacctaatcagcagaccatagtccacccaggaatttttgacaaacagctgaaatacgacggttttgtgtggacaatcgatagcaccgtcactgggaggtttgtgattgagatagagtttcttgacctgaaggtcgctgatccgtctggcggcgagccggcctcgatttgggcctcccgccaggtcaagcagtgctcggatagcacggccctgtcgtccctggctcggatgctgcacgaggacgtcctcaccgacatcaccatcaacgcggcggacggcagcgtgggcgcgcaccgcgcggtcctggcgacgcggtcgccggtgttccggagcatgttctcgcacgacctgagggagaaggagctctccaccgtggacatcaccgacatgtccctggacgcgtgccgcgccttcctcagctacatctacggcgacgtgcgcggcggcgaggagttcctggcgaaccggctggcgctcctccgcgccgccgacaagtacgacatcggcgacctcagggaggcctgccacgagagcctgctggaagacatcgacgcgcgcaacgtgctggagcggctgcagacggcgcacctgtaccggctgccgaggctcaagggcggctgcctgaggttccttgtggacttcaggaaggtgtacgagatgcacgacgacgacctcaacgcgttcctgcagacggccgacagggaactcgtggccgaggtgttccatggcgttcttgccgcgtggagcgggcggtaagccgggcgcatgccatggcactgccgctctgctgcaggtgttgcacatctggttggttcagttcgtcacaactcagaagcgttgtttgcaactgcaggattcttgctgggaaagcgtgtaaatatttgcaactgtacatgcgtgccagtggttggtctaaaatttactgtgcatgccttgattggattttgttcctatgatgtggaaatcagctcatatgctgctc

SEQ ID NO: 28194 - protein, 332 aa, Zea mays subsp. mays
  peptide (1)..(332): Ceres Seq. ID no. 12408461
  misc_feature (155)..(264): Pfam Name: Pfam Description:  BTB/POZ domain
  misc_feature (1)..(331): NCBI GI NO: 15222771 NR Description: hypothetical protein; protein id: At1g55760.1
  misc_feature (1)..(293): NCBI GI NO: 8778495 NR Description: F20N2.15 [Arabidopsis thaliana]
  misc_feature (6)..(329): NCBI GI NO: 15219092 NR Description: unknown protein; protein id: At1g21780
  misc_feature (41)..(329): NCBI GI NO: 38637050 NR Description: POZ domain protein family-like
  misc_feature (124)..(293): NCBI GI NO: 27661061 NR Description: similar to speckle-type POZ protein
  misc_feature (124)..(293): NCBI GI NO: 34858214 NR Description: similar to speckle-type POZ protein-like 1
  misc_feature (148)..(326): NCBI GI NO: 34900926 NR Description: Speckle-type POZ protein-like~contains ESTsAU030338
  misc_feature (124)..(293): NCBI GI NO: 34858187 NR Description: similar to speckle-type POZ protein-like 1
  misc_feature (131)..(293): NCBI GI NO: 34858205 NR Description: similar to speckle-type POZ protein-like 1
  misc_feature (124)..(293): NCBI GI NO: 34858216 NR Description: similar to speckle-type POZ protein-like 1
MTDGARVETAPRLAQWRVDPLPCYTYRKSLPFLIGLWNWCISVERNNKQTCVKLFAENTSSLKNGSSAPIASFIAKLIVSLPPNQQTIVHPGIFDKQLKYDGFVWTIDSTVTGRFVIEIEFLDLKVADPSGGEPASIWASRQVKQCSDSTALSSLARMLHEDVLTDITINAADGSVGAHRAVLATRSPVFRSMFSHDLREKELSTVDITDMSLDACRAFLSYIYGDVRGGEEFLANRLALLRAADKYDIGDLREACHESLLEDIDARNVLERLQTAHLYRLPRLKGGCLRFLVDFRKVYEMHDDDLNAFLQTADRELVAEVFHGVLAAWSGR

SEQ ID NO: 28195 - protein, 175 aa, Zea mays subsp. mays
  peptide (1)..(175): Ceres Seq. ID no. 12408462
  misc_feature (1)..(107): Pfam Name: Pfam Description:  BTB/POZ domain
  misc_feature (1)..(174): NCBI GI NO: 15222771 NR Description: hypothetical protein; protein id: At1g55760.1
  misc_feature (1)..(136): NCBI GI NO: 8778495 NR Description: F20N2.15 [Arabidopsis thaliana]
  misc_feature (1)..(172): NCBI GI NO: 15219092 NR Description: unknown protein; protein id: At1g21780
  misc_feature (1)..(172): NCBI GI NO: 38637050 NR Description: POZ domain protein family-like
  misc_feature (1)..(136): NCBI GI NO: 27661061 NR Description: similar to speckle-type POZ protein
  misc_feature (1)..(136): NCBI GI NO: 34858214 NR Description: similar to speckle-type POZ protein-like 1
  misc_feature (1)..(169): NCBI GI NO: 34900926 NR Description: Speckle-type POZ protein-like~contains ESTsAU030338
  misc_feature (1)..(136): NCBI GI NO: 34858187 NR Description: similar to speckle-type POZ protein-like 1
  misc_feature (1)..(136): NCBI GI NO: 34858205 NR Description: similar to speckle-type POZ protein-like 1
  misc_feature (1)..(136): NCBI GI NO: 34858216 NR Description: similar to speckle-type POZ protein-like 1
MLHEDVLTDITINAADGSVGAHRAVLATRSPVFRSMFSHDLREKELSTVDITDMSLDACRAFLSYIYGDVRGGEEFLANRLALLRAADKYDIGDLREACHESLLEDIDARNVLERLQTAHLYRLPRLKGGCLRFLVDFRKVYEMHDDDLNAFLQTADRELVAEVFHGVLAAWSGR

SEQ ID NO: 28196 - DNA, 1765 bp, Zea mays subsp. mays; identical to SEQ ID NO: 28172
  misc_feature (1)..(1765): Ceres Seq. ID no. 13492636

SEQ ID NO: 28197 - protein, 527 aa, Zea mays subsp. mays; identical to SEQ ID NO: 28173
  peptide (1)..(527): Ceres Seq. ID no. 13492637
  misc_feature (80)..(527): NCBI GI NO: 34895992 NR Description: putative carboxypeptidase D
  misc_feature (72)..(518): NCBI GI NO: 34908012 NR Description: putative carboxypeptidase D
  misc_feature (68)..(518): NCBI GI NO: 7428204 NR Description: carboxypeptidase D (EC 3
  misc_feature (68)..(518): NCBI GI NO: 20455471 NR Description: Serine carboxypeptidase II precursor
  misc_feature (84)..(518): NCBI GI NO: 15227493 NR Description: serine carboxypeptidase -related
  misc_feature (71)..(518): NCBI GI NO: 15231911 NR Description: serine carboxypeptidase -related
  misc_feature (205)..(527): NCBI GI NO: 2493493 NR Description: Serine carboxypeptidase II-1 precursor (CP-MII.1)
  misc_feature (93)..(518): NCBI GI NO: 7428205 NR Description: carboxypeptidase D (EC 3.4.16.6) - wheat
  misc_feature (73)..(524): NCBI GI NO: 18417667 NR Description: serine carboxypeptidase -related
  misc_feature (75)..(519): NCBI GI NO: 13877871 NR Description: putative serine carboxypeptidase II

SEQ ID NO: 28198 - protein, 419 aa, Zea mays subsp. mays; identical to SEQ ID NO: 28174
  peptide (1)..(419): Ceres Seq. ID no. 13492638
  misc_feature (1)..(419): NCBI GI NO: 34895992 NR Description: putative carboxypeptidase D
  misc_feature (1)..(410): NCBI GI NO: 34908012 NR Description: putative carboxypeptidase D
  misc_feature (1)..(410): NCBI GI NO: 7428204 NR Description: carboxypeptidase D (EC 3
  misc_feature (1)..(410): NCBI GI NO: 20455471 NR Description: Serine carboxypeptidase II precursor
  misc_feature (1)..(410): NCBI GI NO: 15227493 NR Description: serine carboxypeptidase -related
  misc_feature (1)..(410): NCBI GI NO: 15231911 NR Description: serine carboxypeptidase -related
  misc_feature (97)..(419): NCBI GI NO: 2493493 NR Description: Serine carboxypeptidase II-1 precursor (CP-MII.1)
  misc_feature (1)..(410): NCBI GI NO: 7428205 NR Description: carboxypeptidase D (EC 3.4.16.6) - wheat
  misc_feature (1)..(416): NCBI GI NO: 18417667 NR Description: serine carboxypeptidase -related
  misc_feature (1)..(411): NCBI GI NO: 13877871 NR Description: putative serine carboxypeptidase II

SEQ ID NO: 28199 - protein, 341 aa, Zea mays subsp. mays; identical to SEQ ID NO: 28175
  peptide (1)..(341): Ceres Seq. ID no. 13492639
  misc_feature (1)..(341): NCBI GI NO: 34895992 NR Description: putative carboxypeptidase D
  misc_feature (1)..(332): NCBI GI NO: 34908012 NR Description: putative carboxypeptidase D
  misc_feature (1)..(332): NCBI GI NO: 7428204 NR Description: carboxypeptidase D (EC 3
  misc_feature (1)..(332): NCBI GI NO: 20455471 NR Description: Serine carboxypeptidase II precursor
  misc_feature (1)..(332): NCBI GI NO: 15227493 NR Description: serine carboxypeptidase -related
  misc_feature (1)..(332): NCBI GI NO: 15231911 NR Description: serine carboxypeptidase -related
  misc_feature (19)..(341): NCBI GI NO: 2493493 NR Description: Serine carboxypeptidase II-1 precursor (CP-MII.1)
  misc_feature (1)..(332): NCBI GI NO: 7428205 NR Description: carboxypeptidase D (EC 3.4.16.6) - wheat
  misc_feature (1)..(338): NCBI GI NO: 18417667 NR Description: serine carboxypeptidase -related
  misc_feature (1)..(333): NCBI GI NO: 13877871 NR Description: putative serine carboxypeptidase II

SEQ ID NO: 28200 - DNA, 1449 bp, Zea mays subsp. mays
  misc_feature (1)..(1449): Ceres Seq. ID no. 12353868
ttttttttctactcccgcgcccctccgcgagctccctacccctcgcgctcacgccggcgacaagtttccgccagagttaggtagatcaggtgctgcgccggcagccgtggaagggatggaggacctcgcgagttcgcgtggcggcgggggatgcggtggtcttgatgcgcagatcgaacagctcatggagtgccgcccgctcccagagacggaggttaaaacactgtgtgagaaggccaaggagatattaatggaggaaagcaatgttcagccagttaaaagccctgtgacgatttgtggtgatattcatggccaattccatgatcttttagaacttttccggattggtgggaagtgtccagatacaaattatttgtttatgggtgattatgtggatcgtggctattactctgttgagacagtaacgcttttagttgcacttaaggtgcggtacccgcaacgcattacaattcttcgtggaaaccatgaaagtaggcagatcacacaggtgtatggcttctatgatgaatgcctacgaaaatatggcagtgcaaatgtctggaagatcttcactgatctttttgattattttccgttgacagcattggtggaatcagaaattttctgcctccatggtggtttatctccatccattgagaatcttgataacgttcgcagtttagaccgtgtccaagaggtccctcatgagggacctatgtgcgaccttctgtggtctgatccagacgatagatgtggctggggcatatctccacgtggtgctggatacacttttggccaagacatatcggagcagtttaatcacaccaacaatcttaaactcgtagctcgggctcaccagttggttatggagggatacaactgggcacatgaacaaaaggtggtgaccatattcagcgcacctaactactgttaccggtgcggcaacatggcgtccatcctcgaggtcgatgactgcaggaatcacacatttattcagtttgagccagctcctaggagaggtgaaccagacgtgacgcggaggacacctgattatttcctttgagttatctgccagaccatttttggaatttgcccaatgttggaatagtgatgctagccagtaacaatttttgttggatctatatgataacttaaccgaccagcaacagtaagaaaatgtggaagctgcatctgtcattgcaagaggtgctcgctaacagtaacaggtcgacgacctatacaccccaagctgtcaaaagatccgcttgtctacccaacccaccaagtggtgcctcccttgggctttgggacgtcgagtttacgctttcagcgtagagttgcctcagttctgtcttgtgtgtcagctagttttgtgtttgtgtcttgtgtggttgctcgttgtagcttctgtgattaaatgacaacagacaagctggtctcgagtgttgc

SEQ ID NO: 28201 - protein, 353 aa, Zea mays subsp. mays
  peptide (1)..(353): Ceres Seq. ID no. 12353869
  misc_feature (94)..(289): Pfam Name: Pfam Description:  Calcineurin-like phosphoesterase
  misc_feature (39)..(353): NCBI GI NO: 11134154 NR Description: Serine/threonine protein phosphatase PP2A-4catalytic subunit
  misc_feature (91)..(353): NCBI GI NO: 19071628 NR Description: serine/threonine protein phosphatase PP2A-4catalytic subunit
  misc_feature (39)..(97): NCBI GI NO: 19071628 NR Description: serine/threonine protein phosphatase PP2A-4catalytic subunit
  misc_feature (52)..(353): NCBI GI NO: 11134218 NR Description: Serine/threonine protein phosphatase PP2A-2catalytic subunit
  misc_feature (54)..(353): NCBI GI NO: 18410971 NR Description: protein phosphatase PP2A catalytic subunit
  misc_feature (54)..(353): NCBI GI NO: 418777 NR Description: phosphoprotein phosphatase (EC 3
  misc_feature (54)..(353): NCBI GI NO: 18405985 NR Description: protein phosphatase 2A
  misc_feature (54)..(353): NCBI GI NO: 548441 NR Description: SERINE/THREONINE PROTEIN PHOSPHATASE PP2A CATALYTICSUBUNIT
  misc_feature (54)..(353): NCBI GI NO: 7248363 NR Description: type 2A protein phosphatase-3 [Vicia faba]
  misc_feature (41)..(353): NCBI GI NO: 7435135 NR Description: phosphoprotein phosphatase (EC 3
FFSTPAPLRELPTPRAHAGDKFPPELGRSGAAPAAVEGMEDLASSRGGGGCGGLDAQIEQLMECRPLPETEVKTLCEKAKEILMEESNVQPVKSPVTICGDIHGQFHDLLELFRIGGKCPDTNYLFMGDYVDRGYYSVETVTLLVALKVRYPQRITILRGNHESRQITQVYGFYDECLRKYGSANVWKIFTDLFDYFPLTALVESEIFCLHGGLSPSIENLDNVRSLDRVQEVPHEGPMCDLLWSDPDDRCGWGISPRGAGYTFGQDISEQFNHTNNLKLVARAHQLVMEGYNWAHEQKVVTIFSAPNYCYRCGNMASILEVDDCRNHTFIQFEPAPRRGEPDVTRRTPDYFL

SEQ ID NO: 28202 - protein, 315 aa, Zea mays subsp. mays
  peptide (1)..(315): Ceres Seq. ID no. 12353870
  misc_feature (56)..(251): Pfam Name: Pfam Description:  Calcineurin-like phosphoesterase
  misc_feature (1)..(315): NCBI GI NO: 11134154 NR Description: Serine/threonine protein phosphatase PP2A-4catalytic subunit
  misc_feature (53)..(315): NCBI GI NO: 19071628 NR Description: serine/threonine protein phosphatase PP2A-4catalytic subunit
  misc_feature (1)..(59): NCBI GI NO: 19071628 NR Description: serine/threonine protein phosphatase PP2A-4catalytic subunit
  misc_feature (14)..(315): NCBI GI NO: 11134218 NR Description: Serine/threonine protein phosphatase PP2A-2catalytic subunit
  misc_feature (16)..(315): NCBI GI NO: 18410971 NR Description: protein phosphatase PP2A catalytic subunit
  misc_feature (16)..(315): NCBI GI NO: 418777 NR Description: phosphoprotein phosphatase (EC 3
  misc_feature (16)..(315): NCBI GI NO: 18405985 NR Description: protein phosphatase 2A
  misc_feature (16)..(315): NCBI GI NO: 548441 NR Description: SERINE/THREONINE PROTEIN PHOSPHATASE PP2A CATALYTICSUBUNIT
  misc_feature (16)..(315): NCBI GI NO: 7248363 NR Description: type 2A protein phosphatase-3 [Vicia faba]
  misc_feature (3)..(315): NCBI GI NO: 7435135 NR Description: phosphoprotein phosphatase (EC 3
MEDLASSRGGGGCGGLDAQIEQLMECRPLPETEVKTLCEKAKEILMEESNVQPVKSPVTICGDIHGQFHDLLELFRIGGKCPDTNYLFMGDYVDRGYYSVETVTLLVALKVRYPQRITILRGNHESRQITQVYGFYDECLRKYGSANVWKIFTDLFDYFPLTALVESEIFCLHGGLSPSIENLDNVRSLDRVQEVPHEGPMCDLLWSDPDDRCGWGISPRGAGYTFGQDISEQFNHTNNLKLVARAHQLVMEGYNWAHEQKVVTIFSAPNYCYRCGNMASILEVDDCRNHTFIQFEPAPRRGEPDVTRRTPDYFL

SEQ ID NO: 28203 - protein, 292 aa, Zea mays subsp. mays
  peptide (1)..(292): Ceres Seq. ID no. 12353871
  misc_feature (33)..(228): Pfam Name: Pfam Description:  Calcineurin-like phosphoesterase
  misc_feature (1)..(292): NCBI GI NO: 11134154 NR Description: Serine/threonine protein phosphatase PP2A-4catalytic subunit
  misc_feature (30)..(292): NCBI GI NO: 19071628 NR Description: serine/threonine protein phosphatase PP2A-4catalytic subunit
  misc_feature (1)..(36): NCBI GI NO: 19071628 NR Description: serine/threonine protein phosphatase PP2A-4catalytic subunit
  misc_feature (1)..(292): NCBI GI NO: 11134218 NR Description: Serine/threonine protein phosphatase PP2A-2catalytic subunit
  misc_feature (1)..(292): NCBI GI NO: 18410971 NR Description: protein phosphatase PP2A catalytic subunit
  misc_feature (1)..(292): NCBI GI NO: 418777 NR Description: phosphoprotein phosphatase (EC 3
  misc_feature (1)..(292): NCBI GI NO: 18405985 NR Description: protein phosphatase 2A
  misc_feature (1)..(292): NCBI GI NO: 548441 NR Description: SERINE/THREONINE PROTEIN PHOSPHATASE PP2A CATALYTICSUBUNIT
  misc_feature (1)..(292): NCBI GI NO: 7248363 NR Description: type 2A protein phosphatase-3 [Vicia faba]
  misc_feature (1)..(292): NCBI GI NO: 7435135 NR Description: phosphoprotein phosphatase (EC 3
MECRPLPETEVKTLCEKAKEILMEESNVQPVKSPVTICGDIHGQFHDLLELFRIGGKCPDTNYLFMGDYVDRGYYSVETVTLLVALKVRYPQRITILRGNHESRQITQVYGFYDECLRKYGSANVWKIFTDLFDYFPLTALVESEIFCLHGGLSPSIENLDNVRSLDRVQEVPHEGPMCDLLWSDPDDRCGWGISPRGAGYTFGQDISEQFNHTNNLKLVARAHQLVMEGYNWAHEQKVVTIFSAPNYCYRCGNMASILEVDDCRNHTFIQFEPAPRRGEPDVTRRTPDYFL

SEQ ID NO: 28204 - DNA, 749 bp, Zea mays subsp. mays
  misc_feature (1)..(749): Ceres Seq. ID no. 12344461
atctcttctttcccctctccctcccctcgccgtcgctgtcgtcgccgtccgtgctagccatggatctaggcgctcccgctcgacggcgcttaccgatccgcctcttgctggtgtcgctcgccgtcctcatggtcctcaccgcgcgttccagtgccgaagtcatcaccctcaccgaagagaccttctccgacaagataaaggagaaggacacggtgtggtttgtgcagttctgcgtcccctggtgtaaacactgcaagaaccttggaacactatgggaggacctgggaaaggttatggaaggtgcggatgaaattgagattgggcaagttgactgtggtgtcagcaaaccagtatgctcaaaggtcgatatacactcctacccaacattcaaggtgttttatgaaggcgaagaagtagtaaaatataaaggacctaggaatgtggaatcgctgaagaacttcgtgttgaatgaagctgagaaagcaggtgaggcaaagcttcaagctgattgaggcaggggagtttcagcaagcatgtggcgtagacaaggaacaatgctgtgcaacattgtcttctatcctgtcatttacaaagccaatttacaggaaagaaatgatcttatgaccccgtatcagagtattcctcttcgaaagtaactccgaatcagttcatagaagctgtactccattccatagtttttatcacattgacaaactccgaatcagttaatagaagctgtactccattcg

SEQ ID NO: 28205 - protein, 169 aa, Zea mays subsp. mays
  peptide (1)..(169): Ceres Seq. ID no. 12344462
  misc_feature (52)..(159): Pfam Name: Pfam Description:  Thioredoxin
  misc_feature (20)..(167): NCBI GI NO: 15223058 NR Description: unknown protein; protein id: At1g07960.1
  misc_feature (20)..(155): NCBI GI NO: 1532175 NR Description: similar to protein disulfide isomerase
  misc_feature (64)..(167): NCBI GI NO: 8778824 NR Description: T6D22.5 [Arabidopsis thaliana]
  misc_feature (53)..(159): NCBI GI NO: 19353593 NR Description: Unknown (protein for MGC:37456) [Mus musculus]
  misc_feature (53)..(159): NCBI GI NO: 21703732 NR Description: similar to thioredoxin related protein
  misc_feature (53)..(159): NCBI GI NO: 37574006 NR Description: Txndc5 protein [Mus musculus]
  misc_feature (53)..(159): NCBI GI NO: 29839593 NR Description: Thioredoxin domain containing protein 5 precursor
  misc_feature (53)..(159): NCBI GI NO: 34875200 NR Description: similar to expressed sequence AL022641
  misc_feature (44)..(159): NCBI GI NO: 13540604 NR Description: thioredoxin related protein [Homo sapiens]
  misc_feature (44)..(159): NCBI GI NO: 21740140 NR Description: hypothetical protein [Homo sapiens]
LFFPLSLPSPSLSSPSVLAMDLGAPARRRLPIRLLLVSLAVLMVLTARSSAEVITLTEETFSDKIKEKDTVWFVQFCVPWCKHCKNLGTLWEDLGKVMEGADEIEIGQVDCGVSKPVCSKVDIHSYPTFKVFYEGEEVVKYKGPRNVESLKNFVLNEAEKAGEAKLQAD

SEQ ID NO: 28206 - protein, 150 aa, Zea mays subsp. mays
  peptide (1)..(150): Ceres Seq. ID no. 12344463
  misc_feature (33)..(140): Pfam Name: Pfam Description:  Thioredoxin
  misc_feature (1)..(148): NCBI GI NO: 15223058 NR Description: unknown protein; protein id: At1g07960.1
  misc_feature (1)..(136): NCBI GI NO: 1532175 NR Description: similar to protein disulfide isomerase
  misc_feature (45)..(148): NCBI GI NO: 8778824 NR Description: T6D22.5 [Arabidopsis thaliana]
  misc_feature (34)..(140): NCBI GI NO: 19353593 NR Description: Unknown (protein for MGC:37456) [Mus musculus]
  misc_feature (34)..(140): NCBI GI NO: 21703732 NR Description: similar to thioredoxin related protein
  misc_feature (34)..(140): NCBI GI NO: 37574006 NR Description: Txndc5 protein [Mus musculus]
  misc_feature (34)..(140): NCBI GI NO: 29839593 NR Description: Thioredoxin domain containing protein 5 precursor
  misc_feature (34)..(140): NCBI GI NO: 34875200 NR Description: similar to expressed sequence AL022641
  misc_feature (25)..(140): NCBI GI NO: 13540604 NR Description: thioredoxin related protein [Homo sapiens]
  misc_feature (25)..(140): NCBI GI NO: 21740140 NR Description: hypothetical protein [Homo sapiens]
MDLGAPARRRLPIRLLLVSLAVLMVLTARSSAEVITLTEETFSDKIKEKDTVWFVQFCVPWCKHCKNLGTLWEDLGKVMEGADEIEIGQVDCGVSKPVCSKVDIHSYPTFKVFYEGEEVVKYKGPRNVESLKNFVLNEAEKAGEAKLQAD

SEQ ID NO: 28207 - protein, 127 aa, Zea mays subsp. mays
  peptide (1)..(127): Ceres Seq. ID no. 12344464
  misc_feature (10)..(117): Pfam Name: Pfam Description:  Thioredoxin
  misc_feature (1)..(125): NCBI GI NO: 15223058 NR Description: unknown protein; protein id: At1g07960.1
  misc_feature (1)..(113): NCBI GI NO: 1532175 NR Description: similar to protein disulfide isomerase
  misc_feature (22)..(125): NCBI GI NO: 8778824 NR Description: T6D22.5 [Arabidopsis thaliana]
  misc_feature (11)..(117): NCBI GI NO: 19353593 NR Description: Unknown (protein for MGC:37456) [Mus musculus]
  misc_feature (11)..(117): NCBI GI NO: 21703732 NR Description: similar to thioredoxin related protein
  misc_feature (11)..(117): NCBI GI NO: 37574006 NR Description: Txndc5 protein [Mus musculus]
  misc_feature (11)..(117): NCBI GI NO: 29839593 NR Description: Thioredoxin domain containing protein 5 precursor
  misc_feature (11)..(117): NCBI GI NO: 34875200 NR Description: similar to expressed sequence AL022641
  misc_feature (2)..(117): NCBI GI NO: 13540604 NR Description: thioredoxin related protein [Homo sapiens]
  misc_feature (2)..(117): NCBI GI NO: 21740140 NR Description: hypothetical protein [Homo sapiens]
MVLTARSSAEVITLTEETFSDKIKEKDTVWFVQFCVPWCKHCKNLGTLWEDLGKVMEGADEIEIGQVDCGVSKPVCSKVDIHSYPTFKVFYEGEEVVKYKGPRNVESLKNFVLNEAEKAGEAKLQAD

SEQ ID NO: 28208 - DNA, 1319 bp, Zea mays subsp. mays
  misc_feature (1)..(1319): Ceres Seq. ID no. 12594090
atcaatcctccggacctccgtcctttataaaccgccggggagcgtggcggccattcgacgcaggcaccccagcagctcttgcggtcgtccctcagccgcgtcgcaccgcatcgcattctacgattcgaagctctctgctcgcaggggaccatggcgaagaactacccaaccgtgagcgccgagtacagcgaggccgtcgagaaggccaggcgcaagctccgcgccctcatcgccgagaagagctgcgcacccctcatgctccgcctcgcgtggcactccgcggggacgttcgacgtgtcgtcgaggaccggcggtcccttcggtactatgaagtgcccggcggaactggctcacggcgccaacgcggggctggacatcgcggtgcggctgctcgagcccatcaaggaggagttccccaccctctcctatgccgacttctaccagcttgccggagttgtggccgtcgaggtcaccggtgggcctgagatccccttccacccaggcagggaggacaagcctcagccgccacctgagggccgtcttcctgatgccaccaagggttctgaccacctgaggcaagtctttggcaagcagatgggtttgagtgatcaggacatcgttgccctctctggtggccacaccttgggaaggtgccacaaagagcggtctggttttgagggtgcctggactacgaaccctttggtctttgacaactcttacttcaaggaacttctgagtggtgacaaggagggccttcttcagctcccaagtgacaaagccctgctgagcgaccctgtcttccgccctcttgtggagaaatatgctgcagatgagaaggcattctttgatgactacaaagaggcccacctcaagctctccgaactggggtatgctgatgcttaaatggtccatatcctggagcgggacacaaactgctgcctgtatggactcgtgcgattcagggtgaaccatcagattgtctagtgtcttctctgtaataaatttatctgttcttggtactttgtctatggttgaatcggaacccattttccgtttgcctagattcttaatttctggtgctgtatccagctgaaactagtagatctatgatcttgtggctgcagcatgttcttgtcacttaccttttatctggtctccgttggttcggttcacaggttgtgtgctttaaaaggctgtgcttaagtcctgcaattcgagtccaccaaactgtagggtgcaagtcgagattttattagtgatgcaagttgctggtattggtgcattatcgggctaatacgcttgcgttgccttcggatttt

SEQ ID NO: 28209 - protein, 250 aa, Zea mays subsp. mays
  peptide (1)..(250): Ceres Seq. ID no. 12594091
  misc_feature (19)..(227): Pfam Name: Pfam Description:  Peroxidase
  misc_feature (1)..(250): NCBI GI NO: 7489542 NR Description: L-ascorbate peroxidase (EC 1.11.1.11)
  misc_feature (1)..(250): NCBI GI NO: 3688398 NR Description: ascorbate peroxidase
  misc_feature (2)..(250): NCBI GI NO: 15808779 NR Description: ascorbate peroxidase [Hordeum vulgare]
  misc_feature (1)..(250): NCBI GI NO: 1420938 NR Description: ascorbate peroxidase [Vigna unguiculata]
  misc_feature (1)..(249): NCBI GI NO: 2997688 NR Description: ascorbate peroxidase [Zantedeschia aethiopica]
  misc_feature (1)..(250): NCBI GI NO: 4406539 NR Description: ascorbate peroxidase [Glycine max]
  misc_feature (1)..(250): NCBI GI NO: 1076800 NR Description: L-ascorbate peroxidase (EC 1
  misc_feature (1)..(250): NCBI GI NO: 7488687 NR Description: L-ascorbate peroxidase (EC 1.11.1.11) 2 - soybean
  misc_feature (1)..(250): NCBI GI NO: 18265379 NR Description: ascorbate peroxidase [Brassica oleracea]
  misc_feature (1)..(250): NCBI GI NO: 7484672 NR Description: L-ascorbate peroxidase (EC 1.11.1.11) - spinach
MAKNYPTVSAEYSEAVEKARRKLRALIAEKSCAPLMLRLAWHSAGTFDVSSRTGGPFGTMKCPAELAHGANAGLDIAVRLLEPIKEEFPTLSYADFYQLAGVVAVEVTGGPEIPFHPGREDKPQPPPEGRLPDATKGSDHLRQVFGKQMGLSDQDIVALSGGHTLGRCHKERSGFEGAWTTNPLVFDNSYFKELLSGDKEGLLQLPSDKALLSDPVFRPLVEKYAADEKAFFDDYKEAHLKLSELGYADA

SEQ ID NO: 28210 - protein, 215 aa, Zea mays subsp. mays
  peptide (1)..(215): Ceres Seq. ID no. 12594092
  misc_feature (1)..(192): Pfam Name: Pfam Description:  Peroxidase
  misc_feature (1)..(215): NCBI GI NO: 7489542 NR Description: L-ascorbate peroxidase (EC 1.11.1.11)
  misc_feature (1)..(215): NCBI GI NO: 3688398 NR Description: ascorbate peroxidase
  misc_feature (1)..(215): NCBI GI NO: 15808779 NR Description: ascorbate peroxidase [Hordeum vulgare]
  misc_feature (1)..(215): NCBI GI NO: 1420938 NR Description: ascorbate peroxidase [Vigna unguiculata]
  misc_feature (1)..(214): NCBI GI NO: 2997688 NR Description: ascorbate peroxidase [Zantedeschia aethiopica]
  misc_feature (1)..(215): NCBI GI NO: 4406539 NR Description: ascorbate peroxidase [Glycine max]
  misc_feature (1)..(215): NCBI GI NO: 1076800 NR Description: L-ascorbate peroxidase (EC 1
  misc_feature (1)..(215): NCBI GI NO: 7488687 NR Description: L-ascorbate peroxidase (EC 1.11.1.11) 2 - soybean
  misc_feature (1)..(215): NCBI GI NO: 18265379 NR Description: ascorbate peroxidase [Brassica oleracea]
  misc_feature (1)..(215): NCBI GI NO: 7484672 NR Description: L-ascorbate peroxidase (EC 1.11.1.11) - spinach
MLRLAWHSAGTFDVSSRTGGPFGTMKCPAELAHGANAGLDIAVRLLEPIKEEFPTLSYADFYQLAGVVAVEVTGGPEIPFHPGREDKPQPPPEGRLPDATKGSDHLRQVFGKQMGLSDQDIVALSGGHTLGRCHKERSGFEGAWTTNPLVFDNSYFKELLSGDKEGLLQLPSDKALLSDPVFRPLVEKYAADEKAFFDDYKEAHLKLSELGYADA

SEQ ID NO: 28211 - protein, 191 aa, Zea mays subsp. mays
  peptide (1)..(191): Ceres Seq. ID no. 12594093
  misc_feature (1)..(168): Pfam Name: Pfam Description:  Peroxidase
  misc_feature (1)..(191): NCBI GI NO: 7489542 NR Description: L-ascorbate peroxidase (EC 1.11.1.11)
  misc_feature (1)..(191): NCBI GI NO: 3688398 NR Description: ascorbate peroxidase
  misc_feature (1)..(191): NCBI GI NO: 15808779 NR Description: ascorbate peroxidase [Hordeum vulgare]
  misc_feature (1)..(191): NCBI GI NO: 1420938 NR Description: ascorbate peroxidase [Vigna unguiculata]
  misc_feature (1)..(190): NCBI GI NO: 2997688 NR Description: ascorbate peroxidase [Zantedeschia aethiopica]
  misc_feature (1)..(191): NCBI GI NO: 4406539 NR Description: ascorbate peroxidase [Glycine max]
  misc_feature (1)..(191): NCBI GI NO: 1076800 NR Description: L-ascorbate peroxidase (EC 1
  misc_feature (1)..(191): NCBI GI NO: 7488687 NR Description: L-ascorbate peroxidase (EC 1.11.1.11) 2 - soybean
  misc_feature (1)..(191): NCBI GI NO: 18265379 NR Description: ascorbate peroxidase [Brassica oleracea]
  misc_feature (1)..(191): NCBI GI NO: 7484672 NR Description: L-ascorbate peroxidase (EC 1.11.1.11) - spinach
MKCPAELAHGANAGLDIAVRLLEPIKEEFPTLSYADFYQLAGVVAVEVTGGPEIPFHPGREDKPQPPPEGRLPDATKGSDHLRQVFGKQMGLSDQDIVALSGGHTLGRCHKERSGFEGAWTTNPLVFDNSYFKELLSGDKEGLLQLPSDKALLSDPVFRPLVEKYAADEKAFFDDYKEAHLKLSELGYADA

SEQ ID NO: 28212 - DNA, 1825 bp, Zea mays subsp. mays
  misc_feature (1)..(1825): Ceres Seq. ID no. 12367918
accacacacgcgcgcagctgtggcgcagggggggcgcggcaatggacgccaacactctcctcctgccctgctccgacggcgccgtcgccggcgcggtggacttccgcgggcgccccgcgtcccggtccggcaccggccgatggtccgccgcgatgttcgtcctcggggtggagatagcggagaggttcgcgtaccacggggtgtcggcgaacctgatcagctacctgacggggccgctcggggaatccaccgcgggcgcggcggctgcgatcaacgcgtggagcggggtgtcgaccatgctgccgctgctgatggcgtgtgtggccgacgcctggctcgggcggtaccgcaccatcgtcctcgcctccctcctcttcgtcgtgagcatgggcatgctgaccgtctccgcgctcccggcgttccaccacgacggctgcagcagctacgcctccgcctccagaccgctggcctgctccccgccccccgtgcaagtgggcgtcttctacgtctccctgtacctggtggcgctcgcggaggccgggcacaagccctgcgcgcaggcgttcggcgcggaccagttcgaccagaacgaccccaaggagtccgcgtccaggagctccttcttcaactggtggtacttcggcatgtgctccggcaccgccgtcaccaccctggtgtccagctacatccaggacaacgtcggctggggcctcggcttcggcgtcccctgcctcgtcatgctcttcgcgctcctcatgttcttgctcggtaccaggaattaccgctactacacgtctactgaatcgagcccatttgctcgcctcgccacagctttcgttgcgctcatcaaaggctccaaatcgagacaacatgacggcactcttgcgagcgacgacgccgggcaccgtgaagaagtgaaaggcgtgctgcgcctgttccccatctgggcgacgtgcatcatctacgccgtcatcttctcgcagtcgtccacgttcttcacgaagcaggccgcgacgctggaccggcgggtcggctcgactctgcgcgtgccgccggcggcgctgcagacgttcatcagtgtgaccatcatggccttcatcccggtctacgaccgcgcgttcgtgccccttgcgcggcggcttacgcgcctctcgtccggtatcaccatgctgcagcggatcggcacggggctcgtcctggccctggttgccatggtcgtggcggcgctggtggagatgcggcggctcgccgtggcgagggacgccggtctcgtggaccagcccaaggcggcgctgccgatgagcctgtggtggatggtcccgcagtacgtgctgttcgggctctccgacgtgttcgccatgatcggcctgcaggagttcttctacgaccaggtccccgacgcgctgcgcagcctcgggctggccttctttctcagcatctttcggcgtaggacacttgttcagcagcttcatcatctccgccatcgacggtgccaccaagaagagcggagcgagctggttctccaacaacctcaatcgcgcgcacctcgactacttctactggctgctcgccgggctctgcgccgtggagttggctgctttcatcatcgtctcgcgcgtttacgtgtacaagaagaggatgtctcacgacaataatgctgctgccatgtagatcagtagacgtgacttttaccgtgctgtgaatggcgatacaatatgattgaggtgtagagaaagagaacgaaaaaaccttttgtacgctaaacctggacactaaactgacttttacggacggtcggcaatcggcataatagtgccggtttgtt

SEQ ID NO: 28213 - protein, 550 aa, Zea mays subsp. mays
  peptide (1)..(550): Ceres Seq. ID no. 12367919
  misc_feature (128)..(480): Pfam Name: Pfam Description:  POT family
  misc_feature (128)..(480): NCBI GI NO: 34908688 NR Description: P0039A07.25
  misc_feature (12)..(127): NCBI GI NO: 34908688 NR Description: P0039A07.25
  misc_feature (28)..(291): NCBI GI NO: 18086410 NR Description: At1g72120/F28P5_2 [Arabidopsis thaliana]
  misc_feature (280)..(489): NCBI GI NO: 18086410 NR Description: At1g72120/F28P5_2 [Arabidopsis thaliana]
  misc_feature (25)..(309): NCBI GI NO: 15219905 NR Description: peptide transporter, putative
  misc_feature (25)..(309): NCBI GI NO: 28416707 NR Description: At1g22550 [Arabidopsis thaliana]
  misc_feature (303)..(478): NCBI GI NO: 15219905 NR Description: peptide transporter, putative
  misc_feature (303)..(478): NCBI GI NO: 28416707 NR Description: At1g22550 [Arabidopsis thaliana]
  misc_feature (28)..(291): NCBI GI NO: 15218352 NR Description: oligopeptide transporter, putative
  misc_feature (280)..(489): NCBI GI NO: 15218352 NR Description: oligopeptide transporter, putative
HTRAQLWRRGGAAMDANTLLLPCSDGAVAGAVDFRGRPASRSGTGRWSAAMFVLGVEIAERFAYHGVSANLISYLTGPLGESTAGAAAAINAWSGVSTMLPLLMACVADAWLGRYRTIVLASLLFVVSMGMLTVSALPAFHHDGCSSYASASRPLACSPPPVQVGVFYVSLYLVALAEAGHKPCAQAFGADQFDQNDPKESASRSSFFNWWYFGMCSGTAVTTLVSSYIQDNVGWGLGFGVPCLVMLFALLMFLLGTRNYRYYTSTESSPFARLATAFVALIKGSKSRQHDGTLASDDAGHREEVKGVLRLFPIWATCIIYAVIFSQSSTFFTKQAATLDRRVGSTLRVPPAALQTFISVTIMAFIPVYDRAFVPLARRLTRLSSGITMLQRIGTGLVLALVAMVVAALVEMRRLAVARDAGLVDQPKAALPMSLWWMVPQYVLFGLSDVFAMIGLQEFFYDQVPDALRSLGLAFFLSIFRRRTLVQQLHHLRHRRCHQEERSELVLQQPQSRAPRLLLLAARRALRRGVGCFHHRLARLRVQEEDVSRQ

SEQ ID NO: 28214 - protein, 537 aa, Zea mays subsp. mays
  peptide (1)..(537): Ceres Seq. ID no. 12367920
  misc_feature (115)..(467): Pfam Name: Pfam Description:  POT family
  misc_feature (115)..(467): NCBI GI NO: 34908688 NR Description: P0039A07.25
  misc_feature (1)..(114): NCBI GI NO: 34908688 NR Description: P0039A07.25
  misc_feature (15)..(278): NCBI GI NO: 18086410 NR Description: At1g72120/F28P5_2 [Arabidopsis thaliana]
  misc_feature (267)..(476): NCBI GI NO: 18086410 NR Description: At1g72120/F28P5_2 [Arabidopsis thaliana]
  misc_feature (12)..(296): NCBI GI NO: 15219905 NR Description: peptide transporter, putative
  misc_feature (12)..(296): NCBI GI NO: 28416707 NR Description: At1g22550 [Arabidopsis thaliana]
  misc_feature (290)..(465): NCBI GI NO: 15219905 NR Description: peptide transporter, putative
  misc_feature (290)..(465): NCBI GI NO: 28416707 NR Description: At1g22550 [Arabidopsis thaliana]
  misc_feature (15)..(278): NCBI GI NO: 15218352 NR Description: oligopeptide transporter, putative
  misc_feature (267)..(476): NCBI GI NO: 15218352 NR Description: oligopeptide transporter, putative
MDANTLLLPCSDGAVAGAVDFRGRPASRSGTGRWSAAMFVLGVEIAERFAYHGVSANLISYLTGPLGESTAGAAAAINAWSGVSTMLPLLMACVADAWLGRYRTIVLASLLFVVSMGMLTVSALPAFHHDGCSSYASASRPLACSPPPVQVGVFYVSLYLVALAEAGHKPCAQAFGADQFDQNDPKESASRSSFFNWWYFGMCSGTAVTTLVSSYIQDNVGWGLGFGVPCLVMLFALLMFLLGTRNYRYYTSTESSPFARLATAFVALIKGSKSRQHDGTLASDDAGHREEVKGVLRLFPIWATCIIYAVIFSQSSTFFTKQAATLDRRVGSTLRVPPAALQTFISVTIMAFIPVYDRAFVPLARRLTRLSSGITMLQRIGTGLVLALVAMVVAALVEMRRLAVARDAGLVDQPKAALPMSLWWMVPQYVLFGLSDVFAMIGLQEFFYDQVPDALRSLGLAFFLSIFRRRTLVQQLHHLRHRRCHQEERSELVLQQPQSRAPRLLLLAARRALRRGVGCFHHRLARLRVQEEDVSRQ

SEQ ID NO: 28215 - protein, 500 aa, Zea mays subsp. mays
  peptide (1)..(500): Ceres Seq. ID no. 12367921
  misc_feature (78)..(430): Pfam Name: Pfam Description:  POT family
  misc_feature (78)..(430): NCBI GI NO: 34908688 NR Description: P0039A07.25
  misc_feature (1)..(77): NCBI GI NO: 34908688 NR Description: P0039A07.25
  misc_feature (1)..(241): NCBI GI NO: 18086410 NR Description: At1g72120/F28P5_2 [Arabidopsis thaliana]
  misc_feature (230)..(439): NCBI GI NO: 18086410 NR Description: At1g72120/F28P5_2 [Arabidopsis thaliana]
  misc_feature (1)..(259): NCBI GI NO: 15219905 NR Description: peptide transporter, putative
  misc_feature (1)..(259): NCBI GI NO: 28416707 NR Description: At1g22550 [Arabidopsis thaliana]
  misc_feature (253)..(428): NCBI GI NO: 15219905 NR Description: peptide transporter, putative
  misc_feature (253)..(428): NCBI GI NO: 28416707 NR Description: At1g22550 [Arabidopsis thaliana]
  misc_feature (1)..(241): NCBI GI NO: 15218352 NR Description: oligopeptide transporter, putative
  misc_feature (230)..(439): NCBI GI NO: 15218352 NR Description: oligopeptide transporter, putative
MFVLGVEIAERFAYHGVSANLISYLTGPLGESTAGAAAAINAWSGVSTMLPLLMACVADAWLGRYRTIVLASLLFVVSMGMLTVSALPAFHHDGCSSYASASRPLACSPPPVQVGVFYVSLYLVALAEAGHKPCAQAFGADQFDQNDPKESASRSSFFNWWYFGMCSGTAVTTLVSSYIQDNVGWGLGFGVPCLVMLFALLMFLLGTRNYRYYTSTESSPFARLATAFVALIKGSKSRQHDGTLASDDAGHREEVKGVLRLFPIWATCIIYAVIFSQSSTFFTKQAATLDRRVGSTLRVPPAALQTFISVTIMAFIPVYDRAFVPLARRLTRLSSGITMLQRIGTGLVLALVAMVVAALVEMRRLAVARDAGLVDQPKAALPMSLWWMVPQYVLFGLSDVFAMIGLQEFFYDQVPDALRSLGLAFFLSIFRRRTLVQQLHHLRHRRCHQEERSELVLQQPQSRAPRLLLLAARRALRRGVGCFHHRLARLRVQEEDVSRQ

SEQ ID NO: 28216 - DNA, 1338 bp, Zea mays subsp. mays
  misc_feature (1)..(1338): Ceres Seq. ID no. 12349185
gacagggtgactccgtgaccgtgagtgcctacccgccgaccgcacgaaccccactcggtcggtcactcccagtctccatctcccactacggcactaccccatccccggtgcggcgccaccttcccggcttccccttccggccttccccctctcgtcacttatggtgcccagccgctcgctgcgcaactactagcgcaccgtcccctcctcagccatggccgcggcgtcgttcgcccgcgccttatgtctccacatgctcctcctcttcctcgtggttggctcggcgcgctgcaagacggtgaagagagacgtgaaagcattgaatgagatcaaatcttcactaggctggagagttgtatactcatgggtcggtgatgatccttgtgggcatggtgatctacccccctggtctggtgtgacatgttctcagcaaggggattacagagttgtgacggaactggaagtctatgctgtatcaatagttggccctttcccaacagcagtaactaacctgttggatctaagaagattggatctccacaataacaagttgacaggaccaattcccccacagattggacggttgaaacatctcaggatattgaacctgaggtggaataagcttcaagatgtgcttccacctgaaattggtgaactgaagaaactgacacacttgtatttgagcttcaacaacttcaaaggcgagattccagtggagcttgcaaacctgccagaactccgttacctttatcttcacgagaaccgcttcaccgggcgaatcccccctgaacttggaacgctaaagaacctacgtcacctcgacgtgggcaacaaccacctgacaggcactctcagggattttatcggcaacgggaacggcttcccgtccctgagaaatctataccttaacaacaatgagctgactggtgtgctgccagaccagattgcaaacctgacaaaccttgagattctgcacttgtccaataacaagatgatcgggtcgatatcgcctaagctagttcacattccaaggctgatctacttgtacttggacaataacaacttcattgggaggataccggaagggttgtacaggcatccatttctgaaggagctgtacatcgaaggaaaccacttcagaccaggaaccagatcgaagggaacgcacaaggtgctggaactgcctgacgccgacattctagtctagcaagctcgtttaggggacctgaggtcttggcgtcctgcagtagtagactgctgccggtaccaggatcacttctgtctgtcgctgtactattccgtggcaaaactacagttgagaaaaaaaaattctctttg

SEQ ID NO: 28217 - protein, 330 aa, Zea mays subsp. mays
  peptide (1)..(330): Ceres Seq. ID no. 12349186
  misc_feature (102)..(125): Pfam Name: Pfam Description:  Leucine Rich Repeat
  misc_feature (4)..(330): NCBI GI NO: 14626935 NR Description: leucine-rich repeat resistance protein-like protein
  misc_feature (12)..(330): NCBI GI NO: 9757845 NR Description: leucine-rich repeat disease resistance protein-like
  misc_feature (1)..(330): NCBI GI NO: 15222979 NR Description: disease resistance protein, putative
  misc_feature (5)..(330): NCBI GI NO: 25402771 NR Description: protein F16A14.12
  misc_feature (131)..(330): NCBI GI NO: 15240186 NR Description: Cf-5 disease resistance protein - like
  misc_feature (12)..(308): NCBI GI NO: 15240186 NR Description: Cf-5 disease resistance protein - like
  misc_feature (32)..(325): NCBI GI NO: 7489446 NR Description: protein kinase Xa21 (EC 2
  misc_feature (10)..(308): NCBI GI NO: 34895840 NR Description: putative protein kinase Xa21
  misc_feature (13)..(308): NCBI GI NO: 34895902 NR Description: putative protein kinase Xa21
  misc_feature (66)..(322): NCBI GI NO: 3894383 NR Description: disease resistance protein
MAAASFARALCLHMLLLFLVVGSARCKTVKRDVKALNEIKSSLGWRVVYSWVGDDPCGHGDLPPWSGVTCSQQGDYRVVTELEVYAVSIVGPFPTAVTNLLDLRRLDLHNNKLTGPIPPQIGRLKHLRILNLRWNKLQDVLPPEIGELKKLTHLYLSFNNFKGEIPVELANLPELRYLYLHENRFTGRIPPELGTLKNLRHLDVGNNHLTGTLRDFIGNGNGFPSLRNLYLNNNELTGVLPDQIANLTNLEILHLSNNKMIGSISPKLVHIPRLIYLYLDNNNFIGRIPEGLYRHPFLKELYIEGNHFRPGTRSKGTHKVLELPDADILV

SEQ ID NO: 28218 - protein, 317 aa, Zea mays subsp. mays
  peptide (1)..(317): Ceres Seq. ID no. 12349187
  misc_feature (89)..(112): Pfam Name: Pfam Description:  Leucine Rich Repeat
  misc_feature (1)..(317): NCBI GI NO: 14626935 NR Description: leucine-rich repeat resistance protein-like protein
  misc_feature (1)..(317): NCBI GI NO: 9757845 NR Description: leucine-rich repeat disease resistance protein-like
  misc_feature (1)..(317): NCBI GI NO: 15222979 NR Description: disease resistance protein, putative
  misc_feature (1)..(317): NCBI GI NO: 25402771 NR Description: protein F16A14.12
  misc_feature (118)..(317): NCBI GI NO: 15240186 NR Description: Cf-5 disease resistance protein - like
  misc_feature (1)..(295): NCBI GI NO: 15240186 NR Description: Cf-5 disease resistance protein - like
  misc_feature (19)..(312): NCBI GI NO: 7489446 NR Description: protein kinase Xa21 (EC 2
  misc_feature (1)..(295): NCBI GI NO: 34895840 NR Description: putative protein kinase Xa21
  misc_feature (1)..(295): NCBI GI NO: 34895902 NR Description: putative protein kinase Xa21
  misc_feature (53)..(309): NCBI GI NO: 3894383 NR Description: disease resistance protein
MLLLFLVVGSARCKTVKRDVKALNEIKSSLGWRVVYSWVGDDPCGHGDLPPWSGVTCSQQGDYRVVTELEVYAVSIVGPFPTAVTNLLDLRRLDLHNNKLTGPIPPQIGRLKHLRILNLRWNKLQDVLPPEIGELKKLTHLYLSFNNFKGEIPVELANLPELRYLYLHENRFTGRIPPELGTLKNLRHLDVGNNHLTGTLRDFIGNGNGFPSLRNLYLNNNELTGVLPDQIANLTNLEILHLSNNKMIGSISPKLVHIPRLIYLYLDNNNFIGRIPEGLYRHPFLKELYIEGNHFRPGTRSKGTHKVLELPDADILV

SEQ ID NO: 28219 - DNA, 2059 bp, Zea mays subsp. mays
  misc_feature (1)..(2059): Ceres Seq. ID no. 12365570
cgtgttcttaggcttcgctgcccctaccgcgtcttcgccgggatcggtccatggccggcgccgagcgcgcggaggcggtcgcgctggaacaagggctcctcgatccggaggaatccaaccaagtagtatacactggagatggatcagtcgacttttctggaaatcctgttgtcaaggaaagaacgggtagatggaaggcatgtccattcatattaggtaatgaatgctgtgaacgactggcctactatggcatctccacaaaccttgttacttacttgacaaaaaaactgcatgctggcaatgcctctgctgctagcagtgtgactacatggtcgggaacttgctacctaactccacttattggagcaatcctggctgatgcatactgggggaggtactggacaatcgcaacattttccacagtatacttcatcgggatgacactgctgactctttcagcatcagttcctatgctcatgcctccatcttgtgaaggatccttttgcccagcagcaagcccttttcagtatactgtcttttttcttggtctttatctgattgccctgggtactggtggaattaagccgtgtgtctcatcctttggagcggatcaatttgatgatacagatccagctgagcgaatccagaagggctctttcttcaattggttttatttttcaataaacattggtgctctcatatcaagcagctttctggtttgggtgcaagacaatgtaggatggggactggggtttggcattccgactgtattcatggggctggcaatcataagcttcttctctggtacatcactttataggttccaaaaaccaggaggtagtccaattacacgagtatgtcaggtgattgttgcctctttgcgcaagtggaatgtgcctgtcccagaggatagctctctcttgtatgagctacctaatggggtatcaacaattgaggggagtcggcaaatagagcacacagatgaactcagatgtttagataaggctgctacagttaccgaagttgatgtgaaaacggctgacttcaacaacccatggcggatatgcactgtcacccaggtggaagaactgaagatactagtaaggatgttccctgtctgggcaacaacaatagtgttttctgctgtatatgctcagatgtcaacaatgtttgtggaaacaagggatggtgcttgacccatccttgggctctttcaagatccctccagcttcactatctactttcgacaccctaagtgtcatcatatgtgtcccgatgtatgattacatcgtggttccgatagccaggagattcactggcaacgagaggggctttacagagttgcagaggatgggtattggcctggtaatttccatcatggctatgtcagtcgccgcagtcctcgaaatcaagcggctagcagttgccagggaagcacacctggtggatcagaatgtcccggtcccactgagcatattctggcaaatccctcagtatttcctgattggtctagcggagattttcacattcattggggcgctcgagttcttctatgaccagtcaccagacgccatgaggagcctctgcagcgcgcttaatcttctcactactgcgtttgggaactatctcagcacgttcattttgacaatggttgcgtactttactacgaggggaggtaaccctgggtggattcctgacaacttgaacgaaggccatcttgattacttcttcttgctcatcgctggcatcagttttctgaacctgattgtttatgtcctctgtgctggcaaatacaagagcaagaaggcagcttgagttgtgaaggccaggggctggatggcgtgctgcgcgccatgttatggtggacacttcagttcaaaatctgtatatatgtttcccgcattaaccaccctagctgaagcaaccatctgcaattgttgcaaagtttatattcttcattgtgctggactaagttgattatacattcgtgcttctactttgtgtatgtatatatctgacctaaagttgctgaacatagacaatttcacttgcctctggc

SEQ ID NO: 28220 - protein, 381 aa, Zea mays subsp. mays
  peptide (1)..(381): Ceres Seq. ID no. 12365571
  misc_feature (116)..(381): Pfam Name: Pfam Description:  POT family
  misc_feature (4)..(376): NCBI GI NO: 15076661 NR Description: peptide transporter
  misc_feature (15)..(381): NCBI GI NO: 4102839 NR Description: LeOPT1 [Lycopersicon esculentum]
  misc_feature (3)..(381): NCBI GI NO: 31088360 NR Description: peptide transporter 1 [Vicia faba]
  misc_feature (1)..(381): NCBI GI NO: 15226861 NR Description: histidine transport protein
  misc_feature (3)..(381): NCBI GI NO: 6635838 NR Description: amino acid/peptide transporter [Prunus dulcis]
  misc_feature (1)..(381): NCBI GI NO: 1076331 NR Description: histidine transport protein - Arabidopsis thaliana
  misc_feature (12)..(381): NCBI GI NO: 30696666 NR Description: oligopeptide transporter -related
  misc_feature (28)..(381): NCBI GI NO: 25404366 NR Description: hypothetical protein F19K23.13
  misc_feature (26)..(375): NCBI GI NO: 15232435 NR Description: peptide transport - like protein
  misc_feature (21)..(375): NCBI GI NO: 15240905 NR Description: oligopeptide transporter - like protein
MAGAERAEAVALEQGLLDPEESNQVVYTGDGSVDFSGNPVVKERTGRWKACPFILGNECCERLAYYGISTNLVTYLTKKLHAGNASAASSVTTWSGTCYLTPLIGAILADAYWGRYWTIATFSTVYFIGMTLLTLSASVPMLMPPSCEGSFCPAASPFQYTVFFLGLYLIALGTGGIKPCVSSFGADQFDDTDPAERIQKGSFFNWFYFSINIGALISSSFLVWVQDNVGWGLGFGIPTVFMGLAIISFFSGTSLYRFQKPGGSPITRVCQVIVASLRKWNVPVPEDSSLLYELPNGVSTIEGSRQIEHTDELRCLDKAATVTEVDVKTADFNNPWRICTVTQVEELKILVRMFPVWATTIVFSAVYAQMSTMFVETRDGA

SEQ ID NO: 28221 - protein, 252 aa, Zea mays subsp. mays
  peptide (1)..(252): Ceres Seq. ID no. 12365572
  misc_feature (1)..(252): Pfam Name: Pfam Description:  POT family
  misc_feature (1)..(247): NCBI GI NO: 15076661 NR Description: peptide transporter
  misc_feature (1)..(252): NCBI GI NO: 4102839 NR Description: LeOPT1 [Lycopersicon esculentum]
  misc_feature (1)..(252): NCBI GI NO: 31088360 NR Description: peptide transporter 1 [Vicia faba]
  misc_feature (1)..(252): NCBI GI NO: 15226861 NR Description: histidine transport protein
  misc_feature (1)..(252): NCBI GI NO: 6635838 NR Description: amino acid/peptide transporter [Prunus dulcis]
  misc_feature (1)..(252): NCBI GI NO: 1076331 NR Description: histidine transport protein - Arabidopsis thaliana
  misc_feature (1)..(252): NCBI GI NO: 30696666 NR Description: oligopeptide transporter -related
  misc_feature (1)..(252): NCBI GI NO: 25404366 NR Description: hypothetical protein F19K23.13
  misc_feature (1)..(246): NCBI GI NO: 15232435 NR Description: peptide transport - like protein
  misc_feature (1)..(246): NCBI GI NO: 15240905 NR Description: oligopeptide transporter - like protein
MTLLTLSASVPMLMPPSCEGSFCPAASPFQYTVFFLGLYLIALGTGGIKPCVSSFGADQFDDTDPAERIQKGSFFNWFYFSINIGALISSSFLVWVQDNVGWGLGFGIPTVFMGLAIISFFSGTSLYRFQKPGGSPITRVCQVIVASLRKWNVPVPEDSSLLYELPNGVSTIEGSRQIEHTDELRCLDKAATVTEVDVKTADFNNPWRICTVTQVEELKILVRMFPVWATTIVFSAVYAQMSTMFVETRDGA

SEQ ID NO: 28222 - protein, 241 aa, Zea mays subsp. mays
  peptide (1)..(241): Ceres Seq. ID no. 12365573
  misc_feature (1)..(241): Pfam Name: Pfam Description:  POT family
  misc_feature (1)..(236): NCBI GI NO: 15076661 NR Description: peptide transporter
  misc_feature (1)..(241): NCBI GI NO: 4102839 NR Description: LeOPT1 [Lycopersicon esculentum]
  misc_feature (1)..(241): NCBI GI NO: 31088360 NR Description: peptide transporter 1 [Vicia faba]
  misc_feature (1)..(241): NCBI GI NO: 15226861 NR Description: histidine transport protein
  misc_feature (1)..(241): NCBI GI NO: 6635838 NR Description: amino acid/peptide transporter [Prunus dulcis]
  misc_feature (1)..(241): NCBI GI NO: 1076331 NR Description: histidine transport protein - Arabidopsis thaliana
  misc_feature (1)..(241): NCBI GI NO: 30696666 NR Description: oligopeptide transporter -related
  misc_feature (1)..(241): NCBI GI NO: 25404366 NR Description: hypothetical protein F19K23.13
  misc_feature (1)..(235): NCBI GI NO: 15232435 NR Description: peptide transport - like protein
  misc_feature (1)..(235): NCBI GI NO: 15240905 NR Description: oligopeptide transporter - like protein
MLMPPSCEGSFCPAASPFQYTVFFLGLYLIALGTGGIKPCVSSFGADQFDDTDPAERIQKGSFFNWFYFSINIGALISSSFLVWVQDNVGWGLGFGIPTVFMGLAIISFFSGTSLYRFQKPGGSPITRVCQVIVASLRKWNVPVPEDSSLLYELPNGVSTIEGSRQIEHTDELRCLDKAATVTEVDVKTADFNNPWRICTVTQVEELKILVRMFPVWATTIVFSAVYAQMSTMFVETRDGA

SEQ ID NO: 28223 - DNA, 1711 bp, Zea mays subsp. mays
  misc_feature (1)..(1711): Ceres Seq. ID no. 12566006
aagcaagctgcaaagagaacgcttgttggtagaacaaagtatatgcccccatgacaccgagtccaagcagcaggctcgagcatagctggagaagcccccacatccgcatgggctggatgcccatttcatgaggaggcttgtgagccggagctgggaggaatccaggctgctatggcgccttgccttcccggcgctcctgacggaggtgtttcagttctccatcggtttcgtcaccaccgccttcgttgggcacctcggagaggtggagctcgcggctgtcagcgtcgtggagaacatcttggattcctctgcctatggggtcctgtttggcatgggcagcgcgctggacacgctgagcgggcaggccgtcggcgccgggcagctggacaggctgggcacctacacgcagcagtcgtggatcatctgcggcgccaccgcgctggcgctggcgccggcgtacgccttcgccccgcggctcctgcactcgttcctccaccagcccgaccacgtgtcgcgcgccgccgggccgtacgcccgctgggcgatcccgaggctgttcgcgcacgccgtgaacataccgctcctcatgttcttccaggcccagagcaggatctgggccgtggcggccatctccggcgcggtcctcggcgtgcacgccgcgctcacctacgtcgccgtcacgaggctcgggtacggcctgcccggggccgccgtcgccggggacatctcccactggctcgtcgtcgccgctcagttcgcctacatgaccggcggccgcttccccgacgcgtggaagggcttcaccgtgcgtgcgttcgacaacctcggcgccttcgtcaagctgtcgctcgggtccgccgtcatgatctgcttggagttttggtactacaccacgcttctcgtcctcgtgggtctcctcaaacatggcaaactccaaatcgacatcatgtcagtctgcctcaacttcgagttcttgactgtaatggttgcgctgggcttcagcacagcaatcgggattagagtgtccaacgagctgggtgcaaacaggccgaaggaggcaaagtttgcagtgcttgtggcagtatcaacatccatgttcatgggagcagtctttatgtgcgtcgtcctcatctggaggacgagcctgccaaagctcttcagcgacagcgaagaggtgaaacgtggagcttccaagctggggcatctcctcgctctcaccgtatgcgtcagcagcatctggcctgtgctatcaggcgtggccgtaggagctgggtggcaagtgcgtgtggcgatcataaacgtcggttgctactacctagtgggcattccgatgggtatcctgcttgttcaagctaaaacacggcacaatgggcatatggatgggcatgttgtcaggcacgtttctccaaatgtcaatacttctcgccactatcttcacaacaaagtgggataaacaggccgcgctggcagaagtgagaatggcggagtggggaggaaagaacgagaacctaacactgacggaaacaacacatacagatgatctgatggctcctgtgcaagagaaaatgttggcgaatgatagccagaagaatgtagaattagtgcgcatagattgatcatagagtatattcatttcagctcgagacattatttcattgtttactaggatgatagtatgaatctatttttttataaataatctctccgttcc

SEQ ID NO: 28224 - protein, 441 aa, Zea mays subsp. mays
  peptide (1)..(441): Ceres Seq. ID no. 12566007
  misc_feature (243)..(405): Pfam Name: Pfam Description:  MatE
  misc_feature (4)..(405): NCBI GI NO: 37532026 NR Description: putative membrane protein
  misc_feature (1)..(405): NCBI GI NO: 16924114 NR Description: putative multidrug efflux protein [Oryza sativa]
  misc_feature (10)..(406): NCBI GI NO: 15220246 NR Description: unknown protein; protein id: At1g47530
  misc_feature (10)..(406): NCBI GI NO: 16604505 NR Description: At1g47530/F16N3_20 [Arabidopsis thaliana]
  misc_feature (1)..(406): NCBI GI NO: 15220701 NR Description: conserved hypothetical protein
  misc_feature (11)..(406): NCBI GI NO: 15222119 NR Description: unknown protein; protein id: At1g12950.1
  misc_feature (11)..(406): NCBI GI NO: 15231577 NR Description: integral membrane protein, putative
  misc_feature (11)..(406): NCBI GI NO: 15240824 NR Description: putative transmembrane protein
  misc_feature (7)..(337): NCBI GI NO: 34909838 NR Description: P0403C05.27
  misc_feature (11)..(406): NCBI GI NO: 30686958 NR Description: MATE efflux protein family [Arabidopsis thaliana]
MRRLVSRSWEESRLLWRLAFPALLTEVFQFSIGFVTTAFVGHLGEVELAAVSVVENILDSSAYGVLFGMGSALDTLSGQAVGAGQLDRLGTYTQQSWIICGATALALAPAYAFAPRLLHSFLHQPDHVSRAAGPYARWAIPRLFAHAVNIPLLMFFQAQSRIWAVAAISGAVLGVHAALTYVAVTRLGYGLPGAAVAGDISHWLVVAAQFAYMTGGRFPDAWKGFTVRAFDNLGAFVKLSLGSAVMICLEFWYYTTLLVLVGLLKHGKLQIDIMSVCLNFEFLTVMVALGFSTAIGIRVSNELGANRPKEAKFAVLVAVSTSMFMGAVFMCVVLIWRTSLPKLFSDSEEVKRGASKLGHLLALTVCVSSIWPVLSGVAVGAGWQVRVAIINVGCYYLVGIPMGILLVQAKTRHNGHMDGHVVRHVSPNVNTSRHYLHNKVG

SEQ ID NO: 28225 - protein, 373 aa, Zea mays subsp. mays
  peptide (1)..(373): Ceres Seq. ID no. 12566008
  misc_feature (175)..(337): Pfam Name: Pfam Description:  MatE
  misc_feature (1)..(337): NCBI GI NO: 37532026 NR Description: putative membrane protein
  misc_feature (1)..(337): NCBI GI NO: 16924114 NR Description: putative multidrug efflux protein [Oryza sativa]
  misc_feature (1)..(338): NCBI GI NO: 15220246 NR Description: unknown protein; protein id: At1g47530
  misc_feature (1)..(338): NCBI GI NO: 16604505 NR Description: At1g47530/F16N3_20 [Arabidopsis thaliana]
  misc_feature (1)..(338): NCBI GI NO: 15220701 NR Description: conserved hypothetical protein
  misc_feature (1)..(338): NCBI GI NO: 15222119 NR Description: unknown protein; protein id: At1g12950.1
  misc_feature (1)..(338): NCBI GI NO: 15231577 NR Description: integral membrane protein, putative
  misc_feature (1)..(338): NCBI GI NO: 15240824 NR Description: putative transmembrane protein
  misc_feature (1)..(269): NCBI GI NO: 34909838 NR Description: P0403C05.27
  misc_feature (1)..(338): NCBI GI NO: 30686958 NR Description: MATE efflux protein family [Arabidopsis thaliana]
MGSALDTLSGQAVGAGQLDRLGTYTQQSWIICGATALALAPAYAFAPRLLHSFLHQPDHVSRAAGPYARWAIPRLFAHAVNIPLLMFFQAQSRIWAVAAISGAVLGVHAALTYVAVTRLGYGLPGAAVAGDISHWLVVAAQFAYMTGGRFPDAWKGFTVRAFDNLGAFVKLSLGSAVMICLEFWYYTTLLVLVGLLKHGKLQIDIMSVCLNFEFLTVMVALGFSTAIGIRVSNELGANRPKEAKFAVLVAVSTSMFMGAVFMCVVLIWRTSLPKLFSDSEEVKRGASKLGHLLALTVCVSSIWPVLSGVAVGAGWQVRVAIINVGCYYLVGIPMGILLVQAKTRHNGHMDGHVVRHVSPNVNTSRHYLHNKVG

SEQ ID NO: 28226 - protein, 288 aa, Zea mays subsp. mays
  peptide (1)..(288): Ceres Seq. ID no. 12566009
  misc_feature (90)..(252): Pfam Name: Pfam Description:  MatE
  misc_feature (1)..(252): NCBI GI NO: 37532026 NR Description: putative membrane protein
  misc_feature (1)..(252): NCBI GI NO: 16924114 NR Description: putative multidrug efflux protein [Oryza sativa]
  misc_feature (1)..(253): NCBI GI NO: 15220246 NR Description: unknown protein; protein id: At1g47530
  misc_feature (1)..(253): NCBI GI NO: 16604505 NR Description: At1g47530/F16N3_20 [Arabidopsis thaliana]
  misc_feature (1)..(253): NCBI GI NO: 15220701 NR Description: conserved hypothetical protein
  misc_feature (1)..(253): NCBI GI NO: 15222119 NR Description: unknown protein; protein id: At1g12950.1
  misc_feature (1)..(253): NCBI GI NO: 15231577 NR Description: integral membrane protein, putative
  misc_feature (1)..(253): NCBI GI NO: 15240824 NR Description: putative transmembrane protein
  misc_feature (1)..(184): NCBI GI NO: 34909838 NR Description: P0403C05.27
  misc_feature (1)..(253): NCBI GI NO: 30686958 NR Description: MATE efflux protein family [Arabidopsis thaliana]
MFFQAQSRIWAVAAISGAVLGVHAALTYVAVTRLGYGLPGAAVAGDISHWLVVAAQFAYMTGGRFPDAWKGFTVRAFDNLGAFVKLSLGSAVMICLEFWYYTTLLVLVGLLKHGKLQIDIMSVCLNFEFLTVMVALGFSTAIGIRVSNELGANRPKEAKFAVLVAVSTSMFMGAVFMCVVLIWRTSLPKLFSDSEEVKRGASKLGHLLALTVCVSSIWPVLSGVAVGAGWQVRVAIINVGCYYLVGIPMGILLVQAKTRHNGHMDGHVVRHVSPNVNTSRHYLHNKVG

SEQ ID NO: 28227 - DNA, 1655 bp, Zea mays subsp. mays
  misc_feature (1)..(1655): Ceres Seq. ID no. 12352419
gcgtcgtcgtcgtccgattctgtctccctcaggtcgagattcgagagttcccgtgttcgtccatccgcgctgtgaggttctccgatggccgagaagtcacccagctccgcgccgcagggtggttctggtgggaatgaatcattcgataatcttgtaattcaagctccacagcttatgagggaggattacatacagaatgctgtgaagtttctttcacatccgaaagtgaagggttctccagtatttcacaggcgttccttcctggaaaagaaaggccttacaagtgaagaaattgatgaggccttttgtagagttcctgaccctaagccaaatggaacagatgctgtagctgctggtaggcaacaagcaaacaatcccagtcaatctgttgtgctgcaaccttatacagaagttcaaccacaagcagctactgcctctgccactgctggaccaattgttccacatacaaaggcacagttgagctgggtaaacacactccttggtgcaggtctttttcttggtttaggggctagtgctgccataaccctaaagaaattggtcatccctagtctgaaatcttggactcgtagagtcgttgctgaaggagatgaaaatgcaaagagtgaacatacttccaaactttgtgaagaaattagggaagccataaaagtttctgcatcagccttttctgatattgctaaaataaaccaagaagtgcttgcttcaaaagatgaagataggaaggtactcatgaagttaacagaagcattcgagtcacaagaaaatgtgtttaaatcattgagtgagaccttaaatcgtatcagggagaatcagctttcacaacacagcctattggaagagcatgttcagccttcatcatggaacgggccaattgactatcaagggagagcttttcagcaaactaatatgtatgcaacaccaccaaacaacagttttgacacagggaggaactcattcatgccattagctgctgaatcttcttatggaccatttccaggatcctactctgagcgggtgcagaggcctggtggatacggattccagcaacagacaagcagcgaccgattgaatgttgttggcccacggagcagctaccaagggggttcttctaatcaccatgctggtagtaatgccatggatgacccggcagcggttgcagcagaattgcagcgccgctgggttcccccacagccaccaggcgtcatcatgccagaggctgcggccgccatccgacaggccaggtcggttccgaggcagctgccaagcggcgatgggcgcctgggcgctgatgtcccgagacagcctgagcctgccattgccatggcgacaacagagcacgtgaacgttgcccctgaagcacctggcggggagttgccaagcgatggtggtggtgccatgactgctgatgccagcaacggtggtgggagtggagagcagcaggagcaggaagcctcttgagtgaagctttttggacgccctttgatttggttctttgagaggatctagcttgcacctgtacctgtgtgtgtagcatatgcatatgcatctgcataggtttgtgacataatgtgcctcgtgttcgaaactgcagctgtattgtagatatataaactgatcaactttacacgtgtgtt

SEQ ID NO: 28228 - protein, 464 aa, Zea mays subsp. mays
  peptide (1)..(464): Ceres Seq. ID no. 12352420
  misc_feature (31)..(161): Pfam Name: Pex14p Pfam Description: Peroxisomal membrane anchor protein
  misc_feature (24)..(456): NCBI GI NO: 11094252 NR Description: PEX14 [Arabidopsis thaliana]
  misc_feature (24)..(456): NCBI GI NO: 30697742 NR Description: (PEX14) protein [Arabidopsis thaliana]
  misc_feature (24)..(456): NCBI GI NO: 11121113 NR Description: peroxin Pex14 [Arabidopsis thaliana]
  misc_feature (31)..(78): NCBI GI NO: 9945056 NR Description: rice EST D22333 corresponds to a region of thepredicated gene
  misc_feature (110)..(456): NCBI GI NO: 20466350 NR Description: putative protein [Arabidopsis thaliana]
MAEKSPSSAPQGGSGGNESFDNLVIQAPQLMREDYIQNAVKFLSHPKVKGSPVFHRRSFLEKKGLTSEEIDEAFCRVPDPKPNGTDAVAAGRQQANNPSQSVVLQPYTEVQPQAATASATAGPIVPHTKAQLSWVNTLLGAGLFLGLGASAAITLKKLVIPSLKSWTRRVVAEGDENAKSEHTSKLCEEIREAIKVSASAFSDIAKINQEVLASKDEDRKVLMKLTEAFESQENVFKSLSETLNRIRENQLSQHSLLEEHVQPSSWNGPIDYQGRAFQQTNMYATPPNNSFDTGRNSFMPLAAESSYGPFPGSYSERVQRPGGYGFQQQTSSDRLNVVGPRSSYQGGSSNHHAGSNAMDDPAAVAAELQRRWVPPQPPGVIMPEAAAAIRQARSVPRQLPSGDGRLGADVPRQPEPAIAMATTEHVNVAPEAPGGELPSDGGGAMTADASNGGGSGEQQEQEAS

SEQ ID NO: 28229 - protein, 434 aa, Zea mays subsp. mays
  peptide (1)..(434): Ceres Seq. ID no. 12352421
  misc_feature (1)..(131): Pfam Name: Pex14p Pfam Description: Peroxisomal membrane anchor protein
  misc_feature (1)..(426): NCBI GI NO: 11094252 NR Description: PEX14 [Arabidopsis thaliana]
  misc_feature (1)..(426): NCBI GI NO: 30697742 NR Description: (PEX14) protein [Arabidopsis thaliana]
  misc_feature (1)..(426): NCBI GI NO: 11121113 NR Description: peroxin Pex14 [Arabidopsis thaliana]
  misc_feature (1)..(48): NCBI GI NO: 9945056 NR Description: rice EST D22333 corresponds to a region of thepredicated gene
  misc_feature (80)..(426): NCBI GI NO: 20466350 NR Description: putative protein [Arabidopsis thaliana]
MREDYIQNAVKFLSHPKVKGSPVFHRRSFLEKKGLTSEEIDEAFCRVPDPKPNGTDAVAAGRQQANNPSQSVVLQPYTEVQPQAATASATAGPIVPHTKAQLSWVNTLLGAGLFLGLGASAAITLKKLVIPSLKSWTRRVVAEGDENAKSEHTSKLCEEIREAIKVSASAFSDIAKINQEVLASKDEDRKVLMKLTEAFESQENVFKSLSETLNRIRENQLSQHSLLEEHVQPSSWNGPIDYQGRAFQQTNMYATPPNNSFDTGRNSFMPLAAESSYGPFPGSYSERVQRPGGYGFQQQTSSDRLNVVGPRSSYQGGSSNHHAGSNAMDDPAAVAAELQRRWVPPQPPGVIMPEAAAAIRQARSVPRQLPSGDGRLGADVPRQPEPAIAMATTEHVNVAPEAPGGELPSDGGGAMTADASNGGGSGEQQEQEAS

SEQ ID NO: 28230 - protein, 242 aa, Zea mays subsp. mays
  peptide (1)..(242): Ceres Seq. ID no. 12352422
  misc_feature (1)..(234): NCBI GI NO: 11094252 NR Description: PEX14 [Arabidopsis thaliana]
  misc_feature (1)..(234): NCBI GI NO: 30697742 NR Description: (PEX14) protein [Arabidopsis thaliana]
  misc_feature (1)..(234): NCBI GI NO: 11121113 NR Description: peroxin Pex14 [Arabidopsis thaliana]
  misc_feature (1)..(234): NCBI GI NO: 20466350 NR Description: putative protein [Arabidopsis thaliana]
MKLTEAFESQENVFKSLSETLNRIRENQLSQHSLLEEHVQPSSWNGPIDYQGRAFQQTNMYATPPNNSFDTGRNSFMPLAAESSYGPFPGSYSERVQRPGGYGFQQQTSSDRLNVVGPRSSYQGGSSNHHAGSNAMDDPAAVAAELQRRWVPPQPPGVIMPEAAAAIRQARSVPRQLPSGDGRLGADVPRQPEPAIAMATTEHVNVAPEAPGGELPSDGGGAMTADASNGGGSGEQQEQEAS

SEQ ID NO: 28231 - DNA, 1248 bp, Zea mays subsp. mays
  misc_feature (1)..(1248): Ceres Seq. ID no. 12402523
  misc_feature (821)..(821): n is a, c, t, g, unknown, or other
  misc_feature (29)..(29): n is a, c, t, g, unknown, or other
  misc_feature (355)..(355): n is a, c, t, g, unknown, or other
  misc_feature (1013)..(1013): n is a, c, t, g, unknown, or other
  misc_feature (28)..(28): n is a, c, t, g, unknown, or other
  misc_feature (749)..(749): n is a, c, t, g, unknown, or other
  misc_feature (740)..(740): n is a, c, t, g, unknown, or other
  misc_feature (343)..(343): n is a, c, t, g, unknown, or other
aagcataccagagcacacacagaacganncctcgatcgctcatagtctcctctgctccggtttcgttggagatccaggcaatggccgacgaatgcagcaactcaccagggccttctcaggccttggcgggctcggcgtggacgagccggcgatggtgtcggcgctggcacggtggcgcgggcagcccgagaagcggtccgcgttccgcaggggattcccgggcttcttcagcagccacggcggcgacatggaccggcgcgaggaggagtacatgctgcacctggccgccgagttcgcgcggttcagggacctggtggtgctgtgggcgacgcacccgtgggancgcgacgccggnctggcgcaccacgtcctgcaccaccaccaccaccacccgcccgccgtcgtcgtggaggtcgcctgcgcgcggtccgccgacgagctgctgggcgcgcgccgggcgtaccaggcgctcttccaccgctccctcgaggaggacgtcgcgcaccgcgcccgggacaagccctactgcagcctgctggtcgggctggtgagcgcgtacaggtacgagggcccgcgggtggacaaggaggtggcgaaggcggaggccgaggcgctgggtgccgccgtgaagcgcgccgggaacgggaagctggtggagaacgacgaggtgctccgcatcctgaccaccaggagcaagccccacctcgtgcagacgttcatgtactacaaggagatgcacngcaggcacntcgaggaggacctgggccaacgcggggaggagaccctgctgggaaaccgtgctctgcctcgtcgcgccgggnccagtacttcagccaggtgattgagggcgcgctgagggacggcgccgaccaccacgggaaggaggccctgacgagggtggcggtgacgcggtcggaccacgacatggacgacatcagagccgcctaccaccagcagttcggggccaagctggaggacgtcatcgcggccaaggcgcacggacactacagggnacgcgctgctctccttggtgggcgccggcaattcatcagtgtgaagcgctgcttcctgctcaggagtcgtcaggcccaataagatgtgcaagagtttctttattacgcactttcgcgaggaaaaaaagtcgcattttccactcgatgaggaaaggttgttgcttgttcttttgcttctcctatgcgtttcgtctatcattgactacaggattcccaataaacatttttaatttct

SEQ ID NO: 28232 - protein, 279 aa, Zea mays subsp. mays
  peptide (1)..(279): Ceres Seq. ID no. 12402524
  misc_feature (198)..(262): Pfam Name: Pfam Description:  Annexin
  misc_feature (31)..(268): NCBI GI NO: 15224946 NR Description: putative annexin; protein id: At2g38750
  misc_feature (50)..(270): NCBI GI NO: 7441506 NR Description: annexin P33 - maize
  misc_feature (33)..(254): NCBI GI NO: 7441511 NR Description: annexin 2 - upland cotton (fragment)
  misc_feature (43)..(258): NCBI GI NO: 21264397 NR Description: Annexin-like protein RJ4
  misc_feature (87)..(258): NCBI GI NO: 1362037 NR Description: annexin homolog RJ4
  misc_feature (32)..(243): NCBI GI NO: 15238105 NR Description: annexin -like protein; protein id: At5g10230
  misc_feature (32)..(263): NCBI GI NO: 4580920 NR Description: vacuole-associated annexin VCaB42
  misc_feature (89)..(254): NCBI GI NO: 22326753 NR Description: annexin-like protein; protein id: At5g12380.1
  misc_feature (105)..(254): NCBI GI NO: 14586368 NR Description: annexin-like protein [Arabidopsis thaliana]
  misc_feature (32)..(254): NCBI GI NO: 7441508 NR Description: annexin, isoform P35 - tomato
  misc_feature (9)..(9): Xaa is any aa, unknown or other
  misc_feature (10)..(10): Xaa is any aa, unknown or other
  misc_feature (114)..(114): Xaa is any aa, unknown or other
  misc_feature (118)..(118): Xaa is any aa, unknown or other
  misc_feature (247)..(247): Xaa is any aa, unknown or other
  misc_feature (250)..(250): Xaa is any aa, unknown or other
  misc_feature (274)..(274): Xaa is any aa, unknown or other
SIPEHTQNXXSIAHSLLCSGFVGDPGNGRRMQQLTRAFSGLGGLGVDEPAMVSALARWRGQPEKRSAFRRGFPGFFSSHGGDMDRREEEYMLHLAAEFARFRDLVVLWATHPWXRDAXLAHHVLHHHHHHPPAVVVEVACARSADELLGARRAYQALFHRSLEEDVAHRARDKPYCSLLVGLVSAYRYEGPRVDKEVAKAEAEALGAAVKRAGNGKLVENDEVLRILTTRSKPHLVQTFMYYKEMHXRHXEEDLGQRGEETLLGNRALPRRAGXSTSAR

SEQ ID NO: 28233 - protein, 249 aa, Zea mays subsp. mays
  peptide (1)..(249): Ceres Seq. ID no. 12402525
  misc_feature (168)..(232): Pfam Name: Pfam Description:  Annexin
  misc_feature (1)..(238): NCBI GI NO: 15224946 NR Description: putative annexin; protein id: At2g38750
  misc_feature (20)..(240): NCBI GI NO: 7441506 NR Description: annexin P33 - maize
  misc_feature (3)..(224): NCBI GI NO: 7441511 NR Description: annexin 2 - upland cotton (fragment)
  misc_feature (13)..(228): NCBI GI NO: 21264397 NR Description: Annexin-like protein RJ4
  misc_feature (57)..(228): NCBI GI NO: 1362037 NR Description: annexin homolog RJ4
  misc_feature (2)..(213): NCBI GI NO: 15238105 NR Description: annexin -like protein; protein id: At5g10230
  misc_feature (2)..(233): NCBI GI NO: 4580920 NR Description: vacuole-associated annexin VCaB42
  misc_feature (59)..(224): NCBI GI NO: 22326753 NR Description: annexin-like protein; protein id: At5g12380.1
  misc_feature (75)..(224): NCBI GI NO: 14586368 NR Description: annexin-like protein [Arabidopsis thaliana]
  misc_feature (2)..(224): NCBI GI NO: 7441508 NR Description: annexin, isoform P35 - tomato
  misc_feature (84)..(84): Xaa is any aa, unknown or other
  misc_feature (88)..(88): Xaa is any aa, unknown or other
  misc_feature (217)..(217): Xaa is any aa, unknown or other
  misc_feature (220)..(220): Xaa is any aa, unknown or other
  misc_feature (244)..(244): Xaa is any aa, unknown or other
MQQLTRAFSGLGGLGVDEPAMVSALARWRGQPEKRSAFRRGFPGFFSSHGGDMDRREEEYMLHLAAEFARFRDLVVLWATHPWXRDAXLAHHVLHHHHHHPPAVVVEVACARSADELLGARRAYQALFHRSLEEDVAHRARDKPYCSLLVGLVSAYRYEGPRVDKEVAKAEAEALGAAVKRAGNGKLVENDEVLRILTTRSKPHLVQTFMYYKEMHXRHXEEDLGQRGEETLLGNRALPRRAGXSTSAR

SEQ ID NO: 28234 - protein, 229 aa, Zea mays subsp. mays
  peptide (1)..(229): Ceres Seq. ID no. 12402526
  misc_feature (148)..(212): Pfam Name: Pfam Description:  Annexin
  misc_feature (1)..(218): NCBI GI NO: 15224946 NR Description: putative annexin; protein id: At2g38750
  misc_feature (1)..(220): NCBI GI NO: 7441506 NR Description: annexin P33 - maize
  misc_feature (1)..(204): NCBI GI NO: 7441511 NR Description: annexin 2 - upland cotton (fragment)
  misc_feature (1)..(208): NCBI GI NO: 21264397 NR Description: Annexin-like protein RJ4
  misc_feature (37)..(208): NCBI GI NO: 1362037 NR Description: annexin homolog RJ4
  misc_feature (1)..(193): NCBI GI NO: 15238105 NR Description: annexin -like protein; protein id: At5g10230
  misc_feature (1)..(213): NCBI GI NO: 4580920 NR Description: vacuole-associated annexin VCaB42
  misc_feature (39)..(204): NCBI GI NO: 22326753 NR Description: annexin-like protein; protein id: At5g12380.1
  misc_feature (55)..(204): NCBI GI NO: 14586368 NR Description: annexin-like protein [Arabidopsis thaliana]
  misc_feature (1)..(204): NCBI GI NO: 7441508 NR Description: annexin, isoform P35 - tomato
  misc_feature (64)..(64): Xaa is any aa, unknown or other
  misc_feature (68)..(68): Xaa is any aa, unknown or other
  misc_feature (197)..(197): Xaa is any aa, unknown or other
  misc_feature (200)..(200): Xaa is any aa, unknown or other
  misc_feature (224)..(224): Xaa is any aa, unknown or other
MVSALARWRGQPEKRSAFRRGFPGFFSSHGGDMDRREEEYMLHLAAEFARFRDLVVLWATHPWXRDAXLAHHVLHHHHHHPPAVVVEVACARSADELLGARRAYQALFHRSLEEDVAHRARDKPYCSLLVGLVSAYRYEGPRVDKEVAKAEAEALGAAVKRAGNGKLVENDEVLRILTTRSKPHLVQTFMYYKEMHXRHXEEDLGQRGEETLLGNRALPRRAGXSTSAR

SEQ ID NO: 28235 - DNA, 1023 bp, Zea mays subsp. mays
  misc_feature (1)..(1023): Ceres Seq. ID no. 12365599
agattacaaaagccattccttcaatcactcaaatccactgtgactccgtgagctccctgcctgctgccctgcactgctgcacactccccgcccagccgcaccagctcagctcagctcagctcagcagtcatggctcgcccctgccgcagcagcagcgccgctgcccgcctcctgctgctgctcgccgccgtcgcagcggcgctccaggccgcggccgccgcgccgccggtggccagcggcttcatccgcaaatcctgccgcgcgacgcagtacccgtcggtgtgcgagcagagcctcgcggcgtacggaggctccccgccgccgcggagcccgcgtgagctggcgcgcgccgcgctggcggtgagcgcggaccgcgctcgggcagcgtccgcgtacgtgggccgcctgtgcggctcccggtccggatccggcgacggcagcccccgccgcggcgccggcgcgatgaaggggtcggcggccgcggggtcccgtgcgcgactgtctggagaatctagcggacagcgtgggccacctccgcgacgcggcgcaggagataggcggcgccgggatggcccgcgccgggacgcgcgcgttcaggtggcacctcagcaacgtgcagacctggtgcagcgccgcgctcacggacgagaacacctgcctggacgggctctcgtcccgcgccgtggacgccgccacgcgcgccgccgtccgcggcagggtcgtcgaggtcgcgcaggtcaccagcaacgcgctcgcactcgtcaacaaggtcgggcctgggtactagtagcccagggcggcctgggtgctactactactgcctcctccacgacgttggttgtttctgcctcggcggttaactagttctgttattatcaatgtgtgtgtgtttctttgcatataagtatatgctttgtatctgttgtgtgaggtaatttatatatagttaaggccttaagggcaattagcttgtatattgtattatgggtggcgagaagtacacgaagacggataatccttctt

SEQ ID NO: 28236 - protein, 244 aa, Zea mays subsp. mays
  peptide (1)..(244): Ceres Seq. ID no. 12365600
  misc_feature (10)..(93): NCBI GI NO: 7406663 NR Description: putative ripening-related protein [Vitis vinifera]
  misc_feature (15)..(93): NCBI GI NO: 18407657 NR Description: expressed protein; protein id: At1g62770
  misc_feature (15)..(93): NCBI GI NO: 21618013 NR Description: putative ripening-related protein
  misc_feature (16)..(93): NCBI GI NO: 112717 NR Description: 21 KD PROTEIN PRECURSOR (1.2 PROTEIN)
  misc_feature (15)..(93): NCBI GI NO: 15241799 NR Description: ripening-related protein - like
  misc_feature (15)..(93): NCBI GI NO: 21618088 NR Description: ripening-related protein-like
  misc_feature (15)..(93): NCBI GI NO: 18394174 NR Description: expressed protein; protein id: At1g14890
  misc_feature (17)..(93): NCBI GI NO: 15232790 NR Description: putative protein; protein id: At3g47380.1
  misc_feature (38)..(103): NCBI GI NO: 15226321 NR Description: unknown protein; protein id: At2g01610.1
  misc_feature (14)..(105): NCBI GI NO: 37535926 NR Description: putative stress-responsive protein
MARPCRSSSAAARLLLLLAAVAAALQAAAAAPPVASGFIRKSCRATQYPSVCEQSLAAYGGSPPPRSPRELARAALAVSADRARAASAYVGRLCGSRSGSGDGSPRRGAGAMKGSAAAGSRARLSGESSGQRGPPPRRGAGDRRRRDGPRRDARVQVAPQQRADLVQRRAHGREHLPGRALVPRRGRRHARRRPRQGRRGRAGHQQRARTRQQGRAWVLVAQGGLGATTTASSTTLVVSASAVN

SEQ ID NO: 28237 - protein, 133 aa, Zea mays subsp. mays
  peptide (1)..(133): Ceres Seq. ID no. 12365601
MKGSAAAGSRARLSGESSGQRGPPPRRGAGDRRRRDGPRRDARVQVAPQQRADLVQRRAHGREHLPGRALVPRRGRRHARRRPRQGRRGRAGHQQRARTRQQGRAWVLVAQGGLGATTTASSTTLVVSASAVN

SEQ ID NO: 28238 - DNA, 1685 bp, Zea mays subsp. mays
  misc_feature (1)..(1685): Ceres Seq. ID no. 12356347
accccacaccaaaagaaaccaactaaaatcccaaaagagaggaaaggcacaaacagacggtacaaagaaagggacgctcgtctcgtctcgtcacgtgccgccgccatggctgctctgggccgtggcctgcccctcctcctcctgctcctcctcctcgccgtatcgggggccgccaacgccgcggcggcgcccggcggcatgtccatcatcacctacaacgaggagcacggcgcgcgggggctggagcggacggagccggaggtgcgggccatgtacgacctctggctcgcggagcacggccgcgcctacaacgcgctgggcgagggcgagggcgagcgcgaccgccgcttcctcgtcttctgggacaacctccgcttcgtcgacgcgcacaacgagcgcgccggcgcccgcggcttccgcctcgggatgaaccagttcgccgacctcaccaacgacgagttccgcgccgcgtacctcggcgccatggtccccgccgcccgccggggagccgtcgtgggggagaggtaccgccacgacggcgccgccgaggagctgccggagagcgtcgactggagggagaagggcgccgtcgcgcccgtcaagaaccaggggcaatgcggaagttgctgggctttctctgcagtaagctcagtggaaagcgttaaccagatcgtcaccggtgagatggtgacactgtctgaacaggagctcgtagagtgctcgactgacggagggaacagcggctgcaacggcgggctcatggacgccgctttcgatttcatcataaagaacgggggcatcgataccgaagatgactacccttacagagccgtggacgggaagtgcgacatgaacaggaaaaatgccagggttgtgagcatcgatggctttgaagacgtgcctgagaacgacgagaagtcgctgcagaaggcggttgctcaccagccagttagcgttgccattgaggccggaggccgggagttccagctctacaaatcgggtgtcttcagcggaagctgcaccacgaaccttgaccatggtgtcgtcgcggtcggctacggcgccgagaacgggaaggactactggatcgtccgcaactcgtggggcccgaagtggggcgaggctggttacatccgtatggagaggaacgtcaacgccagcactgggaagtgcgggatcgcgatgatggcgtcctacccgacgaagaagggcgcgaaccctcccaggccgtctccaaccccgccaacaccgccggctgcccctgacaatgtctgcgacgagaacttctcgtgctccgcgggcagcacctgctgctgcgcgtttggcttcaggaacgtctgcttggtctggggctgctgcccggtcgagggcgccacctgctgcaaggatcacgccagctgctgcccgccgggctaccctgtctgcaacgtcagagctggaacttgctcggtgagcaagaacagcccactgagcgtcaaggccttgaagcgcactctcgccaagctgagcaccgcatgaggacctcgatctgggactgcccattgctttttctgactcatgggcgttcagatcaccaagagcaagatttcatagattatctatatgtttgtataagtactattaccgtcccatgaatccgctgtaaataactagtacctctgattaaaaggataatattatttgtc

SEQ ID NO: 28239 - protein, 505 aa, Zea mays subsp. mays
  peptide (1)..(505): Ceres Seq. ID no. 12356348
  misc_feature (185)..(401): Pfam Name: Pfam Description:  Papain family cysteine protease
  misc_feature (50)..(505): NCBI GI NO: 32488398 NR Description: OSJNBa0043A12.28
  misc_feature (36)..(504): NCBI GI NO: 129232 NR Description: Oryzain beta chain precursor
  misc_feature (62)..(501): NCBI GI NO: 6682829 NR Description: cysteine protease component of protease-inhibitorcomplex
  misc_feature (47)..(501): NCBI GI NO: 13897890 NR Description: putative cysteine protease [Ipomoea batatas]
  misc_feature (62)..(501): NCBI GI NO: 7435806 NR Description: cysteine proteinase mir3 (EC 3.4.22.-) - maize
  misc_feature (63)..(501): NCBI GI NO: 129231 NR Description: Oryzain alpha chain precursor
  misc_feature (46)..(501): NCBI GI NO: 7435791 NR Description: cysteine proteinase (EC 3
  misc_feature (44)..(500): NCBI GI NO: 18422289 NR Description: cysteine proteinase RD21A; protein id: At5g43060
  misc_feature (67)..(500): NCBI GI NO: 30141019 NR Description: cysteine protease-1 [Helianthus annuus]
  misc_feature (46)..(497): NCBI GI NO: 18401614 NR Description: cysteine proteinase RD21A; protein id: At1g47128
TPHQKKPTKIPKERKGTNRRYKERDARLVSSRAAAMAALGRGLPLLLLLLLLAVSGAANAAAAPGGMSIITYNEEHGARGLERTEPEVRAMYDLWLAEHGRAYNALGEGEGERDRRFLVFWDNLRFVDAHNERAGARGFRLGMNQFADLTNDEFRAAYLGAMVPAARRGAVVGERYRHDGAAEELPESVDWREKGAVAPVKNQGQCGSCWAFSAVSSVESVNQIVTGEMVTLSEQELVECSTDGGNSGCNGGLMDAAFDFIIKNGGIDTEDDYPYRAVDGKCDMNRKNARVVSIDGFEDVPENDEKSLQKAVAHQPVSVAIEAGGREFQLYKSGVFSGSCTTNLDHGVVAVGYGAENGKDYWIVRNSWGPKWGEAGYIRMERNVNASTGKCGIAMMASYPTKKGANPPRPSPTPPTPPAAPDNVCDENFSCSAGSTCCCAFGFRNVCLVWGCCPVEGATCCKDHASCCPPGYPVCNVRAGTCSVSKNSPLSVKALKRTLAKLSTA

SEQ ID NO: 28240 - protein, 470 aa, Zea mays subsp. mays
  peptide (1)..(470): Ceres Seq. ID no. 12356349
  misc_feature (150)..(366): Pfam Name: Pfam Description:  Papain family cysteine protease
  misc_feature (15)..(470): NCBI GI NO: 32488398 NR Description: OSJNBa0043A12.28
  misc_feature (1)..(469): NCBI GI NO: 129232 NR Description: Oryzain beta chain precursor
  misc_feature (27)..(466): NCBI GI NO: 6682829 NR Description: cysteine protease component of protease-inhibitorcomplex
  misc_feature (12)..(466): NCBI GI NO: 13897890 NR Description: putative cysteine protease [Ipomoea batatas]
  misc_feature (27)..(466): NCBI GI NO: 7435806 NR Description: cysteine proteinase mir3 (EC 3.4.22.-) - maize
  misc_feature (28)..(466): NCBI GI NO: 129231 NR Description: Oryzain alpha chain precursor
  misc_feature (11)..(466): NCBI GI NO: 7435791 NR Description: cysteine proteinase (EC 3
  misc_feature (9)..(465): NCBI GI NO: 18422289 NR Description: cysteine proteinase RD21A; protein id: At5g43060
  misc_feature (32)..(465): NCBI GI NO: 30141019 NR Description: cysteine protease-1 [Helianthus annuus]
  misc_feature (11)..(462): NCBI GI NO: 18401614 NR Description: cysteine proteinase RD21A; protein id: At1g47128
MAALGRGLPLLLLLLLLAVSGAANAAAAPGGMSIITYNEEHGARGLERTEPEVRAMYDLWLAEHGRAYNALGEGEGERDRRFLVFWDNLRFVDAHNERAGARGFRLGMNQFADLTNDEFRAAYLGAMVPAARRGAVVGERYRHDGAAEELPESVDWREKGAVAPVKNQGQCGSCWAFSAVSSVESVNQIVTGEMVTLSEQELVECSTDGGNSGCNGGLMDAAFDFIIKNGGIDTEDDYPYRAVDGKCDMNRKNARVVSIDGFEDVPENDEKSLQKAVAHQPVSVAIEAGGREFQLYKSGVFSGSCTTNLDHGVVAVGYGAENGKDYWIVRNSWGPKWGEAGYIRMERNVNASTGKCGIAMMASYPTKKGANPPRPSPTPPTPPAAPDNVCDENFSCSAGSTCCCAFGFRNVCLVWGCCPVEGATCCKDHASCCPPGYPVCNVRAGTCSVSKNSPLSVKALKRTLAKLSTA

SEQ ID NO: 28241 - protein, 439 aa, Zea mays subsp. mays
  peptide (1)..(439): Ceres Seq. ID no. 12356350
  misc_feature (119)..(335): Pfam Name: Pfam Description:  Papain family cysteine protease
  misc_feature (1)..(439): NCBI GI NO: 32488398 NR Description: OSJNBa0043A12.28
  misc_feature (1)..(438): NCBI GI NO: 129232 NR Description: Oryzain beta chain precursor
  misc_feature (1)..(435): NCBI GI NO: 6682829 NR Description: cysteine protease component of protease-inhibitorcomplex
  misc_feature (1)..(435): NCBI GI NO: 13897890 NR Description: putative cysteine protease [Ipomoea batatas]
  misc_feature (1)..(435): NCBI GI NO: 7435806 NR Description: cysteine proteinase mir3 (EC 3.4.22.-) - maize
  misc_feature (1)..(435): NCBI GI NO: 129231 NR Description: Oryzain alpha chain precursor
  misc_feature (1)..(435): NCBI GI NO: 7435791 NR Description: cysteine proteinase (EC 3
  misc_feature (1)..(434): NCBI GI NO: 18422289 NR Description: cysteine proteinase RD21A; protein id: At5g43060
  misc_feature (1)..(434): NCBI GI NO: 30141019 NR Description: cysteine protease-1 [Helianthus annuus]
  misc_feature (1)..(431): NCBI GI NO: 18401614 NR Description: cysteine proteinase RD21A; protein id: At1g47128
MSIITYNEEHGARGLERTEPEVRAMYDLWLAEHGRAYNALGEGEGERDRRFLVFWDNLRFVDAHNERAGARGFRLGMNQFADLTNDEFRAAYLGAMVPAARRGAVVGERYRHDGAAEELPESVDWREKGAVAPVKNQGQCGSCWAFSAVSSVESVNQIVTGEMVTLSEQELVECSTDGGNSGCNGGLMDAAFDFIIKNGGIDTEDDYPYRAVDGKCDMNRKNARVVSIDGFEDVPENDEKSLQKAVAHQPVSVAIEAGGREFQLYKSGVFSGSCTTNLDHGVVAVGYGAENGKDYWIVRNSWGPKWGEAGYIRMERNVNASTGKCGIAMMASYPTKKGANPPRPSPTPPTPPAAPDNVCDENFSCSAGSTCCCAFGFRNVCLVWGCCPVEGATCCKDHASCCPPGYPVCNVRAGTCSVSKNSPLSVKALKRTLAKLSTA

SEQ ID NO: 28242 - DNA, 1201 bp, Zea mays subsp. mays
  misc_feature (1)..(1201): Ceres Seq. ID no. 12351169
ccccaaaccccagcaggcatcctctcttcctctcctctccaatctccattgcagcagcactgcagcggcgggtgcgggtggcatggctatggcgtccgcgctgccgctcctcctcgcgccgcgcgccggtctttgcgtccgcggggccgtcttcgcctcatctccgctcccgccgcctcgcgctgcgtctccctccccctccccgacccgccgccctctccgcgccaccagccgccgtgcagccgcgcgaggcccggcgcgtccagccggccccgcgccgcctcctgctgccaagatcccgctccggccgcgggaggaggcgccagggactggcggatgttcttagcatggtacctaatggctctggacaagaacccgattgtgactaaggcggtcacttccgctgccctaactctggccggggacctcatctgtcagctttatcgatcgagttccagaacttgatttgaggagaacatttgtattcacatttttgggccttgcccttgtggggccaactttacatgtctggtacttgtatttgagcaaattagtgacaatcagtgggggcatcaggtgccattgctcgccttatgcttgatcagttcattttctctcccattttcattggcgtctttatgagcttactagtcaccttggagggaaagccctctcttgtggtgccaaagcttaagcaggaatggttatcatcggtgttggcgaattggcaattatggataccatttcagtttttgaatttttacttcgttcctcagaagtttcaggtccttggtgctaattttgtagcccttgcatggaatgtgattttatcatttaaagctcacaaggaagttatcgcgaaataggtatgaaggagcgcagtgaactcccccggtcggtccaggatagggataggcttgtaaattgtcgccatgtgggactggagtggatcattctgatcagtagtcaacacaacactgaatcgatgattgtgatggacatgcctgtgtgatctcttttgtgcatgctacaccaatacgtgtttggccagcatgtatgcctggacatgtgtgttactatttgtgctgtgatgggttgttcgagatctaggaaacacattgggttgttgatatctttaggccctgtgtggaagcgtctattttttttaaagaaactggtttatagaaattgtggtggttct

SEQ ID NO: 28243 - protein, 154 aa, Zea mays subsp. mays
  peptide (1)..(154): Ceres Seq. ID no. 12351170
  misc_feature (106)..(147): NCBI GI NO: 15241166 NR Description: putative protein; protein id: At5g19750
  misc_feature (106)..(147): NCBI GI NO: 16648746 NR Description: AT5g19750/T29J13_170 [Arabidopsis thaliana]
  misc_feature (112)..(147): NCBI GI NO: 21594286 NR Description: unknown [Arabidopsis thaliana]
  misc_feature (115)..(153): NCBI GI NO: 6679577 NR Description: peroxisomal membrane protein 2
  misc_feature (115)..(153): NCBI GI NO: 13928796 NR Description: peroxisomal membrane protein 2
  misc_feature (81)..(154): NCBI GI NO: 15226016 NR Description: 22 kDa peroxisomal membrane protein
PQTPAGILSSSPLQSPLQQHCSGGCGWHGYGVRAAAPPRAARRSLRPRGRLRLISAPAASRCVSLPLPDPPPSPRHQPPCSRARPGASSRPRAASCCQDPAPAAGGGARDWRMFLAWYLMALDKNPIVTKAVTSAALTLAGDLICQLYRSSSRT

SEQ ID NO: 28244 - protein, 128 aa, Zea mays subsp. mays
  peptide (1)..(128): Ceres Seq. ID no. 12351171
PNPSRHPLFLSSPISIAAALQRRVRVAWLWRPRCRSSSRRAPVFASAGPSSPHLRSRRLALRLPPPPRPAALSAPPAAVQPREARRVQPAPRRLLLPRSRSGRGRRRQGLADVLSMVPNGSGQEPDCD

SEQ ID NO: 28245 - protein, 114 aa, Zea mays subsp. mays
  peptide (1)..(114): Ceres Seq. ID no. 12351172
PKPQQASSLPLLSNLHCSSTAAAGAGGMAMASALPLLLAPRAGLCVRGAVFASSPLPPPRAASPSPSPTRRPLRATSRRAAARGPARPAGPAPPPAAKIPLRPREEAPGTGGCS

SEQ ID NO: 28246 - DNA, 662 bp, Zea mays subsp. mays
  misc_feature (1)..(662): Ceres Seq. ID no. 12372505
gaaaatctccccgctcacaaagcagtcctcccaccgcacgcaacgcagcctcgacctcgacctcgccgtcgccatggcgagcaagcagacccgccgcctcttcgtccttgccgccgtcgccgtatgcttcctcctcctcctcctcccagcctcctctgtcgccaccgacgtcgattactgcagtaaaaaggagtacccggtgaaggtgagcggggtgcagatcgtgcccgatccggtcgagcccggcaagcctgccactttcaagatctccgcttctactgataaaaccatcgagaaggggaagctggtgatcgacgtcaagtacttcttcttctacgtgcactcggagacgcgcgacatctgcggagagatctcctgtccggcgaccggcgacttcgtgctgtcccacgagcagacgttgccagggttcactccaccggggtcgtacacgatctacatgaagatggtcggggacgacgacgaggagctgagctgcatctcgttcggcttcagcattgggttcgtcgcctccagctgaaacccgcctgagctgcgcgccagaagtcgcccagcatggatgccattatgtaaaccactagaacataaaatttcgagaaagaatgcattacgaaggagacgctcagatttcttcaacctaaagc

SEQ ID NO: 28247 - protein, 178 aa, Zea mays subsp. mays
  peptide (1)..(178): Ceres Seq. ID no. 12372506
  misc_feature (55)..(172): Pfam Name: Pfam Description:  ML domain
  misc_feature (25)..(177): NCBI GI NO: 34899866 NR Description: OJ1714_H10.15
  misc_feature (32)..(177): NCBI GI NO: 15240063 NR Description: putative protein; protein id: At5g06480
  misc_feature (32)..(177): NCBI GI NO: 21593850 NR Description: unknown [Arabidopsis thaliana]
  misc_feature (37)..(177): NCBI GI NO: 18399355 NR Description: expressed protein; protein id: At3g11780
  misc_feature (37)..(177): NCBI GI NO: 21554315 NR Description: unknown [Arabidopsis thaliana]
  misc_feature (25)..(172): NCBI GI NO: 15229872 NR Description: putative protein; protein id: At3g44100
  misc_feature (57)..(166): NCBI GI NO: 4322563 NR Description: phosphatidylglycerol/phosphatidylinositol transfer
  misc_feature (63)..(168): NCBI GI NO: 18397991 NR Description: Expressed protein; protein id: At2g16005
KISPLTKQSSHRTQRSLDLDLAVAMASKQTRRLFVLAAVAVCFLLLLLPASSVATDVDYCSKKEYPVKVSGVQIVPDPVEPGKPATFKISASTDKTIEKGKLVIDVKYFFFYVHSETRDICGEISCPATGDFVLSHEQTLPGFTPPGSYTIYMKMVGDDDEELSCISFGFSIGFVASS

SEQ ID NO: 28248 - protein, 154 aa, Zea mays subsp. mays
  peptide (1)..(154): Ceres Seq. ID no. 12372507
  misc_feature (31)..(148): Pfam Name: Pfam Description:  ML domain
  misc_feature (1)..(153): NCBI GI NO: 34899866 NR Description: OJ1714_H10.15
  misc_feature (8)..(153): NCBI GI NO: 15240063 NR Description: putative protein; protein id: At5g06480
  misc_feature (8)..(153): NCBI GI NO: 21593850 NR Description: unknown [Arabidopsis thaliana]
  misc_feature (13)..(153): NCBI GI NO: 18399355 NR Description: expressed protein; protein id: At3g11780
  misc_feature (13)..(153): NCBI GI NO: 21554315 NR Description: unknown [Arabidopsis thaliana]
  misc_feature (1)..(148): NCBI GI NO: 15229872 NR Description: putative protein; protein id: At3g44100
  misc_feature (33)..(142): NCBI GI NO: 4322563 NR Description: phosphatidylglycerol/phosphatidylinositol transfer
  misc_feature (39)..(144): NCBI GI NO: 18397991 NR Description: Expressed protein; protein id: At2g16005
MASKQTRRLFVLAAVAVCFLLLLLPASSVATDVDYCSKKEYPVKVSGVQIVPDPVEPGKPATFKISASTDKTIEKGKLVIDVKYFFFYVHSETRDICGEISCPATGDFVLSHEQTLPGFTPPGSYTIYMKMVGDDDEELSCISFGFSIGFVASS

SEQ ID NO: 28249 - DNA, 772 bp, Zea mays subsp. mays
  misc_feature (1)..(772): Ceres Seq. ID no. 12341738
aagtacaggaagcgctagaacaacccgaccgccgccgccgccgcctcagctactcgcctggtgatgggcgtcgaactggcgcaaccgaccgccgccgcggctgcggtgaccaccgctgagcaggctcaggatctcatcgacgccgctaggtatgacgacttggaggacgtcgtcgccctgttctccgctggtgtctcgctggactccacagattcgcaaggccgcacagctcttcacatggcttctgccaatggtcaccttgctatggtggaatacttgattcaaaatggagcgaatgttaatgccaccaacatggagaagaacacaccactccactgggcatgccttaatggacgtatagaggtaatcagggctttgatctcagcgggggctagcgtgagtgctctgaacagccacgagaaaacgccaatggacgaagcggtgaccacaggcaagatgcacgtgatcgacgcgatcggtgcggcagtagctcaagccgagctcgacggcgttactgtctcctaaaaggacctgatgagtacctggagctttgaatgacttgcagccttgttcttatctcacagcggttctgtctgtatcactcgcgaacctgaatcccccgacgggccagtatccgggcaatatctatactgacggcaatcgcctgttagtgtcattggcacgaggacccgacctgtcgttgtaaaccagatgtgcagatgtcaaagatcaggattttctcctacaaatgttgtagggccgttgcttgtcc

SEQ ID NO: 28250 - protein, 153 aa, Zea mays subsp. mays
  peptide (1)..(153): Ceres Seq. ID no. 12341739
  misc_feature (85)..(116): Pfam Name: Pfam Description:  Ankyrin repeat
  misc_feature (1)..(153): NCBI GI NO: 34899080 NR Description: contains ESTs AU031990
  misc_feature (18)..(153): NCBI GI NO: 30684047 NR Description: expressed protein [Arabidopsis thaliana]
  misc_feature (18)..(153): NCBI GI NO: 14586362 NR Description: putative protein [Arabidopsis thaliana]
  misc_feature (27)..(135): NCBI GI NO: 28373837 NR Description: Chain A
  misc_feature (18)..(151): NCBI GI NO: 28373666 NR Description: Chain A
  misc_feature (18)..(151): NCBI GI NO: 28274854 NR Description: ankyrin repeat protein E4_8 [synthetic construct]
  misc_feature (18)..(151): NCBI GI NO: 28274852 NR Description: ankyrin repeat protein E4_2 [synthetic construct]
  misc_feature (1)..(135): NCBI GI NO: 30690372 NR Description: ankyrin repeat-containing protein 2
  misc_feature (1)..(135): NCBI GI NO: 15237008 NR Description: ankyrin repeat-containing protein 2
  misc_feature (18)..(151): NCBI GI NO: 28274850 NR Description: ankyrin repeat protein E3_19 [synthetic construct]
MGVELAQPTAAAAAVTTAEQAQDLIDAARYDDLEDVVALFSAGVSLDSTDSQGRTALHMASANGHLAMVEYLIQNGANVNATNMEKNTPLHWACLNGRIEVIRALISAGASVSALNSHEKTPMDEAVTTGKMHVIDAIGAAVAQAELDGVTVS

SEQ ID NO: 28251 - protein, 95 aa, Zea mays subsp. mays
  peptide (1)..(95): Ceres Seq. ID no. 12341740
  misc_feature (27)..(58): Pfam Name: Pfam Description:  Ankyrin repeat
  misc_feature (1)..(95): NCBI GI NO: 34899080 NR Description: contains ESTs AU031990
  misc_feature (1)..(95): NCBI GI NO: 30684047 NR Description: expressed protein [Arabidopsis thaliana]
  misc_feature (1)..(95): NCBI GI NO: 14586362 NR Description: putative protein [Arabidopsis thaliana]
  misc_feature (1)..(77): NCBI GI NO: 28373837 NR Description: Chain A
  misc_feature (1)..(93): NCBI GI NO: 28373666 NR Description: Chain A
  misc_feature (1)..(93): NCBI GI NO: 28274854 NR Description: ankyrin repeat protein E4_8 [synthetic construct]
  misc_feature (1)..(93): NCBI GI NO: 28274852 NR Description: ankyrin repeat protein E4_2 [synthetic construct]
  misc_feature (1)..(77): NCBI GI NO: 30690372 NR Description: ankyrin repeat-containing protein 2
  misc_feature (1)..(77): NCBI GI NO: 15237008 NR Description: ankyrin repeat-containing protein 2
  misc_feature (1)..(93): NCBI GI NO: 28274850 NR Description: ankyrin repeat protein E3_19 [synthetic construct]
MASANGHLAMVEYLIQNGANVNATNMEKNTPLHWACLNGRIEVIRALISAGASVSALNSHEKTPMDEAVTTGKMHVIDAIGAAVAQAELDGVTVS

SEQ ID NO: 28252 - protein, 86 aa, Zea mays subsp. mays
  peptide (1)..(86): Ceres Seq. ID no. 12341741
  misc_feature (18)..(49): Pfam Name: Pfam Description:  Ankyrin repeat
  misc_feature (1)..(86): NCBI GI NO: 34899080 NR Description: contains ESTs AU031990
  misc_feature (1)..(86): NCBI GI NO: 30684047 NR Description: expressed protein [Arabidopsis thaliana]
  misc_feature (1)..(86): NCBI GI NO: 14586362 NR Description: putative protein [Arabidopsis thaliana]
  misc_feature (1)..(68): NCBI GI NO: 28373837 NR Description: Chain A
  misc_feature (1)..(84): NCBI GI NO: 28373666 NR Description: Chain A
  misc_feature (1)..(84): NCBI GI NO: 28274854 NR Description: ankyrin repeat protein E4_8 [synthetic construct]
  misc_feature (1)..(84): NCBI GI NO: 28274852 NR Description: ankyrin repeat protein E4_2 [synthetic construct]
  misc_feature (1)..(68): NCBI GI NO: 30690372 NR Description: ankyrin repeat-containing protein 2
  misc_feature (1)..(68): NCBI GI NO: 15237008 NR Description: ankyrin repeat-containing protein 2
  misc_feature (1)..(84): NCBI GI NO: 28274850 NR Description: ankyrin repeat protein E3_19 [synthetic construct]
MVEYLIQNGANVNATNMEKNTPLHWACLNGRIEVIRALISAGASVSALNSHEKTPMDEAVTTGKMHVIDAIGAAVAQAELDGVTVS

SEQ ID NO: 28253 - DNA, 1254 bp, Zea mays subsp. mays
  misc_feature (1)..(1254): Ceres Seq. ID no. 12402516
cagaagccaaattggtgctcctcttatctcgccgcgccgccaccgctccatttccgctcccccagcccccccaaaagaacctcgtaaccctactcgcgggattccgcaggccgccgcttgcttagggttcatcactcctgttcacacccgatggccgtgaacgaggcgagcagcagtggcggtggggaggaggggtgcgggtcgtggacccgcgagcaggagaaggcgttcgagaacgcggtggcgacgatgggcggggaggaggacggggacgcgaggtgggagaagctagcggaggccgtcgaggggaagacgccggaggaggtcaggcggcactacgagctgctggtggaggacgtcgacggcatcgagtcgggccgcgtcccgcttccggcgtacgcggctgacggcgctgccgaggaagggggcggtggcgggaagaagggaagtggcggaggagggacccatggggacaagcggtcggcgaagtccgccgagcaggagcgtaggaagggcatcgcctggacagaggacgagcacagattgttcctccttggacttgaaaagtatggcaaaggtgactggcggagcatctcgcggaactttgtgatctcaaggacgccgactcaagtagctagtcatgcacagaagtactttatccgtctgaactcaatgaacagagaaaggcggcgatcaagtatacatgacatcaccagtgtgaacaatggagatccatctactgcacagggtccaatcacaggccaaacaaatggtcaggctgcaaatcctggaaaaccatctaagcaatccccgcagccagcgaatacacctccaggcgtcgatgcttatggcacaacaattggacagccagttggtggcccccttgtctcagctgttggaactcccgttacactacctgtttccgctccacctcatctggcctatggcatgcgtgccccggttccaggagccgtagtacctggtgctccagtaaacattgctccgatgccctatccaatgccacccccaccatctcatgggtgacagggtgagggacacatttcaaatgctgtgtagcgtctaaacaaacccataatctccccctatgccagcattttgcgggtgtgctgctatgtctcaataaagcaatgccaataaacccttgtacattacaaactgttgtcacatgttgcattgaggacattgcagattgtgtactttgtgttgcatgcaaactttttcatgtacatctcc

SEQ ID NO: 28254 - protein, 297 aa, Zea mays subsp. mays
  peptide (1)..(297): Ceres Seq. ID no. 12402517
  misc_feature (122)..(169): Pfam Name: Pfam Description:  Myb-like DNA-binding domain
  misc_feature (17)..(295): NCBI GI NO: 15241652 NR Description: putative protein; protein id: At5g08520
  misc_feature (35)..(270): NCBI GI NO: 34914460 NR Description: putative syringolide-induced protein 1-3-1B
  misc_feature (49)..(291): NCBI GI NO: 18402458 NR Description: Expressed protein; protein id: At1g49010
  misc_feature (6)..(197): NCBI GI NO: 18874263 NR Description: MYB-like transcription factor DIVARICATA
  misc_feature (1)..(243): NCBI GI NO: 15237776 NR Description: I-box binding factor - like protein
  misc_feature (19)..(222): NCBI GI NO: 19911577 NR Description: syringolide-induced protein 1-3-1A [Glycine max]
  misc_feature (19)..(235): NCBI GI NO: 19911579 NR Description: syringolide-induced protein 1-3-1B [Glycine max]
  misc_feature (19)..(211): NCBI GI NO: 18874265 NR Description: MYB-like transcription factor DVL1
  misc_feature (13)..(219): NCBI GI NO: 7446171 NR Description: probable MYB family transcription factor
  misc_feature (13)..(219): NCBI GI NO: 30687381 NR Description: MYB family transcription factor -related
MAVNEASSSGGGEEGCGSWTREQEKAFENAVATMGGEEDGDARWEKLAEAVEGKTPEEVRRHYELLVEDVDGIESGRVPLPAYAADGAAEEGGGGGKKGSGGGGTHGDKRSAKSAEQERRKGIAWTEDEHRLFLLGLEKYGKGDWRSISRNFVISRTPTQVASHAQKYFIRLNSMNRERRRSSIHDITSVNNGDPSTAQGPITGQTNGQAANPGKPSKQSPQPANTPPGVDAYGTTIGQPVGGPLVSAVGTPVTLPVSAPPHLAYGMRAPVPGAVVPGAPVNIAPMPYPMPPPPSHG

SEQ ID NO: 28255 - protein, 264 aa, Zea mays subsp. mays
  peptide (1)..(264): Ceres Seq. ID no. 12402518
  misc_feature (89)..(136): Pfam Name: Pfam Description:  Myb-like DNA-binding domain
  misc_feature (1)..(262): NCBI GI NO: 15241652 NR Description: putative protein; protein id: At5g08520
  misc_feature (2)..(237): NCBI GI NO: 34914460 NR Description: putative syringolide-induced protein 1-3-1B
  misc_feature (16)..(258): NCBI GI NO: 18402458 NR Description: Expressed protein; protein id: At1g49010
  misc_feature (1)..(164): NCBI GI NO: 18874263 NR Description: MYB-like transcription factor DIVARICATA
  misc_feature (1)..(210): NCBI GI NO: 15237776 NR Description: I-box binding factor - like protein
  misc_feature (1)..(189): NCBI GI NO: 19911577 NR Description: syringolide-induced protein 1-3-1A [Glycine max]
  misc_feature (1)..(202): NCBI GI NO: 19911579 NR Description: syringolide-induced protein 1-3-1B [Glycine max]
  misc_feature (1)..(178): NCBI GI NO: 18874265 NR Description: MYB-like transcription factor DVL1
  misc_feature (1)..(186): NCBI GI NO: 7446171 NR Description: probable MYB family transcription factor
  misc_feature (1)..(186): NCBI GI NO: 30687381 NR Description: MYB family transcription factor -related
MGGEEDGDARWEKLAEAVEGKTPEEVRRHYELLVEDVDGIESGRVPLPAYAADGAAEEGGGGGKKGSGGGGTHGDKRSAKSAEQERRKGIAWTEDEHRLFLLGLEKYGKGDWRSISRNFVISRTPTQVASHAQKYFIRLNSMNRERRRSSIHDITSVNNGDPSTAQGPITGQTNGQAANPGKPSKQSPQPANTPPGVDAYGTTIGQPVGGPLVSAVGTPVTLPVSAPPHLAYGMRAPVPGAVVPGAPVNIAPMPYPMPPPPSHG

SEQ ID NO: 28256 - DNA, 1179 bp, Zea mays subsp. mays
  misc_feature (1)..(1179): Ceres Seq. ID no. 12340811
acaacaacttagcataacaaaagcccttgcccacgccatgacgctcagcaagaagcaaggcgcaggcactgatcagcaggccttgctggatgctcagctgcagctctggcaccacaccatcgcttttgtcaagtccatggcgctcaaggccgccgtagacctccgcatagcggacgccatccacctgcacggcggctcagccaccctctcgcagatagtcaccaaggtcacactccacccgtccaagataccatgcctgcgacgcctcatgcgcgtgctcactctcaccggcgtcttcagcgtcaacaccggcgccgttgtcgacgagcccgtttacgggctcacgccggcgtctcgccttctggtcggcccggggctgaaccagaccccgttcctgaccttgatgctcagcactttcttcgtgtcctccttcctcggcctcgacgagtggttccagcacgagacgggtccgtccccgttcgagctggccaatggccgggacatatggaccctgtccggccacgaccgagcttcggcaagctcttcgacgacgggatggtcgcggacagcggtttcatcatggacgtcgtggtcaaggagtgcggcgacgtgttccgaggggtcggctccctcgtcgacgtcgccggcgggctcggtggtgccacccagaccatcgcgaaggctttcccggacgtggcgtgcagcgtgctggacctcccacacgtcgtcgccaatgctcccaccgacaccaccgtgaagtacatcgccggcgacatgttcgagagcattccgtcggcaaacgttgtcttcctcaagtggattctgcatgactggggtgatgccgaatgcgtgaagatactgaagaactgcaagaaggctatatcatctcaagaagaagggaaggtagtgatactggatatggttgttggagcagggtcatccgacgagaagcatgtggagacgcaaatcgtattcgatctctttatgatgtttatcaatggcactgagcgagatgagacggagtggaagaagatcattttcgaagccgggtttagccgttacaagatcatacctgttctcggtgttcggtcgataatcgaggtctacccataaaaatctatgcaactcaagtatactgcatgcgtgaataatctgcgtgtgaaatcaaaactaggtgtg

SEQ ID NO: 28257 - protein, 286 aa, Zea mays subsp. mays
  peptide (1)..(286): Ceres Seq. ID no. 12340812
  misc_feature (93)..(261): Pfam Name: Pfam Description:  O-methyltransferase
  misc_feature (93)..(286): NCBI GI NO: 1353193 NR Description: O-METHYLTRANSFERASE ZRP4 (OMT)
  misc_feature (95)..(286): NCBI GI NO: 37530606 NR Description: putative o-methyltransferase ZRP4
  misc_feature (95)..(286): NCBI GI NO: 37530600 NR Description: putative o-methyltransferase ZRP4
  misc_feature (91)..(286): NCBI GI NO: 20514369 NR Description: orcinol O-methyltransferase [Rosa hybrid cultivar]
  misc_feature (91)..(286): NCBI GI NO: 20514367 NR Description: orcinol O-methyltransferase [Rosa hybrid cultivar]
  misc_feature (86)..(286): NCBI GI NO: 2282586 NR Description: methyltransferase [Prunus armeniaca]
  misc_feature (93)..(286): NCBI GI NO: 4098238 NR Description: o-methyltransferase [Triticum aestivum]
  misc_feature (92)..(286): NCBI GI NO: 22093735 NR Description: putative o-methyltransferase
  misc_feature (92)..(286): NCBI GI NO: 34909608 NR Description: putative o-methyltransferase
  misc_feature (91)..(277): NCBI GI NO: 27527926 NR Description: orcinol O-methyltransferase [Rosa hybrid cultivar]
MPATPHARAHSHRRLQRQHRRRCRRARLRAHAGVSPSGRPGAEPDPVPDLDAQHFLRVLLPRPRRVVPARDGSVPVRAGQWPGHMDPVRPRPSFGKLFDDGMVADSGFIMDVVVKECGDVFRGVGSLVDVAGGLGGATQTIAKAFPDVACSVLDLPHVVANAPTDTTVKYIAGDMFESIPSANVVFLKWILHDWGDAECVKILKNCKKAISSQEEGKVVILDMVVGAGSSDEKHVETQIVFDLFMMFINGTERDETEWKKIIFEAGFSRYKIIPVLGVRSIIEVYP

SEQ ID NO: 28258 - protein, 251 aa, Zea mays subsp. mays
  peptide (1)..(251): Ceres Seq. ID no. 12340813
  misc_feature (109)..(175): Pfam Name: Pfam Description:  O-methyltransferase
  misc_feature (23)..(175): NCBI GI NO: 1353193 NR Description: O-METHYLTRANSFERASE ZRP4 (OMT)
  misc_feature (9)..(185): NCBI GI NO: 37530606 NR Description: putative o-methyltransferase ZRP4
  misc_feature (9)..(184): NCBI GI NO: 37530600 NR Description: putative o-methyltransferase ZRP4
  misc_feature (15)..(179): NCBI GI NO: 20514369 NR Description: orcinol O-methyltransferase [Rosa hybrid cultivar]
  misc_feature (15)..(179): NCBI GI NO: 20514367 NR Description: orcinol O-methyltransferase [Rosa hybrid cultivar]
  misc_feature (28)..(175): NCBI GI NO: 2282586 NR Description: methyltransferase [Prunus armeniaca]
  misc_feature (28)..(185): NCBI GI NO: 4098238 NR Description: o-methyltransferase [Triticum aestivum]
  misc_feature (24)..(175): NCBI GI NO: 22093735 NR Description: putative o-methyltransferase
  misc_feature (13)..(175): NCBI GI NO: 34909608 NR Description: putative o-methyltransferase
  misc_feature (16)..(179): NCBI GI NO: 27527926 NR Description: orcinol O-methyltransferase [Rosa hybrid cultivar]
QQLSITKALAHAMTLSKKQGAGTDQQALLDAQLQLWHHTIAFVKSMALKAAVDLRIADAIHLHGGSATLSQIVTKVTLHPSKIPCLRRLMRVLTLTGVFSVNTGAVVDEPVYGLTPASRLLVGPGLNQTPFLTLMLSTFFVSSFLGLDEWFQHETGPSPFELANGRDIWTLSGHDRASASSSTTGWSRTAVSSWTSWSRSAATCSEGSAPSSTSPAGSVVPPRPSRRLSRTWRAACWTSHTSSPMLPPTPP

SEQ ID NO: 28259 - protein, 239 aa, Zea mays subsp. mays
  peptide (1)..(239): Ceres Seq. ID no. 12340814
  misc_feature (97)..(163): Pfam Name: Pfam Description:  O-methyltransferase
  misc_feature (11)..(163): NCBI GI NO: 1353193 NR Description: O-METHYLTRANSFERASE ZRP4 (OMT)
  misc_feature (1)..(173): NCBI GI NO: 37530606 NR Description: putative o-methyltransferase ZRP4
  misc_feature (1)..(172): NCBI GI NO: 37530600 NR Description: putative o-methyltransferase ZRP4
  misc_feature (3)..(167): NCBI GI NO: 20514369 NR Description: orcinol O-methyltransferase [Rosa hybrid cultivar]
  misc_feature (3)..(167): NCBI GI NO: 20514367 NR Description: orcinol O-methyltransferase [Rosa hybrid cultivar]
  misc_feature (16)..(163): NCBI GI NO: 2282586 NR Description: methyltransferase [Prunus armeniaca]
  misc_feature (16)..(173): NCBI GI NO: 4098238 NR Description: o-methyltransferase [Triticum aestivum]
  misc_feature (12)..(163): NCBI GI NO: 22093735 NR Description: putative o-methyltransferase
  misc_feature (1)..(163): NCBI GI NO: 34909608 NR Description: putative o-methyltransferase
  misc_feature (4)..(167): NCBI GI NO: 27527926 NR Description: orcinol O-methyltransferase [Rosa hybrid cultivar]
MTLSKKQGAGTDQQALLDAQLQLWHHTIAFVKSMALKAAVDLRIADAIHLHGGSATLSQIVTKVTLHPSKIPCLRRLMRVLTLTGVFSVNTGAVVDEPVYGLTPASRLLVGPGLNQTPFLTLMLSTFFVSSFLGLDEWFQHETGPSPFELANGRDIWTLSGHDRASASSSTTGWSRTAVSSWTSWSRSAATCSEGSAPSSTSPAGSVVPPRPSRRLSRTWRAACWTSHTSSPMLPPTPP

SEQ ID NO: 28260 - DNA, 1282 bp, Zea mays subsp. mays
  misc_feature (1)..(1282): Ceres Seq. ID no. 12346078
ctactttacacctcctcttcttcttcttcctcgtgcagcagctgtccatcgccgctgggttttctttgttggcattgggttttggaggagaggtcaaggctgagactcggagacgaaatgggtcataggatgttcagtcccttgggcttccttcttcttgccatcgtcgtcctctatggtggaacagagcagaggcgagcggaggcagcagaaggagggagcccgcacaggctgctggccaccatctcggtgtccaagccgtcctaccccacggtcaccacgcccatgtcggcctacggcgacccggtctccacgccagccaccccgtactcaacgttcccgtcgctggcgaccgggaacggcggtgccggtgccggtgcaggcggcggtgctggtgtaggcgggggcggcggcggcggcgggacgtggtgcgtggccagccagagcgcgagcccgaccgcgctgcaggtcgcgctggactacgcctgcggctatggcgccgactgctccccgatccagcagggcgggagctgcttcaaccccgacaccgtccacgaccacgcgtcctacgcctttaacagctactaccagaagaaccccgccccaaccagctgcgacttcggcggcacggccaccatcaccaacaccgatcccagttcagggtcgtgccagtacccatcgtcaagcggtggcgctcagagcacgatgcccccgccatccccgacgagcatgccgccgacagtgcccaccgccccgatgaccccgacgccgatgacgccggacaccaccccgaccaccggcaccccggtctacggattgtccccacccgactacggctcattgtccccacccgactctggctcgatgtcccctcccggctacggatcgacgtctcccccggactacaacgacgtcggcgccgccgcgacgacggggcagggcggcgcggcgctggcgctggcgcttctgtgcgtcctggtcgcgacagtatctctgcacgtctccaaatgagagcggcggcataggaggaaattatgcatgcctgtttcggttgagacgttacatggcgcgccccgtgcgtggtggctgaaagacgcacgcacaggtccatcgccgaggatctccggtggtgtgctgcccggcgccgggggagcattcgagcagtgttgcaagtctgcttagtgttgtataagaaatgaggcgagcttctagcagcgcccgagttctagcagatgcaccagatgtttatacatacatacatacatgcttaaatatataatgg

SEQ ID NO: 28261 - protein, 336 aa, Zea mays subsp. mays
  peptide (1)..(336): Ceres Seq. ID no. 12346079
  misc_feature (237)..(300): Pfam Name: Pfam Description:  Extensin-like region
  misc_feature (48)..(332): NCBI GI NO: 34912962 NR Description: beta-1,3 glucanase-like protein
  misc_feature (90)..(333): NCBI GI NO: 22329437 NR Description: unknown protein; protein id: At1g09460.1
  misc_feature (118)..(222): NCBI GI NO: 15218919 NR Description: beta-1,3 glucanase, putative; protein id:At1g29380
  misc_feature (85)..(308): NCBI GI NO: 31249724 NR Description: putative glucanase
  misc_feature (137)..(295): NCBI GI NO: 18394637 NR Description: glycosyl hydrolase family 17; protein id:At1g18650
  misc_feature (137)..(323): NCBI GI NO: 30697478 NR Description: glycosyl hydrolase family 17
  misc_feature (90)..(219): NCBI GI NO: 25402549 NR Description: hypothetical protein
  misc_feature (137)..(282): NCBI GI NO: 21592859 NR Description: unknown [Arabidopsis thaliana]
  misc_feature (142)..(287): NCBI GI NO: 22775658 NR Description: contains ESTs C91599
  misc_feature (83)..(222): NCBI GI NO: 37533178 NR Description: hypothetical protein
LLYTSSSSSSSCSSCPSPLGFLCWHWVLEERSRLRLGDEMGHRMFSPLGFLLLAIVVLYGGTEQRRAEAAEGGSPHRLLATISVSKPSYPTVTTPMSAYGDPVSTPATPYSTFPSLATGNGGAGAGAGGGAGVGGGGGGGGTWCVASQSASPTALQVALDYACGYGADCSPIQQGGSCFNPDTVHDHASYAFNSYYQKNPAPTSCDFGGTATITNTDPSSGSCQYPSSSGGAQSTMPPPSPTSMPPTVPTAPMTPTPMTPDTTPTTGTPVYGLSPPDYGSLSPPDSGSMSPPGYGSTSPPDYNDVGAAATTGQGGAALALALLCVLVATVSLHVSK

SEQ ID NO: 28262 - protein, 297 aa, Zea mays subsp. mays
  peptide (1)..(297): Ceres Seq. ID no. 12346080
  misc_feature (198)..(261): Pfam Name: Pfam Description:  Extensin-like region
  misc_feature (9)..(293): NCBI GI NO: 34912962 NR Description: beta-1,3 glucanase-like protein
  misc_feature (51)..(294): NCBI GI NO: 22329437 NR Description: unknown protein; protein id: At1g09460.1
  misc_feature (79)..(183): NCBI GI NO: 15218919 NR Description: beta-1,3 glucanase, putative; protein id:At1g29380
  misc_feature (46)..(269): NCBI GI NO: 31249724 NR Description: putative glucanase
  misc_feature (98)..(256): NCBI GI NO: 18394637 NR Description: glycosyl hydrolase family 17; protein id:At1g18650
  misc_feature (98)..(284): NCBI GI NO: 30697478 NR Description: glycosyl hydrolase family 17
  misc_feature (51)..(180): NCBI GI NO: 25402549 NR Description: hypothetical protein
  misc_feature (98)..(243): NCBI GI NO: 21592859 NR Description: unknown [Arabidopsis thaliana]
  misc_feature (103)..(248): NCBI GI NO: 22775658 NR Description: contains ESTs C91599
  misc_feature (44)..(183): NCBI GI NO: 37533178 NR Description: hypothetical protein
MGHRMFSPLGFLLLAIVVLYGGTEQRRAEAAEGGSPHRLLATISVSKPSYPTVTTPMSAYGDPVSTPATPYSTFPSLATGNGGAGAGAGGGAGVGGGGGGGGTWCVASQSASPTALQVALDYACGYGADCSPIQQGGSCFNPDTVHDHASYAFNSYYQKNPAPTSCDFGGTATITNTDPSSGSCQYPSSSGGAQSTMPPPSPTSMPPTVPTAPMTPTPMTPDTTPTTGTPVYGLSPPDYGSLSPPDSGSMSPPGYGSTSPPDYNDVGAAATTGQGGAALALALLCVLVATVSLHVSK

SEQ ID NO: 28263 - protein, 293 aa, Zea mays subsp. mays
  peptide (1)..(293): Ceres Seq. ID no. 12346081
  misc_feature (194)..(257): Pfam Name: Pfam Description:  Extensin-like region
  misc_feature (5)..(289): NCBI GI NO: 34912962 NR Description: beta-1,3 glucanase-like protein
  misc_feature (47)..(290): NCBI GI NO: 22329437 NR Description: unknown protein; protein id: At1g09460.1
  misc_feature (75)..(179): NCBI GI NO: 15218919 NR Description: beta-1,3 glucanase, putative; protein id:At1g29380
  misc_feature (42)..(265): NCBI GI NO: 31249724 NR Description: putative glucanase
  misc_feature (94)..(252): NCBI GI NO: 18394637 NR Description: glycosyl hydrolase family 17; protein id:At1g18650
  misc_feature (94)..(280): NCBI GI NO: 30697478 NR Description: glycosyl hydrolase family 17
  misc_feature (47)..(176): NCBI GI NO: 25402549 NR Description: hypothetical protein
  misc_feature (94)..(239): NCBI GI NO: 21592859 NR Description: unknown [Arabidopsis thaliana]
  misc_feature (99)..(244): NCBI GI NO: 22775658 NR Description: contains ESTs C91599
  misc_feature (40)..(179): NCBI GI NO: 37533178 NR Description: hypothetical protein
MFSPLGFLLLAIVVLYGGTEQRRAEAAEGGSPHRLLATISVSKPSYPTVTTPMSAYGDPVSTPATPYSTFPSLATGNGGAGAGAGGGAGVGGGGGGGGTWCVASQSASPTALQVALDYACGYGADCSPIQQGGSCFNPDTVHDHASYAFNSYYQKNPAPTSCDFGGTATITNTDPSSGSCQYPSSSGGAQSTMPPPSPTSMPPTVPTAPMTPTPMTPDTTPTTGTPVYGLSPPDYGSLSPPDSGSMSPPGYGSTSPPDYNDVGAAATTGQGGAALALALLCVLVATVSLHVSK

SEQ ID NO: 28264 - DNA, 1217 bp, Zea mays subsp. mays
  misc_feature (1)..(1217): Ceres Seq. ID no. 12344527
ctcttcagtctcctcgcgccaacgaccacatcccaccgaacaccgatcaaggtaaacctgttcgctgctccgccagaagccgaggtcgagctgttcacggcagcgagcatgcaccacgatcccaaccccttcgacgagggcgccgacgagaaccccttctcgaatggaggcggaggagcgcgtggcggaggcgtcaagccgcagtacgggttccggccgacggagcccgcggggttcggcggcgggcaggggcgatgcgaccaccgacatccctctggacaccatgaacgattcgaaggggcaaggcgaaggagctgtctcagtgggagtcagatctcaggaggagggagtcggatatcaggaggagggaggaagctctcaagagcgctggggtgcccatggaggacaagaactggccgcctttcttcccaatcatccaccatgatattgccaatgagataccagcaaacgctcagaagttgcagtatcttgcgtttgcgagctggcttggtattgtgctttgcctcttttggaattttattgctgtcatagtctgttggatcagagggggagattctaaactatttttcctggctaccatctatggtatgcttggcatccctttgtcctacttgatgtggtatagacctctgtaccgagcaatgagaactgacagtgctttcagctttggatggtttttcctttgttacctgctccatattggtttttgcatatttgctgccattgctcctgcagttgtattccgtggaaaatcattaacgggtatactggcagcgatcgacaccttttctgatcatgcaatagttgggatcttttactttgtcggatttgccttgttttgcttggagacacttgtgagcatatgggttcttcagaaagtatacatgtacttcagagggcacaagtaggctatggaagcacttgcaatagtcaaccaactaccatctcatctgattgccatgtggttttgtatgttaggacaacgtatatttttccgtttgcattgtggagggtaagtacgactatatgtataattttcggtttgcatggtggagggtaaatacgactatattgtagcgtctctctcgactgatctgtttttaaccccaattctttgctcatatacaaattgtgctttgtatgcacttttgtttgctaccaaggctgcacattgtatgcacttctgttggtgcctt

SEQ ID NO: 28265 - protein, 183 aa, Zea mays subsp. mays
  peptide (1)..(183): Ceres Seq. ID no. 12344528
  misc_feature (37)..(84): NCBI GI NO: 38347080 NR Description: OSJNBa0006A01.21
  misc_feature (37)..(84): NCBI GI NO: 38567965 NR Description: OSJNBa0093F12.6
LFSLLAPTTTSHRTPIKVNLFAAPPEAEVELFTAASMHHDPNPFDEGADENPFSNGGGGARGGGVKPQYGFRPTEPAGFGGGQGRCDHRHPSGHHERFEGARRRSCLSGSQISGGGSRISGGGRKLSRALGCPWRTRTGRLSSQSSTMILPMRYQQTLRSCSILRLRAGLVLCFASFGILLLS

SEQ ID NO: 28266 - protein, 176 aa, Zea mays subsp. mays
  peptide (1)..(176): Ceres Seq. ID no. 12344529
  misc_feature (2)..(176): Pfam Name: Pfam Description:  SCAMP family
  misc_feature (1)..(176): NCBI GI NO: 38347080 NR Description: OSJNBa0006A01.21
  misc_feature (1)..(166): NCBI GI NO: 38567965 NR Description: OSJNBa0093F12.6
  misc_feature (1)..(176): NCBI GI NO: 15222550 NR Description: secretory carrier membrane protein, putative
  misc_feature (1)..(174): NCBI GI NO: 15219893 NR Description: secretory carrier membrane protein
  misc_feature (1)..(176): NCBI GI NO: 15226410 NR Description: putative secretory carrier-associated membraneprotein
  misc_feature (1)..(174): NCBI GI NO: 3941289 NR Description: similarity to SCAMP37 [Pisum sativum]
  misc_feature (1)..(174): NCBI GI NO: 15220305 NR Description: secretory carrier membrane protein, putative
  misc_feature (1)..(176): NCBI GI NO: 34899754 NR Description: putative secretory carrier membrane protein
  misc_feature (1)..(176): NCBI GI NO: 7109232 NR Description: secretory carrier membrane protein [Oryza sativa]
  misc_feature (1)..(176): NCBI GI NO: 18379111 NR Description: expressed protein; protein id: At1g03550
MEDKNWPPFFPIIHHDIANEIPANAQKLQYLAFASWLGIVLCLFWNFIAVIVCWIRGGDSKLFFLATIYGMLGIPLSYLMWYRPLYRAMRTDSAFSFGWFFLCYLLHIGFCIFAAIAPAVVFRGKSLTGILAAIDTFSDHAIVGIFYFVGFALFCLETLVSIWVLQKVYMYFRGHK

SEQ ID NO: 28267 - protein, 147 aa, Zea mays subsp. mays
  peptide (1)..(147): Ceres Seq. ID no. 12344530
  misc_feature (1)..(48): NCBI GI NO: 38347080 NR Description: OSJNBa0006A01.21
  misc_feature (1)..(48): NCBI GI NO: 38567965 NR Description: OSJNBa0093F12.6
MHHDPNPFDEGADENPFSNGGGGARGGGVKPQYGFRPTEPAGFGGGQGRCDHRHPSGHHERFEGARRRSCLSGSQISGGGSRISGGGRKLSRALGCPWRTRTGRLSSQSSTMILPMRYQQTLRSCSILRLRAGLVLCFASFGILLLS

SEQ ID NO: 28268 - DNA, 1579 bp, Zea mays subsp. mays
  misc_feature (1)..(1579): Ceres Seq. ID no. 12409052
aaaaagctaaagctgtgtaagcagcagaatccaatccaatccccagctcgcgccgccccctctaatccctcctccgcagacagaggccggcgttcactcgggcatccgcgggacggacggggagcaaagcctcagcggcgagtgcgggcgatgaggtcttcggaggcgtcgtcgcggctcgtgcaggagctcgtgctgtacgccgccagcgccgcgctcagctgcctcgtcctcttcgctggcctccgccacctagaccccaaccgcgcggcttcccagaaggcgcagcagcagaagaaggagatcgccaagcgcctcggccggcccctcgtctccaccacgccctatgaggacgtgattgcgtgcgacgtcatcaaccccgacagcatcgacgtcgaattcgactccatcggcggcctggaccagatcaagcaggcgctctacgagctcgtcatcctgcccctgcgccgccccgagctcttcaccttcggcaagctcctcagcccccagaagggcgtcctcctctatggcccgcccggcacaggcaagaccatgctcgccaaggccatcgccagggagtccggcgccgtcttcatcaatgtcaggatctccaatctcatgagcaagtggttcggggacgcacagaagcttgtggctgctgtctttagtctcgctcacaagctccagcctgctattatcttcattgacgaggtcgacagtttcttggggcagcgacggacaactgaccatgaagccatgactaatatgaagacagagttcatgtccctctgggatggcttcaccactgaccagaatgctcgtgtaatggtcctggctgctacaaacaggccttctgagctagatgaggccatccttaggcgctttactcagatatttgaaattggaattcctgttcagagtgaaaggagcaagatacttcaggttgtgttgaagggagaaaatgtcgagcataatattgattatgatcacattgcaagtttgtgcgagggctttactggatcagacatcctagaactgtgcaagcaggccgcattctatcctatcagggagctgttggacgatgagaaaaaaggtaggaaattagataaacctaggcccttgagacaatcagacttggagagagccttgtcagtgtctagaaagggcaagaaggctgcaagttcagcactgcagtcacctttgtgggtacggccgacagattcagaagacgatcagatctcgtgaaaatctgcagcggagtaaatgcaggcattacgtcgataccgttaggtttccttatgcagtttgcagaggttcaacatatttatatatgtattaattcgttttgcgtttggaacctccaccgttttttttgaagcaaactgcagctggcgaagtggcaagcgtgccctcgtgtttaagttgatcatttcaaaatacgtgccccctgtgggccgtaaaactgagaactctatagttgtctggtcaacagtcggtcttggttgcctctgtattttatcttcggtttgactactctagggtggcgaattacaacatacagtataatgcagaaaggttc

SEQ ID NO: 28269 - protein, 414 aa, Zea mays subsp. mays
  peptide (1)..(414): Ceres Seq. ID no. 12409053
  misc_feature (172)..(356): Pfam Name: AAA Pfam Description: ATPase family associated with various cellular activities
  misc_feature (53)..(402): NCBI GI NO: 15234242 NR Description: putative protein; protein id: At4g27680
  misc_feature (53)..(412): NCBI GI NO: 15238774 NR Description: 26S proteasome regulatory particle chain RPT6-like
  misc_feature (85)..(393): NCBI GI NO: 39794661 NR Description: Unknown (protein for IMAGE:4386512) [Homo sapiens]
  misc_feature (85)..(393): NCBI GI NO: 18033709 NR Description: FNP001 [Homo sapiens]
  misc_feature (48)..(407): NCBI GI NO: 27802754 NR Description: SI:zC156N3.1 (novel protein with ATPase domain)
  misc_feature (96)..(364): NCBI GI NO: 7487016 NR Description: hypothetical protein T14P8
  misc_feature (92)..(372): NCBI GI NO: 18407974 NR Description: expressed protein; protein id: At1g64110
  misc_feature (92)..(372): NCBI GI NO: 30696968 NR Description: expressed protein [Arabidopsis thaliana]
  misc_feature (94)..(393): NCBI GI NO: 21740032 NR Description: hypothetical protein [Homo sapiens]
  misc_feature (92)..(363): NCBI GI NO: 17065032 NR Description: similar to homeobox protein [Arabidopsis thaliana]
KKLKLCKQQNPIQSPARAAPSNPSSADRGRRSLGHPRDGRGAKPQRRVRAMRSSEASSRLVQELVLYAASAALSCLVLFAGLRHLDPNRAASQKAQQQKKEIAKRLGRPLVSTTPYEDVIACDVINPDSIDVEFDSIGGLDQIKQALYELVILPLRRPELFTFGKLLSPQKGVLLYGPPGTGKTMLAKAIARESGAVFINVRISNLMSKWFGDAQKLVAAVFSLAHKLQPAIIFIDEVDSFLGQRRTTDHEAMTNMKTEFMSLWDGFTTDQNARVMVLAATNRPSELDEAILRRFTQIFEIGIPVQSERSKILQVVLKGENVEHNIDYDHIASLCEGFTGSDILELCKQAAFYPIRELLDDEKKGRKLDKPRPLRQSDLERALSVSRKGKKAASSALQSPLWVRPTDSEDDQIS

SEQ ID NO: 28270 - protein, 364 aa, Zea mays subsp. mays
  peptide (1)..(364): Ceres Seq. ID no. 12409054
  misc_feature (122)..(306): Pfam Name: AAA Pfam Description: ATPase family associated with various cellular activities
  misc_feature (3)..(352): NCBI GI NO: 15234242 NR Description: putative protein; protein id: At4g27680
  misc_feature (3)..(362): NCBI GI NO: 15238774 NR Description: 26S proteasome regulatory particle chain RPT6-like
  misc_feature (35)..(343): NCBI GI NO: 39794661 NR Description: Unknown (protein for IMAGE:4386512) [Homo sapiens]
  misc_feature (35)..(343): NCBI GI NO: 18033709 NR Description: FNP001 [Homo sapiens]
  misc_feature (1)..(357): NCBI GI NO: 27802754 NR Description: SI:zC156N3.1 (novel protein with ATPase domain)
  misc_feature (46)..(314): NCBI GI NO: 7487016 NR Description: hypothetical protein T14P8
  misc_feature (42)..(322): NCBI GI NO: 18407974 NR Description: expressed protein; protein id: At1g64110
  misc_feature (42)..(322): NCBI GI NO: 30696968 NR Description: expressed protein [Arabidopsis thaliana]
  misc_feature (44)..(343): NCBI GI NO: 21740032 NR Description: hypothetical protein [Homo sapiens]
  misc_feature (42)..(313): NCBI GI NO: 17065032 NR Description: similar to homeobox protein [Arabidopsis thaliana]
MRSSEASSRLVQELVLYAASAALSCLVLFAGLRHLDPNRAASQKAQQQKKEIAKRLGRPLVSTTPYEDVIACDVINPDSIDVEFDSIGGLDQIKQALYELVILPLRRPELFTFGKLLSPQKGVLLYGPPGTGKTMLAKAIARESGAVFINVRISNLMSKWFGDAQKLVAAVFSLAHKLQPAIIFIDEVDSFLGQRRTTDHEAMTNMKTEFMSLWDGFTTDQNARVMVLAATNRPSELDEAILRRFTQIFEIGIPVQSERSKILQVVLKGENVEHNIDYDHIASLCEGFTGSDILELCKQAAFYPIRELLDDEKKGRKLDKPRPLRQSDLERALSVSRKGKKAASSALQSPLWVRPTDSEDDQIS

SEQ ID NO: 28271 - protein, 230 aa, Zea mays subsp. mays
  peptide (1)..(230): Ceres Seq. ID no. 12409055
  misc_feature (1)..(172): Pfam Name: AAA Pfam Description: ATPase family associated with various cellular activities
  misc_feature (1)..(218): NCBI GI NO: 15234242 NR Description: putative protein; protein id: At4g27680
  misc_feature (1)..(228): NCBI GI NO: 15238774 NR Description: 26S proteasome regulatory particle chain RPT6-like
  misc_feature (1)..(209): NCBI GI NO: 39794661 NR Description: Unknown (protein for IMAGE:4386512) [Homo sapiens]
  misc_feature (1)..(209): NCBI GI NO: 18033709 NR Description: FNP001 [Homo sapiens]
  misc_feature (1)..(223): NCBI GI NO: 27802754 NR Description: SI:zC156N3.1 (novel protein with ATPase domain)
  misc_feature (1)..(180): NCBI GI NO: 7487016 NR Description: hypothetical protein T14P8
  misc_feature (1)..(188): NCBI GI NO: 18407974 NR Description: expressed protein; protein id: At1g64110
  misc_feature (1)..(188): NCBI GI NO: 30696968 NR Description: expressed protein [Arabidopsis thaliana]
  misc_feature (1)..(209): NCBI GI NO: 21740032 NR Description: hypothetical protein [Homo sapiens]
  misc_feature (1)..(179): NCBI GI NO: 17065032 NR Description: similar to homeobox protein [Arabidopsis thaliana]
MLAKAIARESGAVFINVRISNLMSKWFGDAQKLVAAVFSLAHKLQPAIIFIDEVDSFLGQRRTTDHEAMTNMKTEFMSLWDGFTTDQNARVMVLAATNRPSELDEAILRRFTQIFEIGIPVQSERSKILQVVLKGENVEHNIDYDHIASLCEGFTGSDILELCKQAAFYPIRELLDDEKKGRKLDKPRPLRQSDLERALSVSRKGKKAASSALQSPLWVRPTDSEDDQIS

SEQ ID NO: 28272 - DNA, 1772 bp, Zea mays subsp. mays
  misc_feature (1)..(1772): Ceres Seq. ID no. 12406872
ccaagcggtgggggtggaggagcagcagctggtgcaggtgcagcagcaggggacgacgacttcgccttctactgctcctacctccaggacgccgacgctgccgccgcctcagcgacgtcgacgctcgccctcgccgtcgacgaccccaaccccaaccccagcgccgcagggatgacgaacggccggcgccggaagcagcgcggggcagaggacgccggagccgccggggaaggggaggaggaggccaagaaggacggcaagaagcggtccatagccaagctgctcacctcgctggcggcgctggaggcggaggagcacgccgaccgcgcgggcgccgcggacgcgtccaggcgggagctggcgctgctcgagtccaacgccgacacccgctcgcaggccaccatggactactacgccaagatggagagcagcttcgacgccaccgccgagtccgaggccgccgccaggtccaagcgctccaggctcgccgcgtcggccgccaccgcggccgtcgtggccggggaggaggcggcagcgtcagcggcggcgtcgccctccgcgtcggcctcgccgacgcgcgccgcggggcaggggcagggaggccaccaccagcgccggctgtgggtcaaggaccggtcgcgcgcgtggtgggaccggtgcaacagcgccgactaccggaggaggagttccggcgcgcgttccggatggggcgcgggaccttcgacatgatctgcgacgcgctgggctcctcggtggccaaggaggacaccatgctccgcgccgccatccccgtccgccagcgcgtcgccgtctgcgtctggcgcctcgccacgggggagccgctccgcctcgtttccaagcgcttcggcctcggcatctccacctgccacaagctcgtcctggaggtgtgcgccgccatcaagtccgtgctcatgccgcgcttcctgcagtggcccgacgccgacgccgcggcgcgcttcaaggagggcttcgagcgcgcctcgggcgtgccgggcgtcatcggcgccatgtacaccacccacatccccatcatcgcgcccaagatctcggtggcggcctacttcaaccgccgccacacggagcgcaaccagaagacgtcctactccatcactctccagggcgtcgtcggccccgacggcgccttcaccgacgtctgcatcggctggcccggctccatgcccgacgaccaggtcctggagaagtccatgctccaccagcgcgccgcggcggggatgatgcacgactcgtggctggtggctggcgccagctacccgctcatggactgggtgctggtgccgtacacgcaccccaacctgacgtggacgcagcacgcgttcaacgagaaggtggccgagctccggcgcgtcgcggtggaggcgttcgcgcgcctcaaggcgcgctgggcgtgcctgcagaagcgcaccgaggtcaagctgcaggacctccccgtcgtgctgggcgcctgctgcgtgctccacaacatctgcgagattcggggcgaggaggtggacccagccatccgctgcgaactggtggacgacgagaccacgccggagaaccccgtgcgctccgagacggccagtcgcgccagggacaacatcgcgcacaacctgctccaccgtggcttgggcggcaacacattcttctgatctcatccgtcaccttcttcttttttatgctttgctagtacagtagtacagaattgggctggaacaagaaagaaataggcattcttttcttttaattacact

SEQ ID NO: 28273 - protein, 555 aa, Zea mays subsp. mays
  peptide (1)..(555): Ceres Seq. ID no. 12406873
  misc_feature (70)..(555): NCBI GI NO: 21902022 NR Description: B1097D05.23
  misc_feature (225)..(554): NCBI GI NO: 15239835 NR Description: putative protein; protein id: At5g12010
  misc_feature (177)..(551): NCBI GI NO: 30688449 NR Description: expressed protein [Arabidopsis thaliana]
  misc_feature (177)..(551): NCBI GI NO: 21592524 NR Description: unknown [Arabidopsis thaliana]
  misc_feature (177)..(551): NCBI GI NO: 7452044 NR Description: hypothetical protein F27B13
  misc_feature (225)..(555): NCBI GI NO: 34906342 NR Description: unnamed protein product
  misc_feature (62)..(107): NCBI GI NO: 34906342 NR Description: unnamed protein product
  misc_feature (229)..(544): NCBI GI NO: 15233248 NR Description: putative protein; protein id: At3g55350
  misc_feature (224)..(501): NCBI GI NO: 18412695 NR Description: putative protein; protein id: At3g63270
  misc_feature (196)..(501): NCBI GI NO: 34908114 NR Description: P0031D11.14
KRWGWRSSSWCRCSSRGRRLRLLLLLPPGRRRCRRLSDVDARPRRRRPQPQPQRRRDDERPAPEAARGRGRRSRRGRGGGGQEGRQEAVHSQAAHLAGGAGGGGARRPRGRRGRVQAGAGAARVQRRHPLAGHHGLLRQDGEQLRRHRRVRGRRQVQALQARRVGRHRGRRGRGGGGSVSGGVALRVGLADARRGAGAGRPPPAPAVGQGPVARVVGPVQQRRLPEEEFRRAFRMGRGTFDMICDALGSSVAKEDTMLRAAIPVRQRVAVCVWRLATGEPLRLVSKRFGLGISTCHKLVLEVCAAIKSVLMPRFLQWPDADAAARFKEGFERASGVPGVIGAMYTTHIPIIAPKISVAAYFNRRHTERNQKTSYSITLQGVVGPDGAFTDVCIGWPGSMPDDQVLEKSMLHQRAAAGMMHDSWLVAGASYPLMDWVLVPYTHPNLTWTQHAFNEKVAELRRVAVEAFARLKARWACLQKRTEVKLQDLPVVLGACCVLHNICEIRGEEVDPAIRCELVDDETTPENPVRSETASRARDNIAHNLLHRGLGGNTFF

SEQ ID NO: 28274 - protein, 321 aa, Zea mays subsp. mays
  peptide (1)..(321): Ceres Seq. ID no. 12406874
  misc_feature (1)..(321): NCBI GI NO: 21902022 NR Description: B1097D05.23
  misc_feature (1)..(320): NCBI GI NO: 15239835 NR Description: putative protein; protein id: At5g12010
  misc_feature (1)..(317): NCBI GI NO: 30688449 NR Description: expressed protein [Arabidopsis thaliana]
  misc_feature (1)..(317): NCBI GI NO: 21592524 NR Description: unknown [Arabidopsis thaliana]
  misc_feature (1)..(317): NCBI GI NO: 7452044 NR Description: hypothetical protein F27B13
  misc_feature (1)..(321): NCBI GI NO: 34906342 NR Description: unnamed protein product
  misc_feature (1)..(310): NCBI GI NO: 15233248 NR Description: putative protein; protein id: At3g55350
  misc_feature (1)..(267): NCBI GI NO: 18412695 NR Description: putative protein; protein id: At3g63270
  misc_feature (1)..(267): NCBI GI NO: 34908114 NR Description: P0031D11.14
  misc_feature (1)..(289): NCBI GI NO: 25553597 NR Description: OJ1656_E11.28
MGRGTFDMICDALGSSVAKEDTMLRAAIPVRQRVAVCVWRLATGEPLRLVSKRFGLGISTCHKLVLEVCAAIKSVLMPRFLQWPDADAAARFKEGFERASGVPGVIGAMYTTHIPIIAPKISVAAYFNRRHTERNQKTSYSITLQGVVGPDGAFTDVCIGWPGSMPDDQVLEKSMLHQRAAAGMMHDSWLVAGASYPLMDWVLVPYTHPNLTWTQHAFNEKVAELRRVAVEAFARLKARWACLQKRTEVKLQDLPVVLGACCVLHNICEIRGEEVDPAIRCELVDDETTPENPVRSETASRARDNIAHNLLHRGLGGNTFF

SEQ ID NO: 28275 - protein, 314 aa, Zea mays subsp. mays
  peptide (1)..(314): Ceres Seq. ID no. 12406875
  misc_feature (1)..(314): NCBI GI NO: 21902022 NR Description: B1097D05.23
  misc_feature (1)..(313): NCBI GI NO: 15239835 NR Description: putative protein; protein id: At5g12010
  misc_feature (1)..(310): NCBI GI NO: 30688449 NR Description: expressed protein [Arabidopsis thaliana]
  misc_feature (1)..(310): NCBI GI NO: 21592524 NR Description: unknown [Arabidopsis thaliana]
  misc_feature (1)..(310): NCBI GI NO: 7452044 NR Description: hypothetical protein F27B13
  misc_feature (1)..(314): NCBI GI NO: 34906342 NR Description: unnamed protein product
  misc_feature (1)..(303): NCBI GI NO: 15233248 NR Description: putative protein; protein id: At3g55350
  misc_feature (1)..(260): NCBI GI NO: 18412695 NR Description: putative protein; protein id: At3g63270
  misc_feature (1)..(260): NCBI GI NO: 34908114 NR Description: P0031D11.14
  misc_feature (1)..(282): NCBI GI NO: 25553597 NR Description: OJ1656_E11.28
MICDALGSSVAKEDTMLRAAIPVRQRVAVCVWRLATGEPLRLVSKRFGLGISTCHKLVLEVCAAIKSVLMPRFLQWPDADAAARFKEGFERASGVPGVIGAMYTTHIPIIAPKISVAAYFNRRHTERNQKTSYSITLQGVVGPDGAFTDVCIGWPGSMPDDQVLEKSMLHQRAAAGMMHDSWLVAGASYPLMDWVLVPYTHPNLTWTQHAFNEKVAELRRVAVEAFARLKARWACLQKRTEVKLQDLPVVLGACCVLHNICEIRGEEVDPAIRCELVDDETTPENPVRSETASRARDNIAHNLLHRGLGGNTFF

SEQ ID NO: 28276 - DNA, 2183 bp, Zea mays subsp. mays
  misc_feature (1)..(2183): Ceres Seq. ID no. 12404878
  misc_feature (460)..(460): n is a, c, t, g, unknown, or other
  misc_feature (143)..(143): n is a, c, t, g, unknown, or other
  misc_feature (487)..(487): n is a, c, t, g, unknown, or other
  misc_feature (403)..(403): n is a, c, t, g, unknown, or other
  misc_feature (488)..(488): n is a, c, t, g, unknown, or other
  misc_feature (1323)..(1323): n is a, c, t, g, unknown, or other
gcattaccaagtgataataacggatctcattcagcctctctatagcataggaccaagatcatagtgccgtccctgccggcagagagcaagatggtctcacactcactctcagcatggtccatgtcctcggcgccgccgccggntggttcgccgccctggtcgccgtgggcctgtacacggcgctgcggtccgccgccaccttcctggcgtggctccaccgcgcgttcctgcgcccaggccgggacctggcggggcggtacgggacgtgggcggtggtgaccggcgccacggacggcatcgggcgcgcggtggcgctggagctggcgcgcgcggggctccacctcgtgctggtggggcggagccccgacaagctggcgcgggtggcgaaggagctctgcggccnccgcgccggcgtgcaaggtgcggagcgtggcgttcgacctcgccgtgaccggggacnccgcgcggcgcggggtggcgcgggtgnnggccgccgtggagggccgcgacgtgggcgtgctcgtcaacaacgccggcgcgacgtacccgtgcgccgcctacttccacgaggtggagggccccgtgtgggaggccgtggtgcgggtcaacgtcgaggccgccacgcggatcacgcgcgccctgctgccggcgatggcggccaggggcaggggcgccgtcgtcaacgtgggctccggctccagcgtcgtcgtcccggccttcccgctctacgccgtctacgcggccagcaaagcgtacgtcgaccagttttctcgaagcctgagtgtggaatacaaacaatacggcgtagacgtgcagtgccagatacccctgtacgtcgctaccaagatgtcgcccgtgaagggcgcgtctccgttcataccgtcgcccgaggagtacgccagggccgcccttcgctgcgttggctacgaggcgaggtgcgtcccgtactggcgccactcggtccagtggttcctggcgtccctagcgccggacgctgctctcaaccactggcgcctccaaactggcctccagaagaggaacgagatgaaggctctgctaaggggaaaagactgcagttagattaataataatagtaattgttgtatagattggaatattatagccttccagacagtactcgcgatcgtgcacttatttaccctctctgtttctttttagttgtcgctagatagttgaacaactaaaaaagaaaccaaagaagtatctgtcagctctattccgtacagacgcgaacccatggtacgcgcgtatgtatccatgtagtggttctttttcagtggtaagggtaaaacgcgcgaggtncaaaaaaaaaaaaaaaaaagcttctcgtgccgttttttttttttttttttatataatagcaaattttattcatgatattacacagatacggtaatgtaagatatcatattaagggcttgttcggttaggtgtggattgaagagtattggaggagattaaaacccctctattagaatagaaggaaaattaatcaccttcaattcccttcgatacagacacaaccaaacaagccctaatagggttgtagtcttatgaaattacacaagggagcatggctccttattctgcaactttgctttgagcttcaggctcgcacatggagaaggagacatccttaggcgctagcaccctcttcaacaggtttgaattcctgcagctccttgaacttctcccatggcttctcccataccttagcttcgtagagcttcttgacttcgccatccttcacttcaatagtgagatagtacatcgtgccagcaaccacttgtgtcttggccttcacaagcttctcgaaccccagaagagcattggccttcttgttgtgctcatcgacggcgaagcgggcgagctcctggaggtgaaggtcgttctcgctccccggcacgtcctggatgccgcccaccaacgtcccggtgttgttggccatggaatcctcctgtgcgttgcgggtggacgatacggcgagggcaagcagtatgagcagggcagacacgagtgagacgattcgatgtttgcgcatctggattggggaattggggcggaaatttatagccggagaagatcccgggagacgactggaggaggctacgatgaacgatctgtcaatgcgatattgttgtggcggatatcattgtgctgct

SEQ ID NO: 28277 - protein, 323 aa, Zea mays subsp. mays
  peptide (1)..(323): Ceres Seq. ID no. 12404879
  misc_feature (1)..(94): NCBI GI NO: 7489413 NR Description: probable b-keto acyl reductase (EC 1
  misc_feature (5)..(96): NCBI GI NO: 38345332 NR Description: OSJNBa0081L15.5
  misc_feature (1)..(94): NCBI GI NO: 7489808 NR Description: probable beta-keto acyl reductase - maize
  misc_feature (11)..(94): NCBI GI NO: 28565601 NR Description: putative 3-ketoacyl-CoA reductase 2
  misc_feature (11)..(94): NCBI GI NO: 28565597 NR Description: putative 3-ketoacyl-CoA reductase 1
  misc_feature (11)..(93): NCBI GI NO: 15221751 NR Description: putative b-keto acyl reductase
  misc_feature (11)..(94): NCBI GI NO: 18408847 NR Description: Expressed protein; protein id: At1g67730
  misc_feature (38)..(94): NCBI GI NO: 11072027 NR Description: F12A21.14 [Arabidopsis thaliana]
  misc_feature (6)..(100): NCBI GI NO: 38344108 NR Description: OSJNBb0050O03.5
  misc_feature (12)..(94): NCBI GI NO: 37589733 NR Description: Unknown (protein for MGC:73289) [Danio rerio]
  misc_feature (10)..(10): Xaa is any aa, unknown or other
  misc_feature (97)..(97): Xaa is any aa, unknown or other
  misc_feature (116)..(116): Xaa is any aa, unknown or other
  misc_feature (125)..(125): Xaa is any aa, unknown or other
MVHVLGAAAXWFAALVAVGLYTALRSAATFLAWLHRAFLRPGRDLAGRYGTWAVVTGATDGIGRAVALELARAGLHLVLVGRSPDKLARVAKELCGXRAGVQGAERGVRPRRDRGXRAARGGAGXGRRGGPRRGRARQQRRRDVPVRRLLPRGGGPRVGGRGAGQRRGRHADHARPAAGDGGQGQGRRRQRGLRLQRRRPGLPALRRLRGQQSVRRPVFSKPECGIQTIRRRRAVPDTPVRRYQDVAREGRVSVHTVARGVRQGRPSLRWLRGEVRPVLAPLGPVVPGVPSAGRCSQPLAPPNWPPEEERDEGSAKGKRLQLD

SEQ ID NO: 28278 - DNA, 721 bp, Zea mays subsp. mays
  misc_feature (1)..(721): Ceres Seq. ID no. 12374412
aaaaaccctagactgcacccccatcccgcagcagccaaaacctacctagccgccgccgcaggcggccccccatcgccgccaagatgcagatctttgtgaagactctgacggggaagaccatcactttggaggtggagtcctccgacaccattgacaatgtgaaggccaagatccaggacaaggagggcatccccccggaccagcagcggctcatcttcgccggcaagcagctcgaggacggtcgcaccctcgccgactacaacattcagaaggagtccaccctccacctggtgctccgcctccgcggtggcgccaagaagcgtaagaagaagacgtacaccaagcccaagaagatcaagcacaagcacaagaaggtgaagctctccgtgctgcagttctataaggtggacgacgccactggcaaggtgacccgcctccgcaaggagtgccccaacacagagtgcggcgcgggcgtcttcatggccaaccacttcgaccgccactactgcggcaagtgcggcctcacctatgtctacaaccagaaggcgtaattgcttgccccgatttgctttatccgccaacctatcaagcattcagatgttggttactcaaattgtatctcatttagatctgtctgaggttgaaacttaaatggagcagtagtatctatcatattggtacccctgttactgagtataattttgttttcatatccatcctt

SEQ ID NO: 28279 - protein, 155 aa, Zea mays subsp. mays; identical to SEQ ID NO: 25770
  peptide (1)..(155): Ceres Seq. ID no. 12374413
  misc_feature (1)..(74): Pfam Name: Pfam Description:  Ubiquitin family
  misc_feature (1)..(155): NCBI GI NO: 82733 NR Description: ubiquitin / ribosomal protein S27a - maize
  misc_feature (1)..(155): NCBI GI NO: 902525 NR Description: ubiquitin fusion protein
  misc_feature (1)..(155): NCBI GI NO: 100598 NR Description: ubiquitin / ribosomal protein S27a.1 - barley
  misc_feature (1)..(155): NCBI GI NO: 34894792 NR Description: ubiquitin / ribosomal protein S27a
  misc_feature (1)..(155): NCBI GI NO: 100599 NR Description: ubiquitin / ribosomal protein S27a.2 - barley
  misc_feature (1)..(155): NCBI GI NO: 1044940 NR Description: fusion gene [Zea mays]
  misc_feature (1)..(153): NCBI GI NO: 34581769 NR Description: ubiquitin extension protein [Cucumis sativus]
  misc_feature (1)..(155): NCBI GI NO: 541953 NR Description: ubiquitin/ribosomal protein S27a fusion protein -white lupine
  misc_feature (1)..(153): NCBI GI NO: 279636 NR Description: ubiquitin / ribosomal protein S27a - tomato
  misc_feature (1)..(155): NCBI GI NO: 541954 NR Description: ubiquitin/ribosomal protein S27a fusion protein -white lupine

SEQ ID NO: 28280 - DNA, 1054 bp, Zea mays subsp. mays
  misc_feature (1)..(1054): Ceres Seq. ID no. 12412719
agaggcgttggctcgtgtatttttgcaaatatctcctatcccttttctccctcccgcgatctcctccgctcgacgcctgtaccccgccgtcccgcgtccccggtccagctcgaaaccctagacctgtgcggctgtccctattctccccaacggaaagatgtactcggaccagatctccaccgggcgcaagcgctccatccacgaccgccttgacggcgacctccccgccggcacgggcgccggcggccgtgttcgtcacacggtgtccaagaggcaacggcagatagatgaaaaatggaagcatgatctgtatcgggaagacgatgaaccagcttcaaaatcaatagatccaaaggatttgcgattgaagcttcagaggcgaagttctcaacaaagctttaccagcacaaggagatctggtgtgcgtgatttacgtgagaagctatctggtataatgcacccacagccatcaaatgctgatccaaagcccaagccaaagccagtatcagaggttgttaacatctcaaggcgtcaaactgctgatgaaatgcctgcacgtcaaagcaagagagcaccaaaacagacttcattgaagaagacttcacagccaaaggctgaaagtccactcggcagtttcctgagttcccttgggcttgagaagtattcgattaccttccaggcagaggaggttgacatggcagccctaaggcatatgacggagagtgatctgaaagctttgggcattccaatgggtcctcggaagaagattatccttgccttggagccaagagcataagggaatggcaagtgtaggaaggtgggagggatttgctaggcatgctcatgtgcaagttcgataaaactctgtaaccacatcttggaaagggacaaagggtaacaacgacaatggtttgtgggcttcttgtaacacatatcctgccctgttgagcatgttcaacgaagtttaggatgttagaaggcaggccacggcgtgtattgatgcaacttctatttctgtgttgattaaatggtgcggtatacatgttggggctcc

SEQ ID NO: 28281 - protein, 212 aa, Zea mays subsp. mays
  peptide (1)..(212): Ceres Seq. ID no. 12412720
  misc_feature (152)..(208): Pfam Name: Sterile alpha motif Pfam Description: SAM domain
  misc_feature (1)..(198): NCBI GI NO: 39546279 NR Description: OSJNBa0083D01.12
  misc_feature (1)..(208): NCBI GI NO: 18397861 NR Description: expressed protein; protein id: At3g07170
  misc_feature (1)..(208): NCBI GI NO: 30695517 NR Description: expressed protein [Arabidopsis thaliana]
  misc_feature (41)..(210): NCBI GI NO: 38345636 NR Description: OSJNBb0048E02.6
  misc_feature (75)..(208): NCBI GI NO: 22330538 NR Description: hypothetical protein; protein id: At1g70180
MYSDQISTGRKRSIHDRLDGDLPAGTGAGGRVRHTVSKRQRQIDEKWKHDLYREDDEPASKSIDPKDLRLKLQRRSSQQSFTSTRRSGVRDLREKLSGIMHPQPSNADPKPKPKPVSEVVNISRRQTADEMPARQSKRAPKQTSLKKTSQPKAESPLGSFLSSLGLEKYSITFQAEEVDMAALRHMTESDLKALGIPMGPRKKIILALEPRA

SEQ ID NO: 28282 - protein, 113 aa, Zea mays subsp. mays
  peptide (1)..(113): Ceres Seq. ID no. 12412721
  misc_feature (53)..(109): Pfam Name: Sterile alpha motif Pfam Description: SAM domain
  misc_feature (1)..(99): NCBI GI NO: 39546279 NR Description: OSJNBa0083D01.12
  misc_feature (1)..(109): NCBI GI NO: 18397861 NR Description: expressed protein; protein id: At3g07170
  misc_feature (1)..(109): NCBI GI NO: 30695517 NR Description: expressed protein [Arabidopsis thaliana]
  misc_feature (1)..(111): NCBI GI NO: 38345636 NR Description: OSJNBb0048E02.6
  misc_feature (1)..(109): NCBI GI NO: 22330538 NR Description: hypothetical protein; protein id: At1g70180
MHPQPSNADPKPKPKPVSEVVNISRRQTADEMPARQSKRAPKQTSLKKTSQPKAESPLGSFLSSLGLEKYSITFQAEEVDMAALRHMTESDLKALGIPMGPRKKIILALEPRA

SEQ ID NO: 28283 - DNA, 1357 bp, Zea mays subsp. mays
  misc_feature (1)..(1357): Ceres Seq. ID no. 12356351
aggagaactcgaacagacatccgctccccgctcccgagtcccgagtaccggcctcgcggtctcggttcggctacgcccggtccctagagaaaggccacacacacccggacaccccccacttcttgctctcgcagtgtcgctcactcctgccgccaccatctggatcacgtcgccggcgccaatgtcggcgcacctcaccgtcgcgctgttgctcgcagtagccgccgcgtcggcccgcggctccgacgtgccgtcgttcccgctctcccaggcgcagtccccgtccaactcctcgtccccgtcgaacgcctcctcgccgccgtgtcacctcgacctctccgcccgagctcttcggtggcgtggcagcggcgtgcggctccagcggggggccgggctcgctcgaccgcggccgctgctgccctgtcctcgcggcctggctcttcgcggcgcacgcgcgcaccgcgctgtccgtgcccccggcacccgccccctcggcggtcgccggggaggaggggctggggcccggcgacgacgggcccatggtgccgtacgacaaccagaggtgcgtggacgcgctgggcgccgctttggagaagcgcggggtggcgctgccccggcccaacgcaacttgcgacactgtgctctgcttctgcggcatccggctccaccagatcggctcgctccgctgcccctccgcgttcgccgtcggcgctggcgctggcgccgcggccaagaacgccacgcccaccgccgccgtgaagggcctggagaagagctgccgcaacgcctcctacgccggctgctctcgatgcgtgcagtctctgcaaaagctgaaggggaacgtgagccgcgaggtctccggtgccggcggcgaccgcgcgcggcggatgctggggcgggactgccagcttatgggcctcacgtggctgctggccaagaacaagacggcgtacatccccaccgtctccgccgtgctgcgcgccatgctctacaccgcgcgcccgacggagtccgccggcgcggcgccgcggtgcagccccgaccaggagaacatgccgctggccgtggactcgctgcagttcgagcgcaccggcagcaccacgggatccgcggctgccaacgcgacgccgcgcggcgccctcctcctcggcctcgcgctcggcctgacgatcggccggtgggatgcgttctggttcttgtgaaccaatgcaaagagggctggaccgctgcagggcgtagggtcggtggtggaaccttgtcgatagacgtatcttgtagtgctagtcgttagcaggaggtactgtagcttattttgcatagcgaggatttggcagagatgacggcatgcatggctgtg

SEQ ID NO: 28284 - protein, 429 aa, Zea mays subsp. mays
  peptide (1)..(429): Ceres Seq. ID no. 12356352
  misc_feature (61)..(166): NCBI GI NO: 34394002 NR Description: unknown protein
  misc_feature (106)..(368): NCBI GI NO: 23106243 NR Description: hypothetical protein [Azotobacter vinelandii]
GELEQTSAPRSRVPSTGLAVSVRLRPVPRERPHTPGHPPLLALAVSLTPAATIWITSPAPMSAHLTVALLLAVAAASARGSDVPSFPLSQAQSPSNSSSPSNASSPPCHLDLSARALRWRGSGVRLQRGAGLARPRPLLPCPRGLALRGARAHRAVRAPGTRPLGGRRGGGAGARRRRAHGAVRQPEVRGRAGRRFGEARGGAAPAQRNLRHCALLLRHPAPPDRLAPLPLRVRRRRWRWRRGQERHAHRRREGPGEELPQRLLRRLLSMRAVSAKAEGEREPRGLRCRRRPRAADAGAGLPAYGPHVAAGQEQDGVHPHRLRRAARHALHRAPDGVRRRGAAVQPRPGEHAAGRGLAAVRAHRQHHGIRGCQRDAARRPPPRPRARPDDRPVGCVLVLVNQCKEGWTAAGRRVGGGTLSIDVSCSASR

SEQ ID NO: 28285 - protein, 369 aa, Zea mays subsp. mays
  peptide (1)..(369): Ceres Seq. ID no. 12356353
  misc_feature (1)..(106): NCBI GI NO: 34394002 NR Description: unknown protein
  misc_feature (46)..(308): NCBI GI NO: 23106243 NR Description: hypothetical protein [Azotobacter vinelandii]
MSAHLTVALLLAVAAASARGSDVPSFPLSQAQSPSNSSSPSNASSPPCHLDLSARALRWRGSGVRLQRGAGLARPRPLLPCPRGLALRGARAHRAVRAPGTRPLGGRRGGGAGARRRRAHGAVRQPEVRGRAGRRFGEARGGAAPAQRNLRHCALLLRHPAPPDRLAPLPLRVRRRRWRWRRGQERHAHRRREGPGEELPQRLLRRLLSMRAVSAKAEGEREPRGLRCRRRPRAADAGAGLPAYGPHVAAGQEQDGVHPHRLRRAARHALHRAPDGVRRRGAAVQPRPGEHAAGRGLAAVRAHRQHHGIRGCQRDAARRPPPRPRARPDDRPVGCVLVLVNQCKEGWTAAGRRVGGGTLSIDVSCSASR

SEQ ID NO: 28286 - protein, 220 aa, Zea mays subsp. mays
  peptide (1)..(220): Ceres Seq. ID no. 12356354
  misc_feature (1)..(212): NCBI GI NO: 34394002 NR Description: unknown protein
  misc_feature (1)..(188): NCBI GI NO: 18417127 NR Description: expressed protein; protein id: At4g28100
  misc_feature (1)..(188): NCBI GI NO: 21593735 NR Description: unknown [Arabidopsis thaliana]
  misc_feature (1)..(188): NCBI GI NO: 18401752 NR Description: expressed protein; protein id: At3g18050
MVPYDNQRCVDALGAALEKRGVALPRPNATCDTVLCFCGIRLHQIGSLRCPSAFAVGAGAGAAAKNATPTAAVKGLEKSCRNASYAGCSRCVQSLQKLKGNVSREVSGAGGDRARRMLGRDCQLMGLTWLLAKNKTAYIPTVSAVLRAMLYTARPTESAGAAPRCSPDQENMPLAVDSLQFERTGSTTGSAAANATPRGALLLGLALGLTIGRWDAFWFL

SEQ ID NO: 28287 - DNA, 1345 bp, Zea mays subsp. mays
  misc_feature (1)..(1345): Ceres Seq. ID no. 12348011
actccggcattcgcccccaaaaaatcgagccgaaaaagatcaaaagaaaaaaaaaagaagaaaaaaaaccctaaccactccgatcgaatcatccgagggccgcagcagcccgacgaggctatgtctcaggcaaccgccgcctcccgggatcgcttcccctggtgatacaactcgggccgttcatttcatctttccgtggggatatgagggccgctccgaccgatccgcccacggcgccggcgaagtcgatgctgaggcggctgttcgatcgccagctcctgcggatctcgccagcggagcgtctaccgtcggcgggggcgggagagaaggatgaggcggagccgagctccgtgtgcctggacggcatggtgcgcagcttcatggaggacgacgtcggcagcgagaaggctgcccacgggggccggtactgtaactgcttccacggaggcgataattcagatgacgaggaggacgacgaagcggcggcggcggcctccgacgtcgccgagacgatcaagggcctcgtccactgcgccacgcttcgggagcgcaacctcctcgccgacgtgtgcgcgcacctggagcggcatcgcgaggcgggggcccggcggcgcgacctcctccgcctggtagcctcgtcgctgcgcggcgcggggcacgacgcctccgtctgcgtctcccgctgggacaagtccccgtcccacccggtcggcgagcacgcttacatcgacgtgctcctcccggcggcctcggaccgcggcgcgcgcgagcgcgtcctggtggacgtggacttccggtcggcgttcgaggtcgcgcgacccaccaaggcgtaccgcgccctgctgcagcggctgccggcggtgttcgtgggcaaggacgacaggctccgcctcctcgttgccgccgccgccgacgccgcgcgcgccagcctcaagaagcgcggcctccacctcccgccctggcgtaagcccgagtacatgcgcgccaagtggctctccccctaccaccgcgaggcgccggtggccgaagaggcggcctccgcctccgcggacgaggacgacgggttcggacccggaaccggaaccgccgcgtgacaactggacacttgcaatttttgtcttggaagaggttgtagctgcaaaagcttgagattctcttgaaattactctttgttcgggggttgtacctagagtaactatggactacggtgtgtgtgagagagagagagaggtatgcatcactcatcactgtgctgagtaccgcgcgagaaatgaaggcgaggggtatatcatgggtagtgctagttttaggaagagaaataaagcaaaatatcggattaatatcc

SEQ ID NO: 28288 - protein, 296 aa, Zea mays subsp. mays
  peptide (1)..(296): Ceres Seq. ID no. 12348012
  misc_feature (52)..(269): Pfam Name: DUF506 Pfam Description: Protein of unknown function
  misc_feature (1)..(287): NCBI GI NO: 37534384 NR Description: unknown protein
  misc_feature (16)..(287): NCBI GI NO: 20042978 NR Description: Hypothetical protein [Oryza sativa]
  misc_feature (3)..(294): NCBI GI NO: 34902608 NR Description: Unknown protein
  misc_feature (8)..(278): NCBI GI NO: 34897230 NR Description: unknown protein
  misc_feature (1)..(269): NCBI GI NO: 25408622 NR Description: hypothetical protein At2g38820
  misc_feature (1)..(283): NCBI GI NO: 15228917 NR Description: unknown protein; protein id: At3g22970.1
  misc_feature (1)..(132): NCBI GI NO: 18404867 NR Description: expressed protein; protein id: At2g38820
  misc_feature (135)..(269): NCBI GI NO: 18404867 NR Description: expressed protein; protein id: At2g38820
  misc_feature (1)..(283): NCBI GI NO: 28058790 NR Description: unknown protein [Arabidopsis thaliana]
  misc_feature (1)..(285): NCBI GI NO: 30682929 NR Description: expressed protein [Arabidopsis thaliana]
MRAAPTDPPTAPAKSMLRRLFDRQLLRISPAERLPSAGAGEKDEAEPSSVCLDGMVRSFMEDDVGSEKAAHGGRYCNCFHGGDNSDDEEDDEAAAAASDVAETIKGLVHCATLRERNLLADVCAHLERHREAGARRRDLLRLVASSLRGAGHDASVCVSRWDKSPSHPVGEHAYIDVLLPAASDRGARERVLVDVDFRSAFEVARPTKAYRALLQRLPAVFVGKDDRLRLLVAAAADAARASLKKRGLHLPPWRKPEYMRAKWLSPYHREAPVAEEAASASADEDDGFGPGTGTAA

SEQ ID NO: 28289 - protein, 281 aa, Zea mays subsp. mays
  peptide (1)..(281): Ceres Seq. ID no. 12348013
  misc_feature (37)..(254): Pfam Name: DUF506 Pfam Description: Protein of unknown function
  misc_feature (1)..(272): NCBI GI NO: 37534384 NR Description: unknown protein
  misc_feature (1)..(272): NCBI GI NO: 20042978 NR Description: Hypothetical protein [Oryza sativa]
  misc_feature (1)..(279): NCBI GI NO: 34902608 NR Description: Unknown protein
  misc_feature (1)..(263): NCBI GI NO: 34897230 NR Description: unknown protein
  misc_feature (1)..(254): NCBI GI NO: 25408622 NR Description: hypothetical protein At2g38820
  misc_feature (1)..(268): NCBI GI NO: 15228917 NR Description: unknown protein; protein id: At3g22970.1
  misc_feature (1)..(117): NCBI GI NO: 18404867 NR Description: expressed protein; protein id: At2g38820
  misc_feature (120)..(254): NCBI GI NO: 18404867 NR Description: expressed protein; protein id: At2g38820
  misc_feature (1)..(268): NCBI GI NO: 28058790 NR Description: unknown protein [Arabidopsis thaliana]
  misc_feature (1)..(270): NCBI GI NO: 30682929 NR Description: expressed protein [Arabidopsis thaliana]
MLRRLFDRQLLRISPAERLPSAGAGEKDEAEPSSVCLDGMVRSFMEDDVGSEKAAHGGRYCNCFHGGDNSDDEEDDEAAAAASDVAETIKGLVHCATLRERNLLADVCAHLERHREAGARRRDLLRLVASSLRGAGHDASVCVSRWDKSPSHPVGEHAYIDVLLPAASDRGARERVLVDVDFRSAFEVARPTKAYRALLQRLPAVFVGKDDRLRLLVAAAADAARASLKKRGLHLPPWRKPEYMRAKWLSPYHREAPVAEEAASASADEDDGFGPGTGTAA

SEQ ID NO: 28290 - protein, 242 aa, Zea mays subsp. mays
  peptide (1)..(242): Ceres Seq. ID no. 12348014
  misc_feature (1)..(215): Pfam Name: DUF506 Pfam Description: Protein of unknown function
  misc_feature (1)..(233): NCBI GI NO: 37534384 NR Description: unknown protein
  misc_feature (1)..(233): NCBI GI NO: 20042978 NR Description: Hypothetical protein [Oryza sativa]
  misc_feature (1)..(240): NCBI GI NO: 34902608 NR Description: Unknown protein
  misc_feature (1)..(224): NCBI GI NO: 34897230 NR Description: unknown protein
  misc_feature (1)..(215): NCBI GI NO: 25408622 NR Description: hypothetical protein At2g38820
  misc_feature (1)..(229): NCBI GI NO: 15228917 NR Description: unknown protein; protein id: At3g22970.1
  misc_feature (1)..(78): NCBI GI NO: 18404867 NR Description: expressed protein; protein id: At2g38820
  misc_feature (81)..(215): NCBI GI NO: 18404867 NR Description: expressed protein; protein id: At2g38820
  misc_feature (1)..(229): NCBI GI NO: 28058790 NR Description: unknown protein [Arabidopsis thaliana]
  misc_feature (1)..(231): NCBI GI NO: 30682929 NR Description: expressed protein [Arabidopsis thaliana]
MVRSFMEDDVGSEKAAHGGRYCNCFHGGDNSDDEEDDEAAAAASDVAETIKGLVHCATLRERNLLADVCAHLERHREAGARRRDLLRLVASSLRGAGHDASVCVSRWDKSPSHPVGEHAYIDVLLPAASDRGARERVLVDVDFRSAFEVARPTKAYRALLQRLPAVFVGKDDRLRLLVAAAADAARASLKKRGLHLPPWRKPEYMRAKWLSPYHREAPVAEEAASASADEDDGFGPGTGTAA

SEQ ID NO: 28291 - DNA, 2011 bp, Zea mays subsp. mays
  misc_feature (1)..(2011): Ceres Seq. ID no. 12372807
agaggacgcgcacccggggtggagctgagagcaacaggagctcctgcggcgaattcgggccccgagtacgccggttcaggcggccgccgccggtggaattgtgccagtcgaggtggcctgctggtgcggcgggagtttgcgagtagggcggttccggttttgagtgagcgaaggtgttgttgggggcgtggatctggccggcggcgggcgatgggaaggagggactagggctcgattggagggaaaggcgtgatccatgggcggatgcttctcgcaggaggagcaccggctccagagcaggccagctgaagctgctggaccagacggactgcagaagtcaaaatctgattctaaagctacagcaagtgttcttgctccaccaaaagctgtggtggatctgcaagtggaaggatatggaaatgtgaatattttcacatatgacgaattgagcgcagccacaaaaaacttccgaccagatcaaattcttggagagggtgggtttggagttgtttacaaaggtgtaattgatgaaaatgttagagcaggtttcccatccaggcaggttgctgtgaaagaactaaacccagagggttttcaaggggacaaggagtggctggcagaagtcaactatcttgggcaacttagtcatccaaatcttgttgaactgattggctattgctgtgagggttcacatagactgcttgtgtatgagtacatgggcttgtggaagcctcgaaaagcacctttttcggcgggtttgccttaatatgccatggtcaacacgcatgaagattgcattgggtgctgcaagggggctcgagtaccttcacagagctgagagatccatcatttatcgagatttcaagacatcaaacatcttgctagatgcggattataatgctaagctttcagactttggtctcgcaagaacaggtcctagtggagaccaaacccacgtgtcaactcgtgttatgggaacttatggatacgcggctccagaatatgtcatgactggccatctgacagcacgaagtgatgtttatggctttggagtcgtgcttctagagatgattattggaagaagggctgtggacgatagccggccgagccgtgagcataacctagttgactgggcacggcccctcctcgtccataacaggaagctgttccggataatcgatccaagaatggaagggcagtactccaccaaggctgccaccgaggtggcaagccttgcataccgctgcctgagccagaaccccaaaggacgaccaaccatgagccaagttgttgagacctttgaggccgtgcagaacatgcctgaatgccaggacatactcctccagaacggcatcacaggtgccgtgacgctctacgaggtcccaaaggagcctgcagacagagttgagctggagaaggccaagcaggaaccggcagtaaagaccgccgcaatcccgcccgtgaacggaaagccggccccccagagcaggcgaacgcggcctgggaatggccggagcaagagcgagccatcgttggagtgtaagatgtacatcccatcaccagactctgacgaacagcagctcggcctggaggcactggcgtccccaaatggcagcatgaaggaccatcctgatgaggatttgtacaagatataaaaccagagccctcgttgctcgccttttgcgccgcacaccccagttctcaaagatcggtcagttacaattttttctctgatagccaccggcctcgctagggttcttattcttccgattagcaatagtatgtagagggagagttgtgatggaaagcatgtgtgtgcttgccatgacgatgctgtagagatctgatacacttctttctggggaatttccactccaaaaatggaagttgagagatgtgtcctgacgattggtgcgttttacccgtgtgttgagtttacttgtaaagatgcttcttcgttgtaatcttcagttctgcgggaaatcaacaccagcatagaaattgatagatc

SEQ ID NO: 28292 - protein, 315 aa, Zea mays subsp. mays
  peptide (1)..(315): Ceres Seq. ID no. 12372808
  misc_feature (7)..(197): Pfam Name: Pfam Description:  Protein kinase domain
  misc_feature (7)..(264): NCBI GI NO: 30679085 NR Description: protein kinase family [Arabidopsis thaliana]
  misc_feature (7)..(264): NCBI GI NO: 9542860 NR Description: protein kinase-like protein [Arabidopsis thaliana]
  misc_feature (7)..(202): NCBI GI NO: 34897424 NR Description: putative protein kinase
  misc_feature (7)..(206): NCBI GI NO: 34912198 NR Description: putative protein kinase
  misc_feature (7)..(242): NCBI GI NO: 15225019 NR Description: putative protein kinase; protein id: At2g05940
  misc_feature (7)..(285): NCBI GI NO: 30013675 NR Description: Avr9/Cf-9 rapidly elicited protein 264
  misc_feature (7)..(206): NCBI GI NO: 15227001 NR Description: putative protein kinase; protein id: At2g28930.1
  misc_feature (7)..(231): NCBI GI NO: 33147001 NR Description: putative auxin-regulated dual specificity cytosolickinase
  misc_feature (5)..(206): NCBI GI NO: 37534008 NR Description: putative serine/threonine protein kinase
  misc_feature (7)..(210): NCBI GI NO: 28804505 NR Description: serine/threonine protein kinase [Aster tripolium]
MSTWACGSLEKHLFRRVCLNMPWSTRMKIALGAARGLEYLHRAERSIIYRDFKTSNILLDADYNAKLSDFGLARTGPSGDQTHVSTRVMGTYGYAAPEYVMTGHLTARSDVYGFGVVLLEMIIGRRAVDDSRPSREHNLVDWARPLLVHNRKLFRIIDPRMEGQYSTKAATEVASLAYRCLSQNPKGRPTMSQVVETFEAVQNMPECQDILLQNGITGAVTLYEVPKEPADRVELEKAKQEPAVKTAAIPPVNGKPAPQSRRTRPGNGRSKSEPSLECKMYIPSPDSDEQQLGLEALASPNGSMKDHPDEDLYKI

SEQ ID NO: 28293 - protein, 295 aa, Zea mays subsp. mays
  peptide (1)..(295): Ceres Seq. ID no. 12372809
  misc_feature (1)..(177): Pfam Name: Pfam Description:  Protein kinase domain
  misc_feature (1)..(244): NCBI GI NO: 30679085 NR Description: protein kinase family [Arabidopsis thaliana]
  misc_feature (1)..(244): NCBI GI NO: 9542860 NR Description: protein kinase-like protein [Arabidopsis thaliana]
  misc_feature (1)..(182): NCBI GI NO: 34897424 NR Description: putative protein kinase
  misc_feature (1)..(186): NCBI GI NO: 34912198 NR Description: putative protein kinase
  misc_feature (1)..(222): NCBI GI NO: 15225019 NR Description: putative protein kinase; protein id: At2g05940
  misc_feature (1)..(265): NCBI GI NO: 30013675 NR Description: Avr9/Cf-9 rapidly elicited protein 264
  misc_feature (1)..(186): NCBI GI NO: 15227001 NR Description: putative protein kinase; protein id: At2g28930.1
  misc_feature (1)..(211): NCBI GI NO: 33147001 NR Description: putative auxin-regulated dual specificity cytosolickinase
  misc_feature (1)..(186): NCBI GI NO: 37534008 NR Description: putative serine/threonine protein kinase
  misc_feature (1)..(190): NCBI GI NO: 28804505 NR Description: serine/threonine protein kinase [Aster tripolium]
MPWSTRMKIALGAARGLEYLHRAERSIIYRDFKTSNILLDADYNAKLSDFGLARTGPSGDQTHVSTRVMGTYGYAAPEYVMTGHLTARSDVYGFGVVLLEMIIGRRAVDDSRPSREHNLVDWARPLLVHNRKLFRIIDPRMEGQYSTKAATEVASLAYRCLSQNPKGRPTMSQVVETFEAVQNMPECQDILLQNGITGAVTLYEVPKEPADRVELEKAKQEPAVKTAAIPPVNGKPAPQSRRTRPGNGRSKSEPSLECKMYIPSPDSDEQQLGLEALASPNGSMKDHPDEDLYKI

SEQ ID NO: 28294 - protein, 289 aa, Zea mays subsp. mays
  peptide (1)..(289): Ceres Seq. ID no. 12372810
  misc_feature (1)..(171): Pfam Name: Pfam Description:  Protein kinase domain
  misc_feature (1)..(238): NCBI GI NO: 30679085 NR Description: protein kinase family [Arabidopsis thaliana]
  misc_feature (1)..(238): NCBI GI NO: 9542860 NR Description: protein kinase-like protein [Arabidopsis thaliana]
  misc_feature (1)..(176): NCBI GI NO: 34897424 NR Description: putative protein kinase
  misc_feature (1)..(180): NCBI GI NO: 34912198 NR Description: putative protein kinase
  misc_feature (1)..(216): NCBI GI NO: 15225019 NR Description: putative protein kinase; protein id: At2g05940
  misc_feature (1)..(259): NCBI GI NO: 30013675 NR Description: Avr9/Cf-9 rapidly elicited protein 264
  misc_feature (1)..(180): NCBI GI NO: 15227001 NR Description: putative protein kinase; protein id: At2g28930.1
  misc_feature (1)..(205): NCBI GI NO: 33147001 NR Description: putative auxin-regulated dual specificity cytosolickinase
  misc_feature (1)..(180): NCBI GI NO: 37534008 NR Description: putative serine/threonine protein kinase
  misc_feature (1)..(184): NCBI GI NO: 28804505 NR Description: serine/threonine protein kinase [Aster tripolium]
MKIALGAARGLEYLHRAERSIIYRDFKTSNILLDADYNAKLSDFGLARTGPSGDQTHVSTRVMGTYGYAAPEYVMTGHLTARSDVYGFGVVLLEMIIGRRAVDDSRPSREHNLVDWARPLLVHNRKLFRIIDPRMEGQYSTKAATEVASLAYRCLSQNPKGRPTMSQVVETFEAVQNMPECQDILLQNGITGAVTLYEVPKEPADRVELEKAKQEPAVKTAAIPPVNGKPAPQSRRTRPGNGRSKSEPSLECKMYIPSPDSDEQQLGLEALASPNGSMKDHPDEDLYKI

SEQ ID NO: 28295 - DNA, 1776 bp, Zea mays subsp. mays
  misc_feature (1)..(1776): Ceres Seq. ID no. 12373590
aaagaaaaacggtccaccacaccttgtatgtgccctccggcgggcgggtcagagctcgcaactcgcaccagcacagcagcaccggcagcaccaccaaccccagggcagccgcgccgccagccacgacaagcttagcagcccctcgcactcgctagggtatttattggtacaatcgggtgatctgcgtgccgcatcgcgccgggacacgggagacaatggcgttcacgacgctcggcggctgtggggcgcaggcttcagtgcggttggctccccagaatggaatccttggatctaattcgaagccattcgcgggcatcatactcaagaaacctcagcaggttggatccctgcccctccgtgcaaggggatccattttttcttcaccacgcaggcttttctcccctaaggcagcagcccctaaatcaggggattccatacgcattgcagtgctaggggccagcggttatactggagctgagattgttcggattctagcgaaccaccctcagtttcatataaaagtgatgactgcagatagaaaagctggcgagcaatttggatcagtatttcctcacttgataacacaggacctgccgagactggtcgcaataaaagacgctgacttttcagatgttgatgctgttttttgctgcttgccacatggtacaacccaggaaattatcaaaagcttaccccgacacttaaagattgttgatctctcagcggacttccgactacgcgacattaatgagtatgctgagtggtatggacattcccacagggcaccggaacttcagggggaagctgtgtatggtttgaccgaacttaaacgagatgacataagaaatgcacgcctggtagcaaatccagggtgttatcccacatctattcaacttccgctcgttcctttggtaaaggcaaaactgatcaagctaaccaacattattattgatgcaaaatctggagtcagtggtgcaggacgtggggctaaggaagcaaatctttacactgaaatcgctgagggtatccatgcttatgggataacaagccatcggcatgtgcctgagattgagcaaggacttacagatgctgctgaatcaaaagttactatcagctttactccacatttgatgtgtatgaaacgtgggatgcaatctactgtgtatgttgaattggcatctggagtgactcccagggatttgtatgaacacctaaagtctacttacgagaatgaagaatttgtcaagctgttacatggtagcaatgttccttgcacaagccatgttgtgggatcaaattactgcttcatgaatgtctatgaggatagaatacctggaagggccatcatcatctctgtcatagataatcttgtgaagggagcatctggtcaggctttgcaaaatcttaatctgatgatgggactgcctgagaatatggggctgcaataccagcccctgttcccttgatcttttgtgtcattatctattattacattatttaggagtccagaaaccaaattatcattactgtcaagaggtggcaaggagcctgacatcagaattcagtcaagtcgaagttagacagttagtgtagcttggtctgtgttgttttagctttattaaaccattaagagaataatgatgatggcaatttagcagtacaatggtagtattatgtgggcagcttggttccaataaaatcataagcctatacacatcttgtgcccgcaatgttgtttgctattttgatcacgaaatcaatattgagcttgaatcc

SEQ ID NO: 28296 - protein, 416 aa, Zea mays subsp. mays
  peptide (1)..(416): Ceres Seq. ID no. 12373591
  misc_feature (229)..(387): Pfam Name: Pfam Description:  Semialdehyde dehydrogenase, dimerisation domain
  misc_feature (1)..(416): NCBI GI NO: 37535658 NR Description: putative N-acetyl-gamma-glutamyl-phosphatereductase
  misc_feature (51)..(416): NCBI GI NO: 16604368 NR Description: At2g19940/F6F22.3 [Arabidopsis thaliana]
  misc_feature (65)..(416): NCBI GI NO: 18399202 NR Description: putative N-acetyl-gamma-glutamyl-phosphatereductase
  misc_feature (51)..(416): NCBI GI NO: 25284367 NR Description: hypothetical protein At2g19940
  misc_feature (72)..(416): NCBI GI NO: 22968389 NR Description: hypothetical protein [Rhodospirillum rubrum]
  misc_feature (142)..(416): NCBI GI NO: 23013472 NR Description: hypothetical protein
  misc_feature (75)..(416): NCBI GI NO: 6714965 NR Description: N-acetyl-gamma-glutamyl-phosphate reductase
  misc_feature (75)..(416): NCBI GI NO: 28376951 NR Description: N-acetyl-gamma-glutamyl-phosphate reductase
  misc_feature (76)..(416): NCBI GI NO: 22956652 NR Description: hypothetical protein [Rhodobacter sphaeroides]
  misc_feature (71)..(416): NCBI GI NO: 22998260 NR Description: hypothetical protein [Magnetococcus sp. MC-1]
MAFTTLGGCGAQASVRLAPQNGILGSNSKPFAGIILKKPQQVGSLPLRARGSIFSSPRRLFSPKAAAPKSGDSIRIAVLGASGYTGAEIVRILANHPQFHIKVMTADRKAGEQFGSVFPHLITQDLPRLVAIKDADFSDVDAVFCCLPHGTTQEIIKSLPRHLKIVDLSADFRLRDINEYAEWYGHSHRAPELQGEAVYGLTELKRDDIRNARLVANPGCYPTSIQLPLVPLVKAKLIKLTNIIIDAKSGVSGAGRGAKEANLYTEIAEGIHAYGITSHRHVPEIEQGLTDAAESKVTISFTPHLMCMKRGMQSTVYVELASGVTPRDLYEHLKSTYENEEFVKLLHGSNVPCTSHVVGSNYCFMNVYEDRIPGRAIIISVIDNLVKGASGQALQNLNLMMGLPENMGLQYQPLFP

SEQ ID NO: 28297 - protein, 313 aa, Zea mays subsp. mays
  peptide (1)..(313): Ceres Seq. ID no. 12373592
  misc_feature (126)..(284): Pfam Name: Pfam Description:  Semialdehyde dehydrogenase, dimerisation domain
  misc_feature (1)..(313): NCBI GI NO: 37535658 NR Description: putative N-acetyl-gamma-glutamyl-phosphatereductase
  misc_feature (1)..(313): NCBI GI NO: 16604368 NR Description: At2g19940/F6F22.3 [Arabidopsis thaliana]
  misc_feature (1)..(313): NCBI GI NO: 18399202 NR Description: putative N-acetyl-gamma-glutamyl-phosphatereductase
  misc_feature (1)..(313): NCBI GI NO: 25284367 NR Description: hypothetical protein At2g19940
  misc_feature (1)..(313): NCBI GI NO: 22968389 NR Description: hypothetical protein [Rhodospirillum rubrum]
  misc_feature (39)..(313): NCBI GI NO: 23013472 NR Description: hypothetical protein
  misc_feature (1)..(313): NCBI GI NO: 6714965 NR Description: N-acetyl-gamma-glutamyl-phosphate reductase
  misc_feature (1)..(313): NCBI GI NO: 28376951 NR Description: N-acetyl-gamma-glutamyl-phosphate reductase
  misc_feature (1)..(313): NCBI GI NO: 22956652 NR Description: hypothetical protein [Rhodobacter sphaeroides]
  misc_feature (1)..(313): NCBI GI NO: 22998260 NR Description: hypothetical protein [Magnetococcus sp. MC-1]
MTADRKAGEQFGSVFPHLITQDLPRLVAIKDADFSDVDAVFCCLPHGTTQEIIKSLPRHLKIVDLSADFRLRDINEYAEWYGHSHRAPELQGEAVYGLTELKRDDIRNARLVANPGCYPTSIQLPLVPLVKAKLIKLTNIIIDAKSGVSGAGRGAKEANLYTEIAEGIHAYGITSHRHVPEIEQGLTDAAESKVTISFTPHLMCMKRGMQSTVYVELASGVTPRDLYEHLKSTYENEEFVKLLHGSNVPCTSHVVGSNYCFMNVYEDRIPGRAIIISVIDNLVKGASGQALQNLNLMMGLPENMGLQYQPLFP

SEQ ID NO: 28298 - DNA, 1460 bp, Zea mays subsp. mays
  misc_feature (1)..(1460): Ceres Seq. ID no. 12381233
aactattataaaaagtcgggcgcgccggcctcatctgacccgtccgtgtccgtgtccgagtccgcccccgcaaggcccagctcctcactccacagcgccgcgcaatggcggccaagcagcggcaccggcagctgccactcctgcccctcctcgccgcggccgtcgcgtggtcgctactgcgcgccgccgccgccgcgggcacgggcactggcacgctcggcctccggcacaagcccgcgaggcagcacaacagcacgcggcacgggggagggcggcgcgcccagcgtggtggcgctcccggcactggcatggcgtcgtgcaacctgttccagggcagctgggtgtacgacgacacgctgccgatgtacgacgcggcggggtgccccttcgtggagccggagttcgactgccagaagtacggccgccccgacaagctgtacctcaagtaccggtggcgcccggcgtcctgcgagctcccgaggttcaacgggcaggacttgctgaggcggtggaaggggaagaagatactgttcgtgggggactccatcagcctgaaccagtgggagtcgcttgcgtgcatgctgcgcgcggccgcgccggcctcctccagggtcgcctacgccaggggcaaccccgtctccagcgtcacgttccaggactacggggtgtcggtggcctactaccggagcacctacctggtggacatcgtcgaggagtccgtcggtcgggtgctcaagctcgactccatcaccggcgacgcgtggctcggcgccgacgtcctcgtcttcaacacgtggcactggtggacgcacaccggcagggaccaaccgtgggactacgtccaagacggagggcaggtgatgaaggacatggaccggctcacggccttctccaaggggatgtccacatgggccaggtgggtcgactccagcgtcgacacctccaggaccaaggtctacttccagggaatctcgccgacccactacaacggagccgactggggcgagggctcgcggagctgcgcgcagcagacgcagccggtcgccgggccggcgtaccccgccggccccgtcccggcgcaggccgccgtgcgggccgcgctggccgccatgtccaagccggtgtacctgctcgacgtcacgctgctgtcgcagctcaggcgcgacggccacccctcggcctacagcggcggccacccgggcaacgattgcagccactggtgcctcgccggcgtgccggacacgtggaaccagatcctctacgcgtcgctcctcctggcataggaccggggagaaaaaaaacgcacactgtataccaattggcgcaggctataggcatttcgtatttaaaaattggtgattcgattgtttctttttttcttcttcttcttggaaaaatcaatgttatgtcatatcagcatataagaagcagcagcaaacgagtttataatgttgtataat

SEQ ID NO: 28299 - protein, 485 aa, Zea mays subsp. mays
  peptide (1)..(485): Ceres Seq. ID no. 12381234
TIIKSRARRPHLTRPCPCPSPPPQGPAPHSTAPRNGGQAAAPAAATPAPPRRGRRVVATARRRRRGHGHWHARPPAQAREAAQQHAARGRAARPAWWRSRHWHGVVQPVPGQLGVRRHAADVRRGGVPLRGAGVRLPEVRPPRQAVPQVPVAPGVLRAPEVQRAGLAEAVEGEEDTVRGGLHQPEPVGVACVHAARGRAGLLQGRLRQGQPRLQRHVPGLRGVGGLLPEHLPGGHRRGVRRSGAQARLHHRRRVARRRRPRLQHVALVDAHRQGPTVGLRPRRRAGDEGHGPAHGLLQGDVHMGQVGRLQRRHLQDQGLLPGNLADPLQRSRLGRGLAELRAADAAGRRAGVPRRPRPGAGRRAGRAGRHVQAGVPARRHAAVAAQARRPPLGLQRRPPGQRLQPLVPRRRAGHVEPDPLRVAPPGIGPGRKKTHTVYQLAQAIGISYLKIGDSIVSFFLLLLGKINVMSYQHIRSSSKRVYNVV

SEQ ID NO: 28300 - protein, 392 aa, Zea mays subsp. mays
  peptide (1)..(392): Ceres Seq. ID no. 12381235
  misc_feature (1)..(390): NCBI GI NO: 34911864 NR Description: OSJNBb0032K15.9
  misc_feature (55)..(391): NCBI GI NO: 18396930 NR Description: expressed protein; protein id: At1g29050
  misc_feature (9)..(389): NCBI GI NO: 18403435 NR Description: expressed protein; protein id: At2g34070
  misc_feature (72)..(389): NCBI GI NO: 18406003 NR Description: expressed protein; protein id: At2g42570
  misc_feature (182)..(389): NCBI GI NO: 34904010 NR Description: unnamed protein product
  misc_feature (57)..(187): NCBI GI NO: 34904010 NR Description: unnamed protein product
  misc_feature (55)..(391): NCBI GI NO: 25366741 NR Description: F28N24.24 protein - Arabidopsis thaliana
  misc_feature (72)..(389): NCBI GI NO: 21593142 NR Description: unknown [Arabidopsis thaliana]
  misc_feature (72)..(389): NCBI GI NO: 28393769 NR Description: unknown protein [Arabidopsis thaliana]
  misc_feature (72)..(390): NCBI GI NO: 15219157 NR Description: hypothetical protein; protein id: At1g78710.1
MAAKQRHRQLPLLPLLAAAVAWSLLRAAAAAGTGTGTLGLRHKPARQHNSTRHGGGRRAQRGGAPGTGMASCNLFQGSWVYDDTLPMYDAAGCPFVEPEFDCQKYGRPDKLYLKYRWRPASCELPRFNGQDLLRRWKGKKILFVGDSISLNQWESLACMLRAAAPASSRVAYARGNPVSSVTFQDYGVSVAYYRSTYLVDIVEESVGRVLKLDSITGDAWLGADVLVFNTWHWWTHTGRDQPWDYVQDGGQVMKDMDRLTAFSKGMSTWARWVDSSVDTSRTKVYFQGISPTHYNGADWGEGSRSCAQQTQPVAGPAYPAGPVPAQAAVRAALAAMSKPVYLLDVTLLSQLRRDGHPSAYSGGHPGNDCSHWCLAGVPDTWNQILYASLLLA

SEQ ID NO: 28301 - protein, 324 aa, Zea mays subsp. mays
  peptide (1)..(324): Ceres Seq. ID no. 12381236
  misc_feature (1)..(322): NCBI GI NO: 34911864 NR Description: OSJNBb0032K15.9
  misc_feature (1)..(323): NCBI GI NO: 18396930 NR Description: expressed protein; protein id: At1g29050
  misc_feature (1)..(321): NCBI GI NO: 18403435 NR Description: expressed protein; protein id: At2g34070
  misc_feature (4)..(321): NCBI GI NO: 18406003 NR Description: expressed protein; protein id: At2g42570
  misc_feature (114)..(321): NCBI GI NO: 34904010 NR Description: unnamed protein product
  misc_feature (1)..(119): NCBI GI NO: 34904010 NR Description: unnamed protein product
  misc_feature (1)..(323): NCBI GI NO: 25366741 NR Description: F28N24.24 protein - Arabidopsis thaliana
  misc_feature (4)..(321): NCBI GI NO: 21593142 NR Description: unknown [Arabidopsis thaliana]
  misc_feature (4)..(321): NCBI GI NO: 28393769 NR Description: unknown protein [Arabidopsis thaliana]
  misc_feature (4)..(322): NCBI GI NO: 15219157 NR Description: hypothetical protein; protein id: At1g78710.1
MASCNLFQGSWVYDDTLPMYDAAGCPFVEPEFDCQKYGRPDKLYLKYRWRPASCELPRFNGQDLLRRWKGKKILFVGDSISLNQWESLACMLRAAAPASSRVAYARGNPVSSVTFQDYGVSVAYYRSTYLVDIVEESVGRVLKLDSITGDAWLGADVLVFNTWHWWTHTGRDQPWDYVQDGGQVMKDMDRLTAFSKGMSTWARWVDSSVDTSRTKVYFQGISPTHYNGADWGEGSRSCAQQTQPVAGPAYPAGPVPAQAAVRAALAAMSKPVYLLDVTLLSQLRRDGHPSAYSGGHPGNDCSHWCLAGVPDTWNQILYASLLLA

SEQ ID NO: 28302 - DNA, 1485 bp, Zea mays subsp. mays
  misc_feature (1)..(1485): Ceres Seq. ID no. 13498718
attttttttatatggagattatttctggtttatataaaaggacacaagtggggacgaagtagcagaagacttcccttcgtctgcttcccagagacccagccatggcgatctcccagatctcacgcatattcctggccatccttctcctggccgccgccttcgccgccgccccagctgcgcttgcggacggcgacgacgtggtggcccttaccgaatccacgttcgagaaggaggtcggaaaggaccgcggcgccctcgtcgagttctacgccccctggtgtggtcactgcaagaagcttgctcctgagtatgaaagacttggtgcaagttttaagaaagctaaatctgtcttgattgctaaggttgattgtgatgagcacaagagtttgtgcagcaagtatggagtttccgggtatccaacaatccaatggttcccgaaaggatccttggagcccaaaaagtatgaaggacaacgcactgcagaagcccttgctgaatttctcaatactgaaggaggcacaaatgtaaagctggcaaccattccttcaagtgttgtggttctcaccccagagacctttgactcaattgtccttgatgaaaccaaagatgtccttgttgagttctatgccccatggtgtggtcactgcaagagtcttgcaccgacgtatgagaaggtggcttctgttttcaagttggatgaaggagttgttattgctaaccttgacgctgacaaacacagggatttggctgagaagtatggagttagtggatttcctaccttgaagtttttcccaaagggaaacaaagctggtgaagattatgatggtgatagggacttggttgactttgtcaagttcattaacgagaagagtggtaccagccgtgacacaaagggtcaactaacctcagaggctggccgtatagcaagtctggatgtcctggctaaggagttccttggtgcttccggtgacaagcgaaaggaagtcctctccagtatggaggaggaggcagataagctcagtggttctgctgcaaggcatggaaaggtctatgtaaccatcgcaaagaagattctagagaaaggcaacgagtatactgagaaggaaaccaagaggcttgatcgcatgttggagaagtccatcagcccctccaaggccgacgagtttatcatcaagaagaacgttctttcgactttctcatcctaaggcatctgctagctccattttcacgtttcagatataggcgacaaaaactgcaggattataagtgtgataatgagagttaaatggtgctagaactaattttggggctttccctcgaggatatgtaatactcgtacgtcttgcgaattagttcttttccttgtgcttctggatttattccgtagcaccatagtttattttttggtttgacatggaggacattgtgactacagaactgagttttactatccaataacactgctcacttgatggggcttatgcc

SEQ ID NO: 28303 - protein, 367 aa, Zea mays subsp. mays
  peptide (1)..(367): Ceres Seq. ID no. 13498719
  misc_feature (32)..(139): Pfam Name: Pfam Description:  Thioredoxin
  misc_feature (1)..(367): NCBI GI NO: 34894982 NR Description: putative protein disulfide isomerase
  misc_feature (1)..(367): NCBI GI NO: 34897646 NR Description: putative disulfide-isomerase precursor
  misc_feature (1)..(366): NCBI GI NO: 729442 NR Description: PROBABLE PROTEIN DISULFIDE ISOMERASE P5 PRECURSOR
  misc_feature (7)..(365): NCBI GI NO: 15226610 NR Description: protein disulfide isomerase family
  misc_feature (7)..(366): NCBI GI NO: 7489183 NR Description: probable protein disulfide-isomerase (EC 5
  misc_feature (8)..(367): NCBI GI NO: 28829383 NR Description: similar to Dictyostelium discoideum (Slime mold)
  misc_feature (8)..(367): NCBI GI NO: 2627440 NR Description: protein disulfide isomerase; PDI; P5-like
  misc_feature (14)..(365): NCBI GI NO: 19114496 NR Description: putative protein disulfide isomerase (EC 5.3.4.1)
  misc_feature (173)..(367): NCBI GI NO: 10180029 NR Description: putative protein disulfide-isomerase
  misc_feature (14)..(365): NCBI GI NO: 40746097 NR Description: hypothetical protein AN0075.2
MAISQISRIFLAILLLAAAFAAAPAALADGDDVVALTESTFEKEVGKDRGALVEFYAPWCGHCKKLAPEYERLGASFKKAKSVLIAKVDCDEHKSLCSKYGVSGYPTIQWFPKGSLEPKKYEGQRTAEALAEFLNTEGGTNVKLATIPSSVVVLTPETFDSIVLDETKDVLVEFYAPWCGHCKSLAPTYEKVASVFKLDEGVVIANLDADKHRDLAEKYGVSGFPTLKFFPKGNKAGEDYDGDRDLVDFVKFINEKSGTSRDTKGQLTSEAGRIASLDVLAKEFLGASGDKRKEVLSSMEEEADKLSGSAARHGKVYVTIAKKILEKGNEYTEKETKRLDRMLEKSISPSKADEFIIKKNVLSTFSS

SEQ ID NO: 28304 - DNA, 817 bp, Zea mays subsp. mays
  misc_feature (1)..(817): Ceres Seq. ID no. 12402013
atcttaaaccctagaaagctcttaaaaagcccccaggggccagggctagcagcggcggcgtatccctaatcccacctccagtctctgggcaccaaatttccggcggcgatggcggcggctgtggcgaggtcagggttccggcgcatgttctccgtctctgccttcgcgccgccgaaggcgcccgccgcgcgccccaaggccgacccatcccccaacctcttcgtctccggcttaagcaagcgtaccacaagtgaaggacttagagaagcctttgcggagtttggtgaagttttgcatgctcgagttgtgaccgatcgtgtcagtgggttttctaagggatttggctttgtaaggtatgctacgaccgaagaggcagccaagggaatagagggaaaggatggaaagttccttgatggatgggttatttttgcggaatacgctaaacccagaccaccaccggaggaaacagggatgaattcgcagccccagcagtcatggggagctccatcaggttcctggggtgcacagtagatgaagtgatattgtgagagcccctccctgtcccagccctagggctcgtagcggatcgtgagggatgattttgtgtggtgtgtcgcaggtgaaatgcctttgttgtcccaatattcctaccgtgttgggggtggtcgcttgctcgcgtccacgtctttcacatgaattggttactgtggtagttgtagttctggatacggtaccaaaacaaaagtattgctgtcaacaatctgcaacagccgggaaaacagtcgaaaacctttgcaaataatacctgctgccgtgg

SEQ ID NO: 28305 - protein, 140 aa, Zea mays subsp. mays
  peptide (1)..(140): Ceres Seq. ID no. 12402014
  misc_feature (37)..(108): Pfam Name: a.k.a. RRM, RBD, or RNP domain Pfam Description: RNA recognition motif.
  misc_feature (2)..(140): NCBI GI NO: 38636774 NR Description: putative RNA recognition motif
  misc_feature (1)..(129): NCBI GI NO: 34898598 NR Description: P0534A03.25
  misc_feature (1)..(133): NCBI GI NO: 15239676 NR Description: RRM-containing protein; protein id: At5g54580
  misc_feature (8)..(116): NCBI GI NO: 15224298 NR Description: RRM-containing protein; protein id: At2g37510
  misc_feature (17)..(114): NCBI GI NO: 15219486 NR Description: RRM-containing RNA-binding protein, putative
  misc_feature (3)..(114): NCBI GI NO: 15239958 NR Description: RRM-containing protein; protein id: At5g06210
  misc_feature (34)..(140): NCBI GI NO: 34906972 NR Description: putative glycine-rich RNA-binding protein 2
  misc_feature (4)..(138): NCBI GI NO: 21388662 NR Description: glycine-rich RNA-binding protein
  misc_feature (1)..(114): NCBI GI NO: 38344030 NR Description: OJ991214_12.1
  misc_feature (34)..(99): NCBI GI NO: 19881711 NR Description: Putative RNA-binding protein [Oryza sativa]
MAAAVARSGFRRMFSVSAFAPPKAPAARPKADPSPNLFVSGLSKRTTSEGLREAFAEFGEVLHARVVTDRVSGFSKGFGFVRYATTEEAAKGIEGKDGKFLDGWVIFAEYAKPRPPPEETGMNSQPQQSWGAPSGSWGAQ

SEQ ID NO: 28306 - protein, 128 aa, Zea mays subsp. mays
  peptide (1)..(128): Ceres Seq. ID no. 12402015
  misc_feature (25)..(96): Pfam Name: a.k.a. RRM, RBD, or RNP domain Pfam Description: RNA recognition motif.
  misc_feature (1)..(128): NCBI GI NO: 38636774 NR Description: putative RNA recognition motif
  misc_feature (1)..(117): NCBI GI NO: 34898598 NR Description: P0534A03.25
  misc_feature (1)..(121): NCBI GI NO: 15239676 NR Description: RRM-containing protein; protein id: At5g54580
  misc_feature (1)..(104): NCBI GI NO: 15224298 NR Description: RRM-containing protein; protein id: At2g37510
  misc_feature (5)..(102): NCBI GI NO: 15219486 NR Description: RRM-containing RNA-binding protein, putative
  misc_feature (1)..(102): NCBI GI NO: 15239958 NR Description: RRM-containing protein; protein id: At5g06210
  misc_feature (22)..(128): NCBI GI NO: 34906972 NR Description: putative glycine-rich RNA-binding protein 2
  misc_feature (1)..(126): NCBI GI NO: 21388662 NR Description: glycine-rich RNA-binding protein
  misc_feature (1)..(102): NCBI GI NO: 38344030 NR Description: OJ991214_12.1
  misc_feature (22)..(87): NCBI GI NO: 19881711 NR Description: Putative RNA-binding protein [Oryza sativa]
MFSVSAFAPPKAPAARPKADPSPNLFVSGLSKRTTSEGLREAFAEFGEVLHARVVTDRVSGFSKGFGFVRYATTEEAAKGIEGKDGKFLDGWVIFAEYAKPRPPPEETGMNSQPQQSWGAPSGSWGAQ

SEQ ID NO: 28307 - DNA, 1027 bp, Zea mays subsp. mays
  misc_feature (1)..(1027): Ceres Seq. ID no. 12341742
ctcaataaaatatgtactcggaatcggaagaagctgccttccttttccatccgcggaacgacgcacgcggacgcctccttgttccgggtcctactcccgccgcctagaggcctcgccctcccccctccggcgaaaaccgattctctccggcgtttcctggtcccttagtgcaagcaaggacaccgctcctctagcgagctccgttctgaagcggcaagaaagatgattaatcttttcaaaataaagggtcaaaagaaagaggaggcagcaagtctgctggaaaggcccctgttaagaaacagtctgctggggagctccgtcttcataaagatattagtgagctcaacctgccgaagaccacgtcaatttcttttcccaatggcaaggatgatctgatgaattttgagaccaccatccgacctgatgaaggatattacatgggaggcactttcgttttcacctttcaagtgtccccatcttatcctcatgatcctccgaaggtcaaatgcaagaccaaggtgtaccatccaaatattgatctggaaggcaatgtatgtctgaacattctgcgcgaagattggaagcctgttctcaacatcaacactgttatttatggcctgaatcttctttttacgcaaccaaacgacgaggatcctctgaaccacgaagctgcagttgtccttcgtgacaatccaaagatgtttgaggcaaatgtgagaagagccatggctggaggctacgtcggccaacactatttccaaagatgtgcttgacttgatgtggtggtggcttgaaaacgatcaacagagcccctccccctgtatcagcaccagcgcgcccagctttgtgtgcggaaagtacttctggaagcaaaatccaaaccgttcatggtgtgatactgtgatgcatctgtttgcccgcctttgtgatgtgtggtatagtggtggtgcataatgacatggaaatgcttctctaactgtatcattcattccataaatcctaaacgaggaatgggaagtggattgtt

SEQ ID NO: 28308 - protein, 125 aa, Zea mays subsp. mays
  peptide (1)..(125): Ceres Seq. ID no. 12341743
  misc_feature (1)..(125): NCBI GI NO: 37531910 NR Description: putative ubiquitin-conjugating enzyme
  misc_feature (1)..(124): NCBI GI NO: 40253382 NR Description: putative RUB1 conjugating enzyme
  misc_feature (1)..(124): NCBI GI NO: 26000688 NR Description: RUB1 conjugating enzyme [Olea europaea]
  misc_feature (1)..(124): NCBI GI NO: 6635457 NR Description: RUB1 conjugating enzyme [Arabidopsis thaliana]
  misc_feature (1)..(124): NCBI GI NO: 10946511 NR Description: RUB1 conjugating enzyme [Lycopersicon esculentum]
  misc_feature (1)..(124): NCBI GI NO: 18398792 NR Description: RUB1-conjugating enzyme, putative
  misc_feature (1)..(124): NCBI GI NO: 25407764 NR Description: ubiquitin-protein ligase-like protein
  misc_feature (1)..(125): NCBI GI NO: 32400752 NR Description: RUB1-conjugating enzyme [Triticum aestivum]
  misc_feature (1)..(124): NCBI GI NO: 38174699 NR Description: Unknown (protein for MGC:75750)
  misc_feature (1)..(124): NCBI GI NO: 4507791 NR Description: ubiquitin-conjugating enzyme E2M
MNFETTIRPDEGYYMGGTFVFTFQVSPSYPHDPPKVKCKTKVYHPNIDLEGNVCLNILREDWKPVLNINTVIYGLNLLFTQPNDEDPLNHEAAVVLRDNPKMFEANVRRAMAGGYVGQHYFQRCA

SEQ ID NO: 28309 - protein, 111 aa, Zea mays subsp. mays
  peptide (1)..(111): Ceres Seq. ID no. 12341744
  misc_feature (1)..(111): NCBI GI NO: 37531910 NR Description: putative ubiquitin-conjugating enzyme
  misc_feature (1)..(110): NCBI GI NO: 40253382 NR Description: putative RUB1 conjugating enzyme
  misc_feature (1)..(110): NCBI GI NO: 26000688 NR Description: RUB1 conjugating enzyme [Olea europaea]
  misc_feature (1)..(110): NCBI GI NO: 6635457 NR Description: RUB1 conjugating enzyme [Arabidopsis thaliana]
  misc_feature (1)..(110): NCBI GI NO: 10946511 NR Description: RUB1 conjugating enzyme [Lycopersicon esculentum]
  misc_feature (1)..(110): NCBI GI NO: 18398792 NR Description: RUB1-conjugating enzyme, putative
  misc_feature (1)..(110): NCBI GI NO: 25407764 NR Description: ubiquitin-protein ligase-like protein
  misc_feature (1)..(111): NCBI GI NO: 32400752 NR Description: RUB1-conjugating enzyme [Triticum aestivum]
  misc_feature (1)..(110): NCBI GI NO: 38174699 NR Description: Unknown (protein for MGC:75750)
  misc_feature (1)..(110): NCBI GI NO: 4507791 NR Description: ubiquitin-conjugating enzyme E2M
MGGTFVFTFQVSPSYPHDPPKVKCKTKVYHPNIDLEGNVCLNILREDWKPVLNINTVIYGLNLLFTQPNDEDPLNHEAAVVLRDNPKMFEANVRRAMAGGYVGQHYFQRCA

SEQ ID NO: 28310 - protein, 74 aa, Zea mays subsp. mays
  peptide (1)..(74): Ceres Seq. ID no. 12341745
SIKYVLGIGRSCLPFPSAERRTRTPPCSGSYSRRLEASPSPLRRKPILSGVSWSLSASKDTAPLASSVLKRQER

SEQ ID NO: 28311 - DNA, 956 bp, Zea mays subsp. mays
  misc_feature (1)..(956): Ceres Seq. ID no. 13498297
aaacatactccgtttccgaatccgttccaccattgcctattgccccatcctccccgctagggttttgccagcatggccgccgccgccgcccggaggctcctctcccgccgcgcctcctcgtcctccctctccgcgctcctccgtcgcggcgctgtcccggagcagtcgctggtgttgcgcccggctgttgtcgcggcggcctcccgcctcggcttccagcgcgggatggcgcgggcggcctggcggggacggctacgtctcgacgcggtctggcgcgggcggggaccgcgcgcccatggccacggagatggcgccgctgttccccgggtgcgactacgagcattggctcatcgtgatggacaagcccggcggggagggcgccagcaagcagcagatgattgactgctacatccagaccctcgccaaggtccttggaagcgaggaggaggcgaagaagaagatctacaacgtctcgtgcgagcgctacttcgggtttgggtgcgagatcgatgaggagacatctaacaagctcgaggggctccctggtgttctctttgtgctcccggattcgtatgttgatgctgaatacaaggactacggagctgaactcttcgtcaacggtgagattgttcagaggacccccgagaggcagaggagggtggagcccgtgccacagagggcagcagacaggccgaggtacaatgacagaacccgctacgcacgcaggagggagaaccagcgatgaactttgcgataaaatcataaaaaataccacagcaacaagtcccaggtggtttcagctctggaattcaaggatcaccgagtatcgcctgtattaaattggcaatctcactttacgtgcagtctagagtatcgtttctatgtgctcagcttggacgtattgtattctgtaattacagctacttggagatttggaaggacctggcttgcaacgt

SEQ ID NO: 28312 - protein, 247 aa, Zea mays subsp. mays
  peptide (1)..(247): Ceres Seq. ID no. 13498298
  misc_feature (47)..(247): NCBI GI NO: 34897972 NR Description: putative plastid protein
  misc_feature (36)..(246): NCBI GI NO: 38344141 NR Description: OSJNBa0041A02.8
  misc_feature (37)..(247): NCBI GI NO: 15226108 NR Description: plastid protein [Arabidopsis thaliana]
  misc_feature (37)..(247): NCBI GI NO: 25370552 NR Description: DAG protein homolog
  misc_feature (37)..(247): NCBI GI NO: 21617909 NR Description: plastid protein [Arabidopsis thaliana]
  misc_feature (37)..(247): NCBI GI NO: 2440029 NR Description: DAL1 protein [Arabidopsis thaliana]
  misc_feature (79)..(247): NCBI GI NO: 15223247 NR Description: plastid protein -related [Arabidopsis thaliana]
  misc_feature (79)..(247): NCBI GI NO: 15226934 NR Description: expressed protein [Arabidopsis thaliana]
  misc_feature (42)..(244): NCBI GI NO: 38636775 NR Description: putative DAG protein
  misc_feature (39)..(244): NCBI GI NO: 6014904 NR Description: DAG PROTEIN, CHLOROPLAST PRECURSOR
NILRFRIRSTIAYCPILPARVLPAWPPPPPGGSSPAAPPRPPSPRSSVAALSRSSRWCCARLLSRRPPASASSAGWRGRPGGDGYVSTRSGAGGDRAPMATEMAPLFPGCDYEHWLIVMDKPGGEGASKQQMIDCYIQTLAKVLGSEEEAKKKIYNVSCERYFGFGCEIDEETSNKLEGLPGVLFVLPDSYVDAEYKDYGAELFVNGEIVQRTPERQRRVEPVPQRAADRPRYNDRTRYARRRENQR

SEQ ID NO: 28313 - protein, 149 aa, Zea mays subsp. mays
  peptide (1)..(149): Ceres Seq. ID no. 13498299
  misc_feature (1)..(149): NCBI GI NO: 34897972 NR Description: putative plastid protein
  misc_feature (1)..(148): NCBI GI NO: 38344141 NR Description: OSJNBa0041A02.8
  misc_feature (1)..(149): NCBI GI NO: 15226108 NR Description: plastid protein [Arabidopsis thaliana]
  misc_feature (1)..(149): NCBI GI NO: 25370552 NR Description: DAG protein homolog
  misc_feature (1)..(149): NCBI GI NO: 21617909 NR Description: plastid protein [Arabidopsis thaliana]
  misc_feature (1)..(149): NCBI GI NO: 2440029 NR Description: DAL1 protein [Arabidopsis thaliana]
  misc_feature (1)..(149): NCBI GI NO: 15223247 NR Description: plastid protein -related [Arabidopsis thaliana]
  misc_feature (1)..(149): NCBI GI NO: 15226934 NR Description: expressed protein [Arabidopsis thaliana]
  misc_feature (1)..(146): NCBI GI NO: 38636775 NR Description: putative DAG protein
  misc_feature (1)..(146): NCBI GI NO: 6014904 NR Description: DAG PROTEIN, CHLOROPLAST PRECURSOR
MATEMAPLFPGCDYEHWLIVMDKPGGEGASKQQMIDCYIQTLAKVLGSEEEAKKKIYNVSCERYFGFGCEIDEETSNKLEGLPGVLFVLPDSYVDAEYKDYGAELFVNGEIVQRTPERQRRVEPVPQRAADRPRYNDRTRYARRRENQR

SEQ ID NO: 28314 - protein, 145 aa, Zea mays subsp. mays
  peptide (1)..(145): Ceres Seq. ID no. 13498300
  misc_feature (1)..(145): NCBI GI NO: 34897972 NR Description: putative plastid protein
  misc_feature (1)..(144): NCBI GI NO: 38344141 NR Description: OSJNBa0041A02.8
  misc_feature (1)..(145): NCBI GI NO: 15226108 NR Description: plastid protein [Arabidopsis thaliana]
  misc_feature (1)..(145): NCBI GI NO: 25370552 NR Description: DAG protein homolog
  misc_feature (1)..(145): NCBI GI NO: 21617909 NR Description: plastid protein [Arabidopsis thaliana]
  misc_feature (1)..(145): NCBI GI NO: 2440029 NR Description: DAL1 protein [Arabidopsis thaliana]
  misc_feature (1)..(145): NCBI GI NO: 15223247 NR Description: plastid protein -related [Arabidopsis thaliana]
  misc_feature (1)..(145): NCBI GI NO: 15226934 NR Description: expressed protein [Arabidopsis thaliana]
  misc_feature (1)..(142): NCBI GI NO: 38636775 NR Description: putative DAG protein
  misc_feature (1)..(142): NCBI GI NO: 6014904 NR Description: DAG PROTEIN, CHLOROPLAST PRECURSOR
MAPLFPGCDYEHWLIVMDKPGGEGASKQQMIDCYIQTLAKVLGSEEEAKKKIYNVSCERYFGFGCEIDEETSNKLEGLPGVLFVLPDSYVDAEYKDYGAELFVNGEIVQRTPERQRRVEPVPQRAADRPRYNDRTRYARRRENQR

SEQ ID NO: 28315 - DNA, 1411 bp, Zea mays subsp. mays
  misc_feature (1)..(1411): Ceres Seq. ID no. 12382198
gacgccttgtttctggatcatccagcggggggacgccggtgtattgctcggtcctcctccctggttgcccgaggcagccgtgacggaggcggaggtagcgggggggaccatgtacagatcggcgggggtcgcgatggcgtggaacgtgttctggttctgcacggctctccgtgggctgggttccatcatgatcctactcgtcctcgccatcgtcggcgttacctactacgctgtcgtcctctgcaactacggccccgccctcctcaccggcggcggcaccactctcgccgcgctcgctgtcctgctcctcttccactttctgcttgctatgcttttatggagttatttttctgtggtgctcactgaccctggttctgttccaccaaattggaatcttgattttgatgcggagaggggagaaactgctcctctcactagctcagagttcagtagccagatgaattcacagcaatctgtggctcttggcaatacggcaaatccaagggctaggtactgtaggaaatgcaaccagttgaagccacctcggtgccaccattgctctgtttgtggaagatgtgttcttaagatggatcatcattgtgtgtgggtggttaattgtgttggggcactgaactacaaatactttcttctgttcctgttttacaccttcctcgagacaactcttgtcacactctctttattgcctcacttcatagccttcttcagtgatatcgagatcccaggaagtcctgcagcacttgcaaccacatttctcacctttgtgttgaatctggccttttccttgagcgtttttggtttatgattatgcatatttcacttgtttcggctaatacgacgacaattgaggcatatgagaagaagacaactccacattggatatatgatcttggccggaagaggaattttgctcaggtttttggaaatgacagaaaatattggttcatccctgcatattcagaagaggatctgagaagaattccagctctacagggtcttgattatcctgtcagtgagaccagattttgatggccaggaattgtaatggggcaattctaacagtgtcctcgtcagatacctcagtgttggacatctactcatacaactgtcagcattgctgattgccctatgcaaggcatctagtgaaatgtgcacaagatgattgtagtaatagtaaccatgagttattcatctgttgcacttcatgtatgtgacgaaggggaagtcctcctacctttgccagaggaagtttgttgtgatgtaaattagttttagcgcctggttagatggaccaaatcttggcgatgcgccaggattttggacttaattctttatccatccacgtgaattgggcaggatttcatccatgcaaactgggcattagtgtggtttg

SEQ ID NO: 28316 - protein, 273 aa, Zea mays subsp. mays
  peptide (1)..(273): Ceres Seq. ID no. 12382199
  misc_feature (163)..(225): Pfam Name: Pfam Description:  DHHC zinc finger domain
  misc_feature (37)..(273): NCBI GI NO: 22331887 NR Description: putative protein; protein id: At3g60800
  misc_feature (45)..(172): NCBI GI NO: 11358343 NR Description: hypothetical protein T4C21
  misc_feature (195)..(273): NCBI GI NO: 11358343 NR Description: hypothetical protein T4C21
  misc_feature (45)..(273): NCBI GI NO: 21593364 NR Description: unknown [Arabidopsis thaliana]
  misc_feature (45)..(273): NCBI GI NO: 18416000 NR Description: Expressed protein; protein id: At4g22750
  misc_feature (45)..(240): NCBI GI NO: 7486880 NR Description: hypothetical protein T12H17
  misc_feature (110)..(273): NCBI GI NO: 18411456 NR Description: hypothetical protein; protein id: At4g00840.1
  misc_feature (13)..(273): NCBI GI NO: 29791459 NR Description: Similar to RIKEN cDNA 5033406L14 gene
  misc_feature (52)..(273): NCBI GI NO: 19921954 NR Description: CG1407-PB [Drosophila melanogaster]
  misc_feature (47)..(242): NCBI GI NO: 34874230 NR Description: similar to RIKEN cDNA 5033406L14
TPCFWIIQRGDAGVLLGPPPWLPEAAVTEAEVAGGTMYRSAGVAMAWNVFWFCTALRGLGSIMILLVLAIVGVTYYAVVLCNYGPALLTGGGTTLAALAVLLLFHFLLAMLLWSYFSVVLTDPGSVPPNWNLDFDAERGETAPLTSSEFSSQMNSQQSVALGNTANPRARYCRKCNQLKPPRCHHCSVCGRCVLKMDHHCVWVVNCVGALNYKYFLLFLFYTFLETTLVTLSLLPHFIAFFSDIEIPGSPAALATTFLTFVLNLAFSLSVFGL

SEQ ID NO: 28317 - protein, 237 aa, Zea mays subsp. mays
  peptide (1)..(237): Ceres Seq. ID no. 12382200
  misc_feature (127)..(189): Pfam Name: Pfam Description:  DHHC zinc finger domain
  misc_feature (1)..(237): NCBI GI NO: 22331887 NR Description: putative protein; protein id: At3g60800
  misc_feature (9)..(136): NCBI GI NO: 11358343 NR Description: hypothetical protein T4C21
  misc_feature (159)..(237): NCBI GI NO: 11358343 NR Description: hypothetical protein T4C21
  misc_feature (9)..(237): NCBI GI NO: 21593364 NR Description: unknown [Arabidopsis thaliana]
  misc_feature (9)..(237): NCBI GI NO: 18416000 NR Description: Expressed protein; protein id: At4g22750
  misc_feature (9)..(204): NCBI GI NO: 7486880 NR Description: hypothetical protein T12H17
  misc_feature (74)..(237): NCBI GI NO: 18411456 NR Description: hypothetical protein; protein id: At4g00840.1
  misc_feature (1)..(237): NCBI GI NO: 29791459 NR Description: Similar to RIKEN cDNA 5033406L14 gene
  misc_feature (16)..(237): NCBI GI NO: 19921954 NR Description: CG1407-PB [Drosophila melanogaster]
  misc_feature (11)..(206): NCBI GI NO: 34874230 NR Description: similar to RIKEN cDNA 5033406L14
MYRSAGVAMAWNVFWFCTALRGLGSIMILLVLAIVGVTYYAVVLCNYGPALLTGGGTTLAALAVLLLFHFLLAMLLWSYFSVVLTDPGSVPPNWNLDFDAERGETAPLTSSEFSSQMNSQQSVALGNTANPRARYCRKCNQLKPPRCHHCSVCGRCVLKMDHHCVWVVNCVGALNYKYFLLFLFYTFLETTLVTLSLLPHFIAFFSDIEIPGSPAALATTFLTFVLNLAFSLSVFGL

SEQ ID NO: 28318 - protein, 229 aa, Zea mays subsp. mays
  peptide (1)..(229): Ceres Seq. ID no. 12382201
  misc_feature (119)..(181): Pfam Name: Pfam Description:  DHHC zinc finger domain
  misc_feature (1)..(229): NCBI GI NO: 22331887 NR Description: putative protein; protein id: At3g60800
  misc_feature (1)..(128): NCBI GI NO: 11358343 NR Description: hypothetical protein T4C21
  misc_feature (151)..(229): NCBI GI NO: 11358343 NR Description: hypothetical protein T4C21
  misc_feature (1)..(229): NCBI GI NO: 21593364 NR Description: unknown [Arabidopsis thaliana]
  misc_feature (1)..(229): NCBI GI NO: 18416000 NR Description: Expressed protein; protein id: At4g22750
  misc_feature (1)..(196): NCBI GI NO: 7486880 NR Description: hypothetical protein T12H17
  misc_feature (66)..(229): NCBI GI NO: 18411456 NR Description: hypothetical protein; protein id: At4g00840.1
  misc_feature (1)..(229): NCBI GI NO: 29791459 NR Description: Similar to RIKEN cDNA 5033406L14 gene
  misc_feature (8)..(229): NCBI GI NO: 19921954 NR Description: CG1407-PB [Drosophila melanogaster]
  misc_feature (3)..(198): NCBI GI NO: 34874230 NR Description: similar to RIKEN cDNA 5033406L14
MAWNVFWFCTALRGLGSIMILLVLAIVGVTYYAVVLCNYGPALLTGGGTTLAALAVLLLFHFLLAMLLWSYFSVVLTDPGSVPPNWNLDFDAERGETAPLTSSEFSSQMNSQQSVALGNTANPRARYCRKCNQLKPPRCHHCSVCGRCVLKMDHHCVWVVNCVGALNYKYFLLFLFYTFLETTLVTLSLLPHFIAFFSDIEIPGSPAALATTFLTFVLNLAFSLSVFGL

SEQ ID NO: 28319 - DNA, 1676 bp, Zea mays subsp. mays
  misc_feature (1)..(1676): Ceres Seq. ID no. 12408456
gcgccagcagactctttttaatagccgacctcaaccaacgtcgagaggaaacccactgttgcagcgcgagtgtagcaggctgcacacacaaggaaggggacaaccacaagcgcctaagatcccgtcctccgcgtcgagatctttgccgaggcggtgaccgtcgagggatcgccatggcgttgagggcgtcccccgtgtcgcatggcaccgcggcagcgccgctgccgcctttcgcgcggaggaggatggcccgtggggtggtggtggccatggcgtccaccatcaacagggtcaaaactgtcaaagaaccctatacccctccacgagaggtacatcgccaaattacccattcactaccacctcaaaagcgggagattttcgattcacttcaaccttgggccaaggataacctactgaacctactgaagccagttgaaaagtcatggcagccacaggacttcctaccagagccttcttctgatgggttttatgatgaagttaaagaactgagggagcgggcaaatgaaatacctgatgaatactttgtttgcttagttggtgatatggttactgaggaagccttacctacataccaaacaatgcttaacactcttgatggagtccgggatgaaactggtgcaagtccaaccacgtgggcggtttggacaagggcatggacagctgaagagaacagacatggtgacctccttaacaagtacatgtaccttactggacgggttgacatgaaacaaattgagaagaccatacaatatctgattggttccggaatggatcctggaactgagaacaacccctacttgggtttcctctacacatcattccaagaaagggcaacatttgtgtcgcatgggaatactgcaaggcatgccaaggagtatggtgatctcaagctggcccagatatgtggcacgatagcagccgatgagaagcgccacgaaacagcctacaccaagatagtcgagaagctcttcgagatggaccctgattacacagtgcttgcgtttgctgacatgatgaggaagaagatcacgatgccagcccatctcatgtacgacggtaaggacgacaacctgttcgagcacttcagcgcggtggcgcagaggctgggcgtctacaccgccaaagactacgccgacatcctcgagttcctggtccagaggtggaaagtcgcggagctcacagggctgtctggagaagggagaagggcgcaggactttgtctgtaccttggcgccgaggatcaggcggctggatgatagagctcaagcgagggcgaagcaagcaccggttattcctttcagttgggtttatgaccgcaaggtgcagctttaatcaagaacgctaggcaatgtgggcatttactacgtatatcattttcagtcctggggttctctataagaaacagtctctaggttatctagcagggtacaattcaactactcgtggatctcactcggtgcaaagtagtgcaaagtacgctatctgttgttaccgtgcaagctgcagagtttggattactatgtgggcctggtgatggagaggaattctgtggggtgcctgcagccagttatgagtggcagctccatcgcaactgagttgttgtattgaatatgttacaggacctatagtaaccgaaagtaataatatggagtttgt

SEQ ID NO: 28320 - protein, 449 aa, Zea mays subsp. mays
  peptide (1)..(449): Ceres Seq. ID no. 12408457
  misc_feature (62)..(449): NCBI GI NO: 3915029 NR Description: Acyl-
  misc_feature (58)..(449): NCBI GI NO: 7433271 NR Description: acyl-
  misc_feature (58)..(449): NCBI GI NO: 19386730 NR Description: putative stearoyl-acyl-carrier protein desaturase
  misc_feature (58)..(449): NCBI GI NO: 27804770 NR Description: putative stearoyl-acyl carrier protein desaturase
  misc_feature (75)..(449): NCBI GI NO: 1785862 NR Description: stearoyl-Acyl-carrier protein desaturase
  misc_feature (75)..(449): NCBI GI NO: 3915024 NR Description: Acyl-
  misc_feature (58)..(449): NCBI GI NO: 575942 NR Description: stearoyl-acyl carrier protein desaturase
  misc_feature (58)..(449): NCBI GI NO: 134945 NR Description: Acyl-
  misc_feature (58)..(449): NCBI GI NO: 951427 NR Description: stearoyl-acyl-carrier protein desaturase
  misc_feature (58)..(449): NCBI GI NO: 1020096 NR Description: stearoyl-acyl carrier protein desaturase
ASRLFLIADLNQRREETHCCSASVAGCTHKEGDNHKRLRSRPPRRDLCRGGDRRGIAMALRASPVSHGTAAAPLPPFARRRMARGVVVAMASTINRVKTVKEPYTPPREVHRQITHSLPPQKREIFDSLQPWAKDNLLNLLKPVEKSWQPQDFLPEPSSDGFYDEVKELRERANEIPDEYFVCLVGDMVTEEALPTYQTMLNTLDGVRDETGASPTTWAVWTRAWTAEENRHGDLLNKYMYLTGRVDMKQIEKTIQYLIGSGMDPGTENNPYLGFLYTSFQERATFVSHGNTARHAKEYGDLKLAQICGTIAADEKRHETAYTKIVEKLFEMDPDYTVLAFADMMRKKITMPAHLMYDGKDDNLFEHFSAVAQRLGVYTAKDYADILEFLVQRWKVAELTGLSGEGRRAQDFVCTLAPRIRRLDDRAQARAKQAPVIPFSWVYDRKVQL

SEQ ID NO: 28321 - protein, 392 aa, Zea mays subsp. mays
  peptide (1)..(392): Ceres Seq. ID no. 12408458
  misc_feature (5)..(392): NCBI GI NO: 3915029 NR Description: Acyl-
  misc_feature (1)..(392): NCBI GI NO: 7433271 NR Description: acyl-
  misc_feature (1)..(392): NCBI GI NO: 19386730 NR Description: putative stearoyl-acyl-carrier protein desaturase
  misc_feature (1)..(392): NCBI GI NO: 27804770 NR Description: putative stearoyl-acyl carrier protein desaturase
  misc_feature (18)..(392): NCBI GI NO: 1785862 NR Description: stearoyl-Acyl-carrier protein desaturase
  misc_feature (18)..(392): NCBI GI NO: 3915024 NR Description: Acyl-
  misc_feature (1)..(392): NCBI GI NO: 575942 NR Description: stearoyl-acyl carrier protein desaturase
  misc_feature (1)..(392): NCBI GI NO: 134945 NR Description: Acyl-
  misc_feature (1)..(392): NCBI GI NO: 951427 NR Description: stearoyl-acyl-carrier protein desaturase
  misc_feature (1)..(392): NCBI GI NO: 1020096 NR Description: stearoyl-acyl carrier protein desaturase
MALRASPVSHGTAAAPLPPFARRRMARGVVVAMASTINRVKTVKEPYTPPREVHRQITHSLPPQKREIFDSLQPWAKDNLLNLLKPVEKSWQPQDFLPEPSSDGFYDEVKELRERANEIPDEYFVCLVGDMVTEEALPTYQTMLNTLDGVRDETGASPTTWAVWTRAWTAEENRHGDLLNKYMYLTGRVDMKQIEKTIQYLIGSGMDPGTENNPYLGFLYTSFQERATFVSHGNTARHAKEYGDLKLAQICGTIAADEKRHETAYTKIVEKLFEMDPDYTVLAFADMMRKKITMPAHLMYDGKDDNLFEHFSAVAQRLGVYTAKDYADILEFLVQRWKVAELTGLSGEGRRAQDFVCTLAPRIRRLDDRAQARAKQAPVIPFSWVYDRKVQL

SEQ ID NO: 28322 - protein, 368 aa, Zea mays subsp. mays
  peptide (1)..(368): Ceres Seq. ID no. 12408459
  misc_feature (1)..(368): NCBI GI NO: 3915029 NR Description: Acyl-
  misc_feature (1)..(368): NCBI GI NO: 7433271 NR Description: acyl-
  misc_feature (1)..(368): NCBI GI NO: 19386730 NR Description: putative stearoyl-acyl-carrier protein desaturase
  misc_feature (1)..(368): NCBI GI NO: 27804770 NR Description: putative stearoyl-acyl carrier protein desaturase
  misc_feature (1)..(368): NCBI GI NO: 1785862 NR Description: stearoyl-Acyl-carrier protein desaturase
  misc_feature (1)..(368): NCBI GI NO: 3915024 NR Description: Acyl-
  misc_feature (1)..(368): NCBI GI NO: 575942 NR Description: stearoyl-acyl carrier protein desaturase
  misc_feature (1)..(368): NCBI GI NO: 134945 NR Description: Acyl-
  misc_feature (1)..(368): NCBI GI NO: 951427 NR Description: stearoyl-acyl-carrier protein desaturase
  misc_feature (1)..(368): NCBI GI NO: 1020096 NR Description: stearoyl-acyl carrier protein desaturase
MARGVVVAMASTINRVKTVKEPYTPPREVHRQITHSLPPQKREIFDSLQPWAKDNLLNLLKPVEKSWQPQDFLPEPSSDGFYDEVKELRERANEIPDEYFVCLVGDMVTEEALPTYQTMLNTLDGVRDETGASPTTWAVWTRAWTAEENRHGDLLNKYMYLTGRVDMKQIEKTIQYLIGSGMDPGTENNPYLGFLYTSFQERATFVSHGNTARHAKEYGDLKLAQICGTIAADEKRHETAYTKIVEKLFEMDPDYTVLAFADMMRKKITMPAHLMYDGKDDNLFEHFSAVAQRLGVYTAKDYADILEFLVQRWKVAELTGLSGEGRRAQDFVCTLAPRIRRLDDRAQARAKQAPVIPFSWVYDRKVQL

SEQ ID NO: 28323 - DNA, 1683 bp, Zea mays subsp. mays
  misc_feature (1)..(1683): Ceres Seq. ID no. 12408452
accatctttaggataagatagcaaatatatggccatcatactcgtacgagcagcgtcgccggggctctccgccgccgacagcatcagccaccaggggactctccagtgctccaccctgctcaagacgaagaggccggcggcgcgccggtggatgccctgctcgctccttggcctccacccgtgggaggctggccgtccctcccccgccgtctactccagcctcgccgtcaacccggcgggagaggccgtcgtctcgtccgagcagaaggtctacgacgtcgtgctcaagcaggccgcattgctcaaacgccagctgcgcacgccggtcctacgccaggccccaggacatggacatgccacgcaacgggctcaaggaagcctacgaccgctgcggcgagatctgtgaggagtatgccaagacgttttacctcggaactatgttgatgacagaggagcggcgccgcgccatatgggccatctatgtgtggtgtaggaggacagatgagcttgtagatgggccaaacgccaactacattacaccaacagctttggaccggtgggagaagagacttgaggatctgttcacgggacgtccttacgacatgcttgatgccgctctctctgataccatctcaaggttccccatagacattcagccattcagggacatgattgaagggatgaggagtgatcttaggaagacaaggtataacaacttcgacgagctctacatgtactgctactatgttgctggaactgtcgggttaatgagcgtacctgtgatgggcatcgcaaccgagtctaaagcaacaactgaaagcgtatacagtgctgccttggctctgggaattgcgaaccaactcacgaacatactccgggatgttggagaggatgctagaagaggaaggatatatttaccacaagatgagcttgcacaggcagggctctctgatgaggacatcttcaaaggggtcgtcacgaaccggtggagaaacttcatgaagaggcagatcaagagggccaggatgttttttgaggaggcagagagaggggtaaatgagctctcacaggctagcagatggccagtatgggcttccctgttgttgtacaggcagatcctggatgagatcgaagccaacgactacaacaacttcacgaagagggcgtatgttggtaaagggaagaagttgctagcacttcctgtggcatatggaaaatcgctactgctcccatgttcattgagaaatggccagacctagccatcagagaagctgcaatgcaaggttcaggttaggctagatagaaagttaaatggggcaacatcaggaggccttgatgaaaaacagacaacctggtgaattgttgttgggatcaggcacagaacagataagagccgcgcagccaacctagatggatacggaacattcgcctcttattcggagcaatatatgtctctcaaggaaagagcccaacatgtatactgccttctttttctcatcccagatttgggggaaaaacaatgtaaatgccaatggtatcgtaggaagattactagaagtaaatgccaatgtaaaaacagatgagttggcatttacatgataggatggtggggtcatcagactgaaaatgataggggattgtgctcccctgcgactccaactattaaacaaggaatccgtcagc

SEQ ID NO: 28324 - protein, 303 aa, Zea mays subsp. mays
  peptide (1)..(303): Ceres Seq. ID no. 12408453
  misc_feature (19)..(293): Pfam Name: Pfam Description:  Squalene/phytoene synthase
  misc_feature (1)..(303): NCBI GI NO: 39842609 NR Description: chloroplast phytoene synthase [Zea mays]
  misc_feature (1)..(303): NCBI GI NO: 1346883 NR Description: Phytoene synthase, chloroplast precursor
  misc_feature (8)..(299): NCBI GI NO: 1709885 NR Description: Phytoene synthase, chloroplast precursor
  misc_feature (8)..(295): NCBI GI NO: 40557193 NR Description: phytoene synthase [Oncidium cv. 'Gower Ramsey']
  misc_feature (8)..(295): NCBI GI NO: 40456029 NR Description: phytoene synthase
  misc_feature (1)..(299): NCBI GI NO: 15237933 NR Description: phytoene synthase
  misc_feature (1)..(299): NCBI GI NO: 21553694 NR Description: phytoene synthase [Arabidopsis thaliana]
  misc_feature (1)..(293): NCBI GI NO: 585749 NR Description: Phytoene synthase, chloroplast precursor
  misc_feature (8)..(295): NCBI GI NO: 1346882 NR Description: Phytoene synthase, chloroplast precursor (MEL5)
  misc_feature (8)..(295): NCBI GI NO: 6959860 NR Description: phytoene synthase [Citrus unshiu]
MDMPRNGLKEAYDRCGEICEEYAKTFYLGTMLMTEERRRAIWAIYVWCRRTDELVDGPNANYITPTALDRWEKRLEDLFTGRPYDMLDAALSDTISRFPIDIQPFRDMIEGMRSDLRKTRYNNFDELYMYCYYVAGTVGLMSVPVMGIATESKATTESVYSAALALGIANQLTNILRDVGEDARRGRIYLPQDELAQAGLSDEDIFKGVVTNRWRNFMKRQIKRARMFFEEAERGVNELSQASRWPVWASLLLYRQILDEIEANDYNNFTKRAYVGKGKKLLALPVAYGKSLLLPCSLRNGQT

SEQ ID NO: 28325 - protein, 301 aa, Zea mays subsp. mays
  peptide (1)..(301): Ceres Seq. ID no. 12408454
  misc_feature (17)..(291): Pfam Name: Pfam Description:  Squalene/phytoene synthase
  misc_feature (1)..(301): NCBI GI NO: 39842609 NR Description: chloroplast phytoene synthase [Zea mays]
  misc_feature (1)..(301): NCBI GI NO: 1346883 NR Description: Phytoene synthase, chloroplast precursor
  misc_feature (6)..(297): NCBI GI NO: 1709885 NR Description: Phytoene synthase, chloroplast precursor
  misc_feature (6)..(293): NCBI GI NO: 40557193 NR Description: phytoene synthase [Oncidium cv. 'Gower Ramsey']
  misc_feature (6)..(293): NCBI GI NO: 40456029 NR Description: phytoene synthase
  misc_feature (1)..(297): NCBI GI NO: 15237933 NR Description: phytoene synthase
  misc_feature (1)..(297): NCBI GI NO: 21553694 NR Description: phytoene synthase [Arabidopsis thaliana]
  misc_feature (1)..(291): NCBI GI NO: 585749 NR Description: Phytoene synthase, chloroplast precursor
  misc_feature (6)..(293): NCBI GI NO: 1346882 NR Description: Phytoene synthase, chloroplast precursor (MEL5)
  misc_feature (6)..(293): NCBI GI NO: 6959860 NR Description: phytoene synthase [Citrus unshiu]
MPRNGLKEAYDRCGEICEEYAKTFYLGTMLMTEERRRAIWAIYVWCRRTDELVDGPNANYITPTALDRWEKRLEDLFTGRPYDMLDAALSDTISRFPIDIQPFRDMIEGMRSDLRKTRYNNFDELYMYCYYVAGTVGLMSVPVMGIATESKATTESVYSAALALGIANQLTNILRDVGEDARRGRIYLPQDELAQAGLSDEDIFKGVVTNRWRNFMKRQIKRARMFFEEAERGVNELSQASRWPVWASLLLYRQILDEIEANDYNNFTKRAYVGKGKKLLALPVAYGKSLLLPCSLRNGQT

SEQ ID NO: 28326 - protein, 273 aa, Zea mays subsp. mays
  peptide (1)..(273): Ceres Seq. ID no. 12408455
  misc_feature (1)..(263): Pfam Name: Pfam Description:  Squalene/phytoene synthase
  misc_feature (1)..(273): NCBI GI NO: 39842609 NR Description: chloroplast phytoene synthase [Zea mays]
  misc_feature (1)..(273): NCBI GI NO: 1346883 NR Description: Phytoene synthase, chloroplast precursor
  misc_feature (1)..(269): NCBI GI NO: 1709885 NR Description: Phytoene synthase, chloroplast precursor
  misc_feature (1)..(265): NCBI GI NO: 40557193 NR Description: phytoene synthase [Oncidium cv. 'Gower Ramsey']
  misc_feature (1)..(265): NCBI GI NO: 40456029 NR Description: phytoene synthase
  misc_feature (1)..(269): NCBI GI NO: 15237933 NR Description: phytoene synthase
  misc_feature (1)..(269): NCBI GI NO: 21553694 NR Description: phytoene synthase [Arabidopsis thaliana]
  misc_feature (1)..(263): NCBI GI NO: 585749 NR Description: Phytoene synthase, chloroplast precursor
  misc_feature (1)..(265): NCBI GI NO: 1346882 NR Description: Phytoene synthase, chloroplast precursor (MEL5)
  misc_feature (1)..(265): NCBI GI NO: 6959860 NR Description: phytoene synthase [Citrus unshiu]
MLMTEERRRAIWAIYVWCRRTDELVDGPNANYITPTALDRWEKRLEDLFTGRPYDMLDAALSDTISRFPIDIQPFRDMIEGMRSDLRKTRYNNFDELYMYCYYVAGTVGLMSVPVMGIATESKATTESVYSAALALGIANQLTNILRDVGEDARRGRIYLPQDELAQAGLSDEDIFKGVVTNRWRNFMKRQIKRARMFFEEAERGVNELSQASRWPVWASLLLYRQILDEIEANDYNNFTKRAYVGKGKKLLALPVAYGKSLLLPCSLRNGQT

SEQ ID NO: 28327 - DNA, 1225 bp, Zea mays subsp. mays
  misc_feature (1)..(1225): Ceres Seq. ID no. 12344366
gtgacagaggcatagagcaaaagccaaactggcagccagcacagcagagcgccactcgactcatcctttcggttcccctcccccctccgcgttccacaaccctcgagaagcttccaccctcccctcctgcgacgccgccagagccgcggaaaccctacccaccccggccgctcacgcaccgggcgcccgcagccgccggtcgcgtgcctgccgccgacaccgcccaaagcgattggatctcgagatcgtcgaagccacgatggaggactgggattctgaagaattccagccagttgtgcctgttgtgaaagccgagccacttaaaaatcagtgggctgatgaagatgttgaagaagatgatgtaaaagaatcatgggaagaagaggaggaggaggagaaacctaagccagcgccagtggaaaaggtcgctgcaaaacctagcactaaggctcctgctaaaaagggaaaacaacaagcattgacaagtgctgaagaaccagatgagcctcctcttagtcccacttcacagaaaattcgccaacaaagacttgtggaagaagctgacttcaagtcgaccaccgagctttttgcaaagaagggcagtgagcaaaagtcactagatacttttattccaaagtccaagagtgactttgcggaatacgcggagcttattgcaaacaaactacgcccctatgagaaaagctttcactacatggctctgcttaagaatgtcatgagactttccatgacatcgttgaaaggtgcggacgccaaagatatatcttcttccgtgacggcaattgctaacgagaagatcaaggctgagaaggaggctgcagcaggcaaaaagaaacaaggagcgaaaaagaagcaactccacatcgagaaaggagacgacgacttcatccccggccggggtggtggctacgatgaccccgatgagtacgacttcatgtgatctggctgggagggatagtaggtttctgttatgtatacctttggcgggcagagaatatatcacaagagtttgcggcatactattgcatggaacatgcgttatctattcgagaatgatttttgactctgcaggataagaagagcacttgtgatctggatgcatgggtgttttcttatttatccttgaatctttgtgttatttttttttcaacattgcattttttgccaaatgtactatctggttactccgtgagtcatgaaagcaatt

SEQ ID NO: 28328 - protein, 232 aa, Zea mays subsp. mays
  peptide (1)..(232): Ceres Seq. ID no. 12344367
  misc_feature (1)..(232): NCBI GI NO: 18408426 NR Description: expressed protein; protein id: At1g66070
  misc_feature (1)..(232): NCBI GI NO: 30693092 NR Description: expressed protein [Arabidopsis thaliana]
  misc_feature (1)..(232): NCBI GI NO: 32766433 NR Description: Unknown (protein for MGC:63801) [Danio rerio]
  misc_feature (2)..(232): NCBI GI NO: 4503511 NR Description: eukaryotic translation initiation factor 3
  misc_feature (2)..(232): NCBI GI NO: 10435304 NR Description: unnamed protein product [Homo sapiens]
  misc_feature (2)..(232): NCBI GI NO: 23503065 NR Description: Eukaryotic translation initiation factor 3 subunit1
  misc_feature (2)..(232): NCBI GI NO: 27374365 NR Description: Adam-PA [Drosophila willistoni]
  misc_feature (2)..(232): NCBI GI NO: 34856798 NR Description: similar to Eukaryotic translation initiation factor3 subunit 1
  misc_feature (2)..(232): NCBI GI NO: 19921950 NR Description: CG12131-PA [Drosophila melanogaster]
  misc_feature (2)..(232): NCBI GI NO: 27374242 NR Description: CG12131-PA [Drosophila erecta]
MEDWDSEEFQPVVPVVKAEPLKNQWADEDVEEDDVKESWEEEEEEEKPKPAPVEKVAAKPSTKAPAKKGKQQALTSAEEPDEPPLSPTSQKIRQQRLVEEADFKSTTELFAKKGSEQKSLDTFIPKSKSDFAEYAELIANKLRPYEKSFHYMALLKNVMRLSMTSLKGADAKDISSSVTAIANEKIKAEKEAAAGKKKQGAKKKQLHIEKGDDDFIPGRGGGYDDPDEYDFM

SEQ ID NO: 28329 - DNA, 1233 bp, Zea mays subsp. mays
  misc_feature (1)..(1233): Ceres Seq. ID no. 12367623
aacatcatcaccacacgctaaatttacagctagctagctgaattcgatcgatatccgggaactaataatccaccgaccccctcatggcggcttcgtcgcgaatgggcgtatctgtctacctcgccatcatggcggcggtgctcgcctcggcgctcggagcggagctcaccgcggactactatagcgagacgtgcccgcaagcgctgaccaccatcaagctcctcgtcggcgccgccatcctgagggagcccaggatgggggcgtcgctggtccgcctccactttcacgattgcttcgtcaatggctgcgacggctccatcctgctggacgacaccgacgacatggtcggagagaagacggcgaagcccaacaacaactccgtgagaggctacgacgtcatcgacaccatcaagtcggcggtgaacacgatatgcttgggcaacgtcgtctcctgcgccgatatcttggccgtggccgctcgcgattccattgtcgctctgggaggaacctcgtacgacgtgctcctggggcggcgcgacgcgacgacggcgagcatggacgacgcgaacaacgacatcccgacgccgttcatggacctgccggcgctacaggacagcttcgagtcccacggcctgtccctgcacgacctggtggtgctctccggcggccacacgctgggctactcccgctgcctcttcttccgcggccgcctgtacaacgagaccggcacgctggacccggcgtacgccgggtcgctggacgagcgctgcccgctggcgggcgacgacgacgcgctgtcggcgctggacgacacccccaccaccgtcgacgctgactactaccagggcctcatgcagggacgcgcgctgctgcactcggatcagcagctttaccaggcaggcggcgccgctggcgacctggtggagtactacgccgacaacccgaccaagttctgggaggacttcggcgcggcaatggtcaagctgggcagcctgagcccgctcaccggcgacgaaggggatgtcagggagaactgccgggtcgtcaaccaggtgtgagtgtgacttcgccgccatcgtcgaatcaacgaggcatcagcttcgttccgtacgtacactctggctgctagctgcaccggcaagctatgcaccaagattctgtagcgtgtgtctgatcattatttgtattcgcgtgcctacttaattttgtgagaaattggtcttatgtttggtt

SEQ ID NO: 28330 - protein, 324 aa, Zea mays subsp. mays
  peptide (1)..(324): Ceres Seq. ID no. 12367624
  misc_feature (44)..(286): Pfam Name: Pfam Description:  Peroxidase
  misc_feature (11)..(323): NCBI GI NO: 33146424 NR Description: putative peroxidase precursor
  misc_feature (1)..(321): NCBI GI NO: 571484 NR Description: peroxidase precursor
  misc_feature (24)..(322): NCBI GI NO: 6093671 NR Description: Cationic peroxidase 1 precursor (PNPC1)
  misc_feature (24)..(322): NCBI GI NO: 99872 NR Description: peroxidase (EC 1
  misc_feature (28)..(322): NCBI GI NO: 1633130 NR Description: Chain A, Peanut Peroxidase
  misc_feature (9)..(322): NCBI GI NO: 577503 NR Description: cationic peroxidase
  misc_feature (16)..(322): NCBI GI NO: 38345909 NR Description: OSJNBb0059K02.17
  misc_feature (7)..(322): NCBI GI NO: 5453379 NR Description: bacterial-induced peroxidase precursor
  misc_feature (2)..(318): NCBI GI NO: 1854581 NR Description: peroxidase precursor [Linum usitatissimum]
  misc_feature (10)..(322): NCBI GI NO: 5381253 NR Description: peroxidase [Nicotiana tabacum]
MAASSRMGVSVYLAIMAAVLASALGAELTADYYSETCPQALTTIKLLVGAAILREPRMGASLVRLHFHDCFVNGCDGSILLDDTDDMVGEKTAKPNNNSVRGYDVIDTIKSAVNTICLGNVVSCADILAVAARDSIVALGGTSYDVLLGRRDATTASMDDANNDIPTPFMDLPALQDSFESHGLSLHDLVVLSGGHTLGYSRCLFFRGRLYNETGTLDPAYAGSLDERCPLAGDDDALSALDDTPTTVDADYYQGLMQGRALLHSDQQLYQAGGAAGDLVEYYADNPTKFWEDFGAAMVKLGSLSPLTGDEGDVRENCRVVNQV

SEQ ID NO: 28331 - protein, 318 aa, Zea mays subsp. mays
  peptide (1)..(318): Ceres Seq. ID no. 12367625
  misc_feature (38)..(280): Pfam Name: Pfam Description:  Peroxidase
  misc_feature (5)..(317): NCBI GI NO: 33146424 NR Description: putative peroxidase precursor
  misc_feature (1)..(315): NCBI GI NO: 571484 NR Description: peroxidase precursor
  misc_feature (18)..(316): NCBI GI NO: 6093671 NR Description: Cationic peroxidase 1 precursor (PNPC1)
  misc_feature (18)..(316): NCBI GI NO: 99872 NR Description: peroxidase (EC 1
  misc_feature (22)..(316): NCBI GI NO: 1633130 NR Description: Chain A, Peanut Peroxidase
  misc_feature (3)..(316): NCBI GI NO: 577503 NR Description: cationic peroxidase
  misc_feature (10)..(316): NCBI GI NO: 38345909 NR Description: OSJNBb0059K02.17
  misc_feature (1)..(316): NCBI GI NO: 5453379 NR Description: bacterial-induced peroxidase precursor
  misc_feature (1)..(312): NCBI GI NO: 1854581 NR Description: peroxidase precursor [Linum usitatissimum]
  misc_feature (4)..(316): NCBI GI NO: 5381253 NR Description: peroxidase [Nicotiana tabacum]
MGVSVYLAIMAAVLASALGAELTADYYSETCPQALTTIKLLVGAAILREPRMGASLVRLHFHDCFVNGCDGSILLDDTDDMVGEKTAKPNNNSVRGYDVIDTIKSAVNTICLGNVVSCADILAVAARDSIVALGGTSYDVLLGRRDATTASMDDANNDIPTPFMDLPALQDSFESHGLSLHDLVVLSGGHTLGYSRCLFFRGRLYNETGTLDPAYAGSLDERCPLAGDDDALSALDDTPTTVDADYYQGLMQGRALLHSDQQLYQAGGAAGDLVEYYADNPTKFWEDFGAAMVKLGSLSPLTGDEGDVRENCRVVNQV

SEQ ID NO: 28332 - protein, 309 aa, Zea mays subsp. mays
  peptide (1)..(309): Ceres Seq. ID no. 12367626
  misc_feature (29)..(271): Pfam Name: Pfam Description:  Peroxidase
  misc_feature (1)..(308): NCBI GI NO: 33146424 NR Description: putative peroxidase precursor
  misc_feature (1)..(306): NCBI GI NO: 571484 NR Description: peroxidase precursor
  misc_feature (9)..(307): NCBI GI NO: 6093671 NR Description: Cationic peroxidase 1 precursor (PNPC1)
  misc_feature (9)..(307): NCBI GI NO: 99872 NR Description: peroxidase (EC 1
  misc_feature (13)..(307): NCBI GI NO: 1633130 NR Description: Chain A, Peanut Peroxidase
  misc_feature (1)..(307): NCBI GI NO: 577503 NR Description: cationic peroxidase
  misc_feature (1)..(307): NCBI GI NO: 38345909 NR Description: OSJNBb0059K02.17
  misc_feature (1)..(307): NCBI GI NO: 5453379 NR Description: bacterial-induced peroxidase precursor
  misc_feature (1)..(303): NCBI GI NO: 1854581 NR Description: peroxidase precursor [Linum usitatissimum]
  misc_feature (1)..(307): NCBI GI NO: 5381253 NR Description: peroxidase [Nicotiana tabacum]
MAAVLASALGAELTADYYSETCPQALTTIKLLVGAAILREPRMGASLVRLHFHDCFVNGCDGSILLDDTDDMVGEKTAKPNNNSVRGYDVIDTIKSAVNTICLGNVVSCADILAVAARDSIVALGGTSYDVLLGRRDATTASMDDANNDIPTPFMDLPALQDSFESHGLSLHDLVVLSGGHTLGYSRCLFFRGRLYNETGTLDPAYAGSLDERCPLAGDDDALSALDDTPTTVDADYYQGLMQGRALLHSDQQLYQAGGAAGDLVEYYADNPTKFWEDFGAAMVKLGSLSPLTGDEGDVRENCRVVNQV

SEQ ID NO: 28333 - DNA, 1879 bp, Zea mays subsp. mays
  misc_feature (1)..(1879): Ceres Seq. ID no. 12357342
accagcccgacccaccaccaccatcgccaccattaccctctcgcccctgcctctccggccgccagcccatcccgtccccgtcccatgccgcagcgcgcagcggccgcactgacacaccagtgagcgagcagagcgagagcgaggcctgatgcggcagcggcagcaaggcgaggagcaccgggagatattcgtccagtggagaccctgcgacaagaagaggtcttaggccctccgccgccacgcgcaccggcagacaaatccgcgcaggccttcttccgatccgcaaaggcgccgcctttttcgccgattccacaggccggagcccggggagaaaggcagacagacagaccggaagatgagcgcgtccgtgggccggacccgtgtggggcggtacgagctcggccggaccctcggcgaaggcaccttcgccaaggtcaagttcgcccggaacgtcgagaccggagagaatgtcgccatcaagatcctcgacaaggagaaggtcctcaagcacaagatgatcgcccagatcaagcgggagatctcgaccatgaagctcatcaggcaccccaacgtcatccggatgtatgaggtgatggccagcaagacaaagatatacatcgtcatggagctcgtcaccggtggcgaactcttcgacaaaatcgcctcgcgtggaaggctgaaagaggatgacgcaaggaagtacttccagcagctgatcaactctgtcgattactgccatagccgaggcgtctaccaccgcgatctcaagcctgaaaatctcctgcttgatgctagcggcacgctcaaggtttcggattttggactgagcgcactatctcaacaagtccgagaggatggtctgctgcacacaacctgtggaactcccaactatgttgctcccgaggttataaacaataagggctatgatggagctaaggctgatctgtggtcatgtggagtgattctctttgtcctcatggcggggtacctcccatttgaagattcgaacctgatgtcgctctacaagaagattttcaaagcggatttcagttgcccgtcctggttctccacaagcgcaaagaagctcatcaagaagatacttgaacctaatgctaacaatagaataactattgcagagctcattaacaacgagtggttcaagaaggggtatcagcctcccagatttgaaacagcagatgttaatctggatgacgtgaactccatcttcgatgaatccggggagccagcacagcttgttgttgagaggagagaagaaaggccatcagtgatgaacgctttcgagttaatctctacgtctcagggcctcaatctcgggacgctcttcgagaagcaaacgggttctgttaagcgagaaacaaggtttgcgtcaaggcttcctgcaaatgagatactgtcgaagatcgaagcagcagcgggacccatgggcttcaacgttcagaagcgcaactataagctgaagctgcaaggggagaaccctggaaggaaaggtcagctggccatcgcaacagaggttttcgaggtcacgccttccctgtacatggttgagctgcgcaagtccaacggcgacacccttgaattccacaagttctaccacaacatctcaaatggactgaaggacgtgatgtggaagccggagagcggcatcgtggaaggcgacgaggcgcggcaaaggaggtccccgtgatggggtctgcaaccaagttttagaagtagcgctgcagataactagtcatcagggagcctggcgggaactgagcctgtgactgcttcctgtttgtttggatgttttgtttttgtctaaggtgctttctgactaaagtatgctggataatgtgaatgaagaatgtgcagagttttc

SEQ ID NO: 28334 - protein, 449 aa, Zea mays subsp. mays
  peptide (1)..(449): Ceres Seq. ID no. 12357343
  misc_feature (13)..(268): Pfam Name: Pfam Description:  Protein kinase domain
  misc_feature (2)..(432): NCBI GI NO: 18397430 NR Description: serine/threonine kinase, putative
  misc_feature (2)..(432): NCBI GI NO: 25387051 NR Description: probable serine/threonine kinase
  misc_feature (1)..(439): NCBI GI NO: 15223317 NR Description: serine threonine kinase, putative
  misc_feature (1)..(439): NCBI GI NO: 14423524 NR Description: similar to wpk4 protein kinase
  misc_feature (1)..(439): NCBI GI NO: 25387057 NR Description: protein T25K16.13
  misc_feature (1)..(434): NCBI GI NO: 7446372 NR Description: probable serine/threonine kinase (EC 2
  misc_feature (1)..(434): NCBI GI NO: 7446371 NR Description: probable serine/threonine kinase (EC 2
  misc_feature (8)..(435): NCBI GI NO: 34902248 NR Description: Putative serine/threonine kinase
  misc_feature (9)..(444): NCBI GI NO: 15238499 NR Description: serine/threonine protein kinase SOS2(gb|AAF62923
  misc_feature (10)..(435): NCBI GI NO: 34903780 NR Description: unnamed protein product
MSASVGRTRVGRYELGRTLGEGTFAKVKFARNVETGENVAIKILDKEKVLKHKMIAQIKREISTMKLIRHPNVIRMYEVMASKTKIYIVMELVTGGELFDKIASRGRLKEDDARKYFQQLINSVDYCHSRGVYHRDLKPENLLLDASGTLKVSDFGLSALSQQVREDGLLHTTCGTPNYVAPEVINNKGYDGAKADLWSCGVILFVLMAGYLPFEDSNLMSLYKKIFKADFSCPSWFSTSAKKLIKKILEPNANNRITIAELINNEWFKKGYQPPRFETADVNLDDVNSIFDESGEPAQLVVERREERPSVMNAFELISTSQGLNLGTLFEKQTGSVKRETRFASRLPANEILSKIEAAAGPMGFNVQKRNYKLKLQGENPGRKGQLAIATEVFEVTPSLYMVELRKSNGDTLEFHKFYHNISNGLKDVMWKPESGIVEGDEARQRRSP

SEQ ID NO: 28335 - protein, 396 aa, Zea mays subsp. mays
  peptide (1)..(396): Ceres Seq. ID no. 12357344
  misc_feature (1)..(215): Pfam Name: Pfam Description:  Protein kinase domain
  misc_feature (1)..(379): NCBI GI NO: 18397430 NR Description: serine/threonine kinase, putative
  misc_feature (1)..(379): NCBI GI NO: 25387051 NR Description: probable serine/threonine kinase
  misc_feature (1)..(386): NCBI GI NO: 15223317 NR Description: serine threonine kinase, putative
  misc_feature (1)..(386): NCBI GI NO: 14423524 NR Description: similar to wpk4 protein kinase
  misc_feature (1)..(386): NCBI GI NO: 25387057 NR Description: protein T25K16.13
  misc_feature (1)..(381): NCBI GI NO: 7446372 NR Description: probable serine/threonine kinase (EC 2
  misc_feature (1)..(381): NCBI GI NO: 7446371 NR Description: probable serine/threonine kinase (EC 2
  misc_feature (1)..(382): NCBI GI NO: 34902248 NR Description: Putative serine/threonine kinase
  misc_feature (1)..(391): NCBI GI NO: 15238499 NR Description: serine/threonine protein kinase SOS2(gb|AAF62923
  misc_feature (1)..(382): NCBI GI NO: 34903780 NR Description: unnamed protein product
MIAQIKREISTMKLIRHPNVIRMYEVMASKTKIYIVMELVTGGELFDKIASRGRLKEDDARKYFQQLINSVDYCHSRGVYHRDLKPENLLLDASGTLKVSDFGLSALSQQVREDGLLHTTCGTPNYVAPEVINNKGYDGAKADLWSCGVILFVLMAGYLPFEDSNLMSLYKKIFKADFSCPSWFSTSAKKLIKKILEPNANNRITIAELINNEWFKKGYQPPRFETADVNLDDVNSIFDESGEPAQLVVERREERPSVMNAFELISTSQGLNLGTLFEKQTGSVKRETRFASRLPANEILSKIEAAAGPMGFNVQKRNYKLKLQGENPGRKGQLAIATEVFEVTPSLYMVELRKSNGDTLEFHKFYHNISNGLKDVMWKPESGIVEGDEARQRRSP

SEQ ID NO: 28336 - protein, 385 aa, Zea mays subsp. mays
  peptide (1)..(385): Ceres Seq. ID no. 12357345
  misc_feature (1)..(204): Pfam Name: Pfam Description:  Protein kinase domain
  misc_feature (1)..(368): NCBI GI NO: 18397430 NR Description: serine/threonine kinase, putative
  misc_feature (1)..(368): NCBI GI NO: 25387051 NR Description: probable serine/threonine kinase
  misc_feature (1)..(375): NCBI GI NO: 15223317 NR Description: serine threonine kinase, putative
  misc_feature (1)..(375): NCBI GI NO: 14423524 NR Description: similar to wpk4 protein kinase
  misc_feature (1)..(375): NCBI GI NO: 25387057 NR Description: protein T25K16.13
  misc_feature (1)..(370): NCBI GI NO: 7446372 NR Description: probable serine/threonine kinase (EC 2
  misc_feature (1)..(370): NCBI GI NO: 7446371 NR Description: probable serine/threonine kinase (EC 2
  misc_feature (1)..(371): NCBI GI NO: 34902248 NR Description: Putative serine/threonine kinase
  misc_feature (1)..(380): NCBI GI NO: 15238499 NR Description: serine/threonine protein kinase SOS2(gb|AAF62923
  misc_feature (1)..(371): NCBI GI NO: 34903780 NR Description: unnamed protein product
MKLIRHPNVIRMYEVMASKTKIYIVMELVTGGELFDKIASRGRLKEDDARKYFQQLINSVDYCHSRGVYHRDLKPENLLLDASGTLKVSDFGLSALSQQVREDGLLHTTCGTPNYVAPEVINNKGYDGAKADLWSCGVILFVLMAGYLPFEDSNLMSLYKKIFKADFSCPSWFSTSAKKLIKKILEPNANNRITIAELINNEWFKKGYQPPRFETADVNLDDVNSIFDESGEPAQLVVERREERPSVMNAFELISTSQGLNLGTLFEKQTGSVKRETRFASRLPANEILSKIEAAAGPMGFNVQKRNYKLKLQGENPGRKGQLAIATEVFEVTPSLYMVELRKSNGDTLEFHKFYHNISNGLKDVMWKPESGIVEGDEARQRRSP

SEQ ID NO: 28337 - DNA, 1297 bp, Zea mays subsp. mays
  misc_feature (1)..(1297): Ceres Seq. ID no. 13492533
acgcatcgatcaccctcctcgctcccggtcaacagcagcggcgcagagcacgacgccgacacgcgccatggcggcggtgaggcaccggcagctggaggccaacggcatcacgatgcacgtcgcggaggccggccccgtgaacgcctccgcgccggcggtgctgttcgtgcacggcttcccggagctctggtactcgtggcgccaccagatgggctacctcgccgcgcgcggctaccgctgcgtggcacccgacctccgaggctacggcggcaccaccgcgccgccggaaccgacctcctacaccgtcttccatatcgtcggcgacatcgtcgcgctcctcgacgccctccacctcccgcaggtgttcgttgtcggccacgactggggcgccatcgtgtcgtggaacctctgcctgctgcggccggatcgggtgcgcgcgctcgtcaacctcagcgttgccttcatgccccggaggcccggcgtcaagcctcttgagtacttccgcgccgcatacggggatgagtactacgtctgccgattccaggaaccaggactcgaagcagaatttgctacgtttgacttgaagagtttcttcacattagcattgactcttcgggcaacaggttcttcagctatggaccttcgaaaaatgcaaacttatagtaagcaaatggtgctaccttcttggctatctgaggaagatgtcagttaccttgcaagtgtgtactcaaaaactggatttgctggtggagtaaattactatcgctgcttggacctgaactgggaactgatggcgccatggacaggagcaaaggtgcaagttccaaccaagttcatcgttggggacggtgacctggcgtaccatcaccctggagtgaagaggtacatccacaagggcgggttcaagagggacgtgcccatgcttgaggaggtggtggtcatcaagggcgctggggcacttcatccagcaggaaagagcgcaggaaatcagtgagcacatccatgactacatcaagaagttcgaagcttgtggtctgccgccactgagagtttcaaagctatgagagacctgatggcttctgtacataactcaaatggtctgggagctattgtagttgtttgtagtgctgcagatctatatattatgaatggtatggagtactgacgatctattcaatggacccacgttgcgttgtgctgtgtggggggcacgggtccccacttaattttcttgtttcagtggacatcttattttatttgatgtagctacaaaggttcattagggcatgtacaatcc

SEQ ID NO: 28338 - protein, 330 aa, Zea mays subsp. mays
  peptide (1)..(330): Ceres Seq. ID no. 13492534
  misc_feature (78)..(318): Pfam Name: Pfam Description:  alpha/beta hydrolase fold
  misc_feature (22)..(318): NCBI GI NO: 34897302 NR Description: putative hydrolase
  misc_feature (23)..(318): NCBI GI NO: 25044843 NR Description: epoxide hydrolase [Ananas comosus]
  misc_feature (22)..(318): NCBI GI NO: 34897298 NR Description: putative hydrolase
  misc_feature (23)..(321): NCBI GI NO: 18411917 NR Description: epoxide hydrolase, putative [Arabidopsis thaliana]
  misc_feature (23)..(317): NCBI GI NO: 7489256 NR Description: probable epoxide hydrolase (EC 3
  misc_feature (23)..(317): NCBI GI NO: 7489254 NR Description: probable epoxide hydrolase (EC 3
  misc_feature (23)..(317): NCBI GI NO: 27960680 NR Description: soluble epoxide hydrolase [Euphorbia lagascae]
  misc_feature (23)..(317): NCBI GI NO: 407942 NR Description: epoxide hydrolase
  misc_feature (23)..(317): NCBI GI NO: 7489255 NR Description: probable epoxide hydrolase (EC 3
  misc_feature (22)..(316): NCBI GI NO: 34902880 NR Description: unnamed protein product
RIDHPPRSRSTAAAQSTTPTRAMAAVRHRQLEANGITMHVAEAGPVNASAPAVLFVHGFPELWYSWRHQMGYLAARGYRCVAPDLRGYGGTTAPPEPTSYTVFHIVGDIVALLDALHLPQVFVVGHDWGAIVSWNLCLLRPDRVRALVNLSVAFMPRRPGVKPLEYFRAAYGDEYYVCRFQEPGLEAEFATFDLKSFFTLALTLRATGSSAMDLRKMQTYSKQMVLPSWLSEEDVSYLASVYSKTGFAGGVNYYRCLDLNWELMAPWTGAKVQVPTKFIVGDGDLAYHHPGVKRYIHKGGFKRDVPMLEEVVVIKGAGALHPAGKSAGNQ

SEQ ID NO: 28339 - protein, 308 aa, Zea mays subsp. mays
  peptide (1)..(308): Ceres Seq. ID no. 13492535
  misc_feature (56)..(296): Pfam Name: Pfam Description:  alpha/beta hydrolase fold
  misc_feature (1)..(296): NCBI GI NO: 34897302 NR Description: putative hydrolase
  misc_feature (1)..(296): NCBI GI NO: 25044843 NR Description: epoxide hydrolase [Ananas comosus]
  misc_feature (1)..(296): NCBI GI NO: 34897298 NR Description: putative hydrolase
  misc_feature (1)..(299): NCBI GI NO: 18411917 NR Description: epoxide hydrolase, putative [Arabidopsis thaliana]
  misc_feature (1)..(295): NCBI GI NO: 7489256 NR Description: probable epoxide hydrolase (EC 3
  misc_feature (1)..(295): NCBI GI NO: 7489254 NR Description: probable epoxide hydrolase (EC 3
  misc_feature (1)..(295): NCBI GI NO: 27960680 NR Description: soluble epoxide hydrolase [Euphorbia lagascae]
  misc_feature (1)..(295): NCBI GI NO: 407942 NR Description: epoxide hydrolase
  misc_feature (1)..(295): NCBI GI NO: 7489255 NR Description: probable epoxide hydrolase (EC 3
  misc_feature (1)..(294): NCBI GI NO: 34902880 NR Description: unnamed protein product
MAAVRHRQLEANGITMHVAEAGPVNASAPAVLFVHGFPELWYSWRHQMGYLAARGYRCVAPDLRGYGGTTAPPEPTSYTVFHIVGDIVALLDALHLPQVFVVGHDWGAIVSWNLCLLRPDRVRALVNLSVAFMPRRPGVKPLEYFRAAYGDEYYVCRFQEPGLEAEFATFDLKSFFTLALTLRATGSSAMDLRKMQTYSKQMVLPSWLSEEDVSYLASVYSKTGFAGGVNYYRCLDLNWELMAPWTGAKVQVPTKFIVGDGDLAYHHPGVKRYIHKGGFKRDVPMLEEVVVIKGAGALHPAGKSAGNQ

SEQ ID NO: 28340 - protein, 293 aa, Zea mays subsp. mays
  peptide (1)..(293): Ceres Seq. ID no. 13492536
  misc_feature (41)..(281): Pfam Name: Pfam Description:  alpha/beta hydrolase fold
  misc_feature (1)..(281): NCBI GI NO: 34897302 NR Description: putative hydrolase
  misc_feature (1)..(281): NCBI GI NO: 25044843 NR Description: epoxide hydrolase [Ananas comosus]
  misc_feature (1)..(281): NCBI GI NO: 34897298 NR Description: putative hydrolase
  misc_feature (1)..(284): NCBI GI NO: 18411917 NR Description: epoxide hydrolase, putative [Arabidopsis thaliana]
  misc_feature (1)..(280): NCBI GI NO: 7489256 NR Description: probable epoxide hydrolase (EC 3
  misc_feature (1)..(280): NCBI GI NO: 7489254 NR Description: probable epoxide hydrolase (EC 3
  misc_feature (1)..(280): NCBI GI NO: 27960680 NR Description: soluble epoxide hydrolase [Euphorbia lagascae]
  misc_feature (1)..(280): NCBI GI NO: 407942 NR Description: epoxide hydrolase
  misc_feature (1)..(280): NCBI GI NO: 7489255 NR Description: probable epoxide hydrolase (EC 3
  misc_feature (1)..(279): NCBI GI NO: 34902880 NR Description: unnamed protein product
MHVAEAGPVNASAPAVLFVHGFPELWYSWRHQMGYLAARGYRCVAPDLRGYGGTTAPPEPTSYTVFHIVGDIVALLDALHLPQVFVVGHDWGAIVSWNLCLLRPDRVRALVNLSVAFMPRRPGVKPLEYFRAAYGDEYYVCRFQEPGLEAEFATFDLKSFFTLALTLRATGSSAMDLRKMQTYSKQMVLPSWLSEEDVSYLASVYSKTGFAGGVNYYRCLDLNWELMAPWTGAKVQVPTKFIVGDGDLAYHHPGVKRYIHKGGFKRDVPMLEEVVVIKGAGALHPAGKSAGNQ

SEQ ID NO: 28341 - DNA, 1121 bp, Zea mays subsp. mays
  misc_feature (1)..(1121): Ceres Seq. ID no. 12355468
acacgcagaggctcgtcgcttttattaaatcagcgctcgtcgccacgcaccctcgcctccccagcgtaacaagtgtccttcctccatcttcctcctccactccactcccaagtccccaccacccccaaccccgtctctccactgcggcgcaggcttcgcttcggctccgctcggctcgagcagaagaaaatgcaacggggcagtgcaggccgtcaggtcacacggcaatgttcttaaatatgctgttctacaacacatcagcgctcccaagccagcaatgcttcctgctgccttttctcgtttcatgtcagtttcatctgctcgcctagaggatcgtggatttgaaactgccactgtagcagatgtcttgaagtctaaagggaagagtgctgatggatcttggctctggtgcaccacagaggatagcgtctatgacgctgtcaaatctatgactcagcacaacgtgggagctttggtggttgtcaaacctggacagaataaatcaatcgctggcattgtcactgagagagattatctccggaaaatcatagtgcagggaaggtcttccaagtcaactaaggttggcgacatcatgactgaagagaacaaactgatcacagtgaatcccgacaccaaggtcctgcaggcaatgcagctcatgacagaaaaccgcgtcagacacatcccggtgatcgacggcacggggatgctggggatggtctccatcggcgacgtcgtgcgcgcggtggtggccgagcacagggaggagctgaaccggctcaatgactacatccagggaggctactaggacggcgtgtgcagcgacgaccccctccgatcccgccagtcagtgaagtccgcctttgaaatccaataactcggaacaatgatgatgacgaaataggccgtgttttcttggacaatgatgttaagttcggcaaggttttcctttctctttttttattctactgcgtggtctatgtgtatattgccaaaggcatgcgtgagccatgcgcccggtgctggggcgcagagaccatctgatggtggaaacaccggaaataagagcgtgccgctgtgtgtttcctttgaaggaataaaaatggtgttcgtgttgtgcc

SEQ ID NO: 28342 - protein, 176 aa, Zea mays subsp. mays
  peptide (1)..(176): Ceres Seq. ID no. 12355469
  misc_feature (36)..(91): Pfam Name: Pfam Description:  CBS domain
  misc_feature (1)..(176): NCBI GI NO: 29788876 NR Description: unknown protein
  misc_feature (1)..(176): NCBI GI NO: 15238284 NR Description: putative protein; protein id: At5g10860
  misc_feature (1)..(176): NCBI GI NO: 34913008 NR Description: P0663E10.18
  misc_feature (1)..(80): NCBI GI NO: 18266206 NR Description: senescence-associated putative protein
  misc_feature (20)..(174): NCBI GI NO: 22984734 NR Description: hypothetical protein [Burkholderia fungorum]
  misc_feature (25)..(174): NCBI GI NO: 22988916 NR Description: hypothetical protein [Burkholderia fungorum]
  misc_feature (26)..(173): NCBI GI NO: 34499375 NR Description: conserved hypothetical protein
  misc_feature (22)..(172): NCBI GI NO: 28850322 NR Description: similar to putative protein; protein id:At5g10860
  misc_feature (26)..(174): NCBI GI NO: 26986946 NR Description: CBS domain protein [Pseudomonas putida KT2440]
  misc_feature (26)..(174): NCBI GI NO: 23472673 NR Description: hypothetical protein
MLPAAFSRFMSVSSARLEDRGFETATVADVLKSKGKSADGSWLWCTTEDSVYDAVKSMTQHNVGALVVVKPGQNKSIAGIVTERDYLRKIIVQGRSSKSTKVGDIMTEENKLITVNPDTKVLQAMQLMTENRVRHIPVIDGTGMLGMVSIGDVVRAVVAEHREELNRLNDYIQGGY

SEQ ID NO: 28343 - protein, 167 aa, Zea mays subsp. mays
  peptide (1)..(167): Ceres Seq. ID no. 12355470
  misc_feature (27)..(82): Pfam Name: Pfam Description:  CBS domain
  misc_feature (1)..(167): NCBI GI NO: 29788876 NR Description: unknown protein
  misc_feature (1)..(167): NCBI GI NO: 15238284 NR Description: putative protein; protein id: At5g10860
  misc_feature (1)..(167): NCBI GI NO: 34913008 NR Description: P0663E10.18
  misc_feature (1)..(71): NCBI GI NO: 18266206 NR Description: senescence-associated putative protein
  misc_feature (11)..(165): NCBI GI NO: 22984734 NR Description: hypothetical protein [Burkholderia fungorum]
  misc_feature (16)..(165): NCBI GI NO: 22988916 NR Description: hypothetical protein [Burkholderia fungorum]
  misc_feature (17)..(164): NCBI GI NO: 34499375 NR Description: conserved hypothetical protein
  misc_feature (13)..(163): NCBI GI NO: 28850322 NR Description: similar to putative protein; protein id:At5g10860
  misc_feature (17)..(165): NCBI GI NO: 26986946 NR Description: CBS domain protein [Pseudomonas putida KT2440]
  misc_feature (17)..(165): NCBI GI NO: 23472673 NR Description: hypothetical protein
MSVSSARLEDRGFETATVADVLKSKGKSADGSWLWCTTEDSVYDAVKSMTQHNVGALVVVKPGQNKSIAGIVTERDYLRKIIVQGRSSKSTKVGDIMTEENKLITVNPDTKVLQAMQLMTENRVRHIPVIDGTGMLGMVSIGDVVRAVVAEHREELNRLNDYIQGGY

SEQ ID NO: 28344 - protein, 119 aa, Zea mays subsp. mays
  peptide (1)..(119): Ceres Seq. ID no. 12355471
  misc_feature (1)..(119): NCBI GI NO: 29788876 NR Description: unknown protein
  misc_feature (1)..(119): NCBI GI NO: 15238284 NR Description: putative protein; protein id: At5g10860
  misc_feature (1)..(119): NCBI GI NO: 34913008 NR Description: P0663E10.18
  misc_feature (1)..(23): NCBI GI NO: 18266206 NR Description: senescence-associated putative protein
  misc_feature (1)..(117): NCBI GI NO: 22984734 NR Description: hypothetical protein [Burkholderia fungorum]
  misc_feature (1)..(117): NCBI GI NO: 22988916 NR Description: hypothetical protein [Burkholderia fungorum]
  misc_feature (1)..(116): NCBI GI NO: 34499375 NR Description: conserved hypothetical protein
  misc_feature (1)..(115): NCBI GI NO: 28850322 NR Description: similar to putative protein; protein id:At5g10860
  misc_feature (1)..(117): NCBI GI NO: 26986946 NR Description: CBS domain protein [Pseudomonas putida KT2440]
  misc_feature (1)..(117): NCBI GI NO: 23472673 NR Description: hypothetical protein
MTQHNVGALVVVKPGQNKSIAGIVTERDYLRKIIVQGRSSKSTKVGDIMTEENKLITVNPDTKVLQAMQLMTENRVRHIPVIDGTGMLGMVSIGDVVRAVVAEHREELNRLNDYIQGGY

SEQ ID NO: 28345 - DNA, 887 bp, Zea mays subsp. mays
  misc_feature (1)..(887): Ceres Seq. ID no. 12372498
cattttcatgaagcccagtaagggaagggagagccgattcatttgcatttttctgagcagatgcagatcgatcccgagttccgctgactgcagaggagagagatctagagcgagggagggagggaaatgggccacgaggctgcggcgccggggtcgtcggtgctcggccgcgcggtggaggaggtgcgctcggccctcaacgagcacgccgacgtggttgccgacctcttcggtcgcgtctcctccgaagtgcgcaccggcttcgcgcccgccgtcgactccttcgttggcttcttccacgccgtcgactggaaggagccttggctgatcagcatactatctttccatgccattctgctactggttaccatcatctcgaggaggaatatcaatttccagctcatcttgtcagctctaacattttctggtgtattccttgctgagagattaaatacgttcctggcgcaaaactggaagagcttctctacccaaaactattttgatccccagggccttttcatttcggtcatctggtctggccctctcctcctgataacgatccttattctggtgaacactctcgtgacgctctgcacgctaatggtaaggtggaaaagggcaaagctcaggcatcgcgctcggcaagctcgtgacaagcaggactgatctgaaacctgcgtctatgtatcattcggtggcaagtagaaagtcgtgttcttgctacggttggtctaaccaagaatcacatccctggaaacggtgcccatttcattaggtagcagaatataacgttaagatggtcagattttgctcttgtggacccttttggtgcccgggtagccatttactacgctgcaatattatcacgtcacacgatttctttgggc

SEQ ID NO: 28346 - protein, 179 aa, Zea mays subsp. mays
  peptide (1)..(179): Ceres Seq. ID no. 12372499
  misc_feature (1)..(179): NCBI GI NO: 38637052 NR Description: unknown protein
  misc_feature (17)..(179): NCBI GI NO: 18399227 NR Description: Expressed protein; protein id: At1g34350
  misc_feature (17)..(179): NCBI GI NO: 21554376 NR Description: unknown [Arabidopsis thaliana]
  misc_feature (50)..(179): NCBI GI NO: 24653051 NR Description: CG30051-PB [Drosophila melanogaster]
  misc_feature (61)..(179): NCBI GI NO: 11359939 NR Description: hypothetical protein DKFZp434C1714
  misc_feature (61)..(179): NCBI GI NO: 16359094 NR Description: Unknown (protein for IMAGE:4686355) [Homo sapiens]
  misc_feature (61)..(179): NCBI GI NO: 21595411 NR Description: Hypothetical protein DKFZp434C1714 [Homo sapiens]
  misc_feature (61)..(179): NCBI GI NO: 40548391 NR Description: hypothetical protein DKFZp434C1714 [Homo sapiens]
  misc_feature (61)..(179): NCBI GI NO: 34864175 NR Description: similar to cDNA sequence BC024093
  misc_feature (61)..(179): NCBI GI NO: 25286705 NR Description: cDNA sequence BC024093 [Mus musculus]
MGHEAAAPGSSVLGRAVEEVRSALNEHADVVADLFGRVSSEVRTGFAPAVDSFVGFFHAVDWKEPWLISILSFHAILLLVTIISRRNINFQLILSALTFSGVFLAERLNTFLAQNWKSFSTQNYFDPQGLFISVIWSGPLLLITILILVNTLVTLCTLMVRWKRAKLRHRARQARDKQD

SEQ ID NO: 28347 - protein, 108 aa, Zea mays subsp. mays
  peptide (1)..(108): Ceres Seq. ID no. 12372500
IFMKPSKGRESRFICIFLSRCRSIPSSADCRGERSRAREGGKWATRLRRRGRRCSAARWRRCARPSTSTPTWLPTSSVASPPKCAPASRPPSTPSLASSTPSTGRSLG

SEQ ID NO: 28348 - protein, 106 aa, Zea mays subsp. mays
  peptide (1)..(106): Ceres Seq. ID no. 12372501
MKPSKGRESRFICIFLSRCRSIPSSADCRGERSRAREGGKWATRLRRRGRRCSAARWRRCARPSTSTPTWLPTSSVASPPKCAPASRPPSTPSLASSTPSTGRSLG

SEQ ID NO: 28349 - DNA, 1978 bp, Zea mays subsp. mays
  misc_feature (1)..(1978): Ceres Seq. ID no. 12387049
aaaccaaacccagctcaggcacaaccccaacgcaccgccgccgctcgcctggcctcacctcgccggagaagagttataagacaggagaaccccgtccccggggcgcaggcctcggcagcttccgtgaccaccgcccaatcctgccacagctgccctccctcctcccctctgggcgtggccgagttgtaggcatcacggctagcgttgcagccccccggcgcggccccgcagctgcgcaggtggagcccacgggcaccatcgcctccgctgtcgcgtccagccccgctccgcacggcggccgcgggggcgctgccctcggccggaggaagcccgtccgatctcctcttcctcgccggcggcggtcgcctctgagccgttcctgtctctcaccttcttcctttcctagcaattagtcccttctgctaacccccccggaccccgacgagttctcaccccgagagtaactgaccgacctaccggcatggagatgaagctgaccatcaggagggtgcccaccgtcgtctccaactaccaggaggacgccgacaagccgcgcgcgggctgcgggaggaactgcctcggcgactgctgcctgcctgcttccaagcttcccctctacgcgttcaagttgactccggcaaagggctcgcaggaggatgctgcttcaaccaagttacttgttgatattctccttagtgagtgggaggacaggatgactcgaggcttattccgctacgatgtcactgcctgtgagaccaaggtcattcctggcaaccttgggtttgttgcacaactcaatgaagggcgccatcttaagaagcgccctactgagtttcgtgtggaccgtgtgctccagccgtttgaccctgccaaattcaatttcacaaaagttggccaggaagaggttctcttccaatttgagaatagtggtggtgatgacagctatttcctgaacaacgctccaatcattgctgttgatcgggctccaaatgttattgctatcaatgtaagcccaattgaatatggacatgtgcttctcattcctcgtgttctggaccgcctgcctcagaggattgatccagagagcttcttgcttgcactgcaaatggcagccgagggaggtagcccatacttcaggcttggttacaatagcttgggtgcgtttgccaccatcaatcacctccactttcaggcgtactacttgtcagtgcctttccctgttgagaaggcagctacccacaagatcccactctctgaggacacgaagaagaatggggtgaccgtgtccaagctgataaattatcctgtgagaggcctggtatttgagggagggaacaccctggacgacctggccactgtggtttctaatgcttgcatttggctgcaagacaacaatgtgccttacaatgtgctcatttctgactgtggcaagagggttttcctgttcccccagtgctacgcagagaagcaggctctgggtgaagtgagccaggagctgctggacactcaggtgaacccagctgtgtgggagatcagtggacacatggtgctgaaacggaggatggactatgaggaggcatctgaaacctccgcgtggaaactcctcgccgaggtctctctctccgaggagcgcttcgaggaagtgaaggcgtacatcttcagcgctgctggcctggttcagtatgatgaggaagaggaggaagccagcgacggtgagggccctacggcctatgttcctgtcaaggttacccctctgcccatcgctgaagggtgcctcgtcctcccgtgagtccgtggtcggttaaataaagggccgtatatgattgcgagccctgtgctctgccgctattttcttctcgtttgtgtcttgctgctctcgtggtgaactcgctactccagtactctgcaatattaagcagaagctattgtattgtttgggtcgtttgtcagctaaattgaaatgcgatggacatttact

SEQ ID NO: 28350 - protein, 435 aa, Zea mays subsp. mays
  peptide (1)..(435): Ceres Seq. ID no. 12387050
  misc_feature (3)..(407): NCBI GI NO: 15240467 NR Description: putative protein; protein id: At5g55120
  misc_feature (5)..(406): NCBI GI NO: 18416877 NR Description: putative protein; protein id: At4g26850
  misc_feature (5)..(406): NCBI GI NO: 15810139 NR Description: unknown protein [Arabidopsis thaliana]
  misc_feature (43)..(406): NCBI GI NO: 7452423 NR Description: hypothetical protein F10M23
  misc_feature (43)..(406): NCBI GI NO: 21070346 NR Description: VTC2 [Arabidopsis thaliana]
  misc_feature (93)..(392): NCBI GI NO: 34907712 NR Description: P0035F12.16
  misc_feature (5)..(179): NCBI GI NO: 7452423 NR Description: hypothetical protein F10M23
  misc_feature (5)..(179): NCBI GI NO: 21070346 NR Description: VTC2 [Arabidopsis thaliana]
  misc_feature (70)..(390): NCBI GI NO: 27677438 NR Description: similar to CG3552-PC
  misc_feature (70)..(390): NCBI GI NO: 22766878 NR Description: Unknown (protein for MGC:47349) [Mus musculus]
MEMKLTIRRVPTVVSNYQEDADKPRAGCGRNCLGDCCLPASKLPLYAFKLTPAKGSQEDAASTKLLVDILLSEWEDRMTRGLFRYDVTACETKVIPGNLGFVAQLNEGRHLKKRPTEFRVDRVLQPFDPAKFNFTKVGQEEVLFQFENSGGDDSYFLNNAPIIAVDRAPNVIAINVSPIEYGHVLLIPRVLDRLPQRIDPESFLLALQMAAEGGSPYFRLGYNSLGAFATINHLHFQAYYLSVPFPVEKAATHKIPLSEDTKKNGVTVSKLINYPVRGLVFEGGNTLDDLATVVSNACIWLQDNNVPYNVLISDCGKRVFLFPQCYAEKQALGEVSQELLDTQVNPAVWEISGHMVLKRRMDYEEASETSAWKLLAEVSLSEERFEEVKAYIFSAAGLVQYDEEEEEASDGEGPTAYVPVKVTPLPIAEGCLVLP

SEQ ID NO: 28351 - protein, 433 aa, Zea mays subsp. mays
  peptide (1)..(433): Ceres Seq. ID no. 12387051
  misc_feature (1)..(405): NCBI GI NO: 15240467 NR Description: putative protein; protein id: At5g55120
  misc_feature (3)..(404): NCBI GI NO: 18416877 NR Description: putative protein; protein id: At4g26850
  misc_feature (3)..(404): NCBI GI NO: 15810139 NR Description: unknown protein [Arabidopsis thaliana]
  misc_feature (41)..(404): NCBI GI NO: 7452423 NR Description: hypothetical protein F10M23
  misc_feature (41)..(404): NCBI GI NO: 21070346 NR Description: VTC2 [Arabidopsis thaliana]
  misc_feature (91)..(390): NCBI GI NO: 34907712 NR Description: P0035F12.16
  misc_feature (3)..(177): NCBI GI NO: 7452423 NR Description: hypothetical protein F10M23
  misc_feature (3)..(177): NCBI GI NO: 21070346 NR Description: VTC2 [Arabidopsis thaliana]
  misc_feature (68)..(388): NCBI GI NO: 27677438 NR Description: similar to CG3552-PC
  misc_feature (68)..(388): NCBI GI NO: 22766878 NR Description: Unknown (protein for MGC:47349) [Mus musculus]
MKLTIRRVPTVVSNYQEDADKPRAGCGRNCLGDCCLPASKLPLYAFKLTPAKGSQEDAASTKLLVDILLSEWEDRMTRGLFRYDVTACETKVIPGNLGFVAQLNEGRHLKKRPTEFRVDRVLQPFDPAKFNFTKVGQEEVLFQFENSGGDDSYFLNNAPIIAVDRAPNVIAINVSPIEYGHVLLIPRVLDRLPQRIDPESFLLALQMAAEGGSPYFRLGYNSLGAFATINHLHFQAYYLSVPFPVEKAATHKIPLSEDTKKNGVTVSKLINYPVRGLVFEGGNTLDDLATVVSNACIWLQDNNVPYNVLISDCGKRVFLFPQCYAEKQALGEVSQELLDTQVNPAVWEISGHMVLKRRMDYEEASETSAWKLLAEVSLSEERFEEVKAYIFSAAGLVQYDEEEEEASDGEGPTAYVPVKVTPLPIAEGCLVLP

SEQ ID NO: 28352 - protein, 358 aa, Zea mays subsp. mays
  peptide (1)..(358): Ceres Seq. ID no. 12387052
  misc_feature (1)..(330): NCBI GI NO: 15240467 NR Description: putative protein; protein id: At5g55120
  misc_feature (1)..(329): NCBI GI NO: 18416877 NR Description: putative protein; protein id: At4g26850
  misc_feature (1)..(329): NCBI GI NO: 15810139 NR Description: unknown protein [Arabidopsis thaliana]
  misc_feature (1)..(329): NCBI GI NO: 7452423 NR Description: hypothetical protein F10M23
  misc_feature (1)..(329): NCBI GI NO: 21070346 NR Description: VTC2 [Arabidopsis thaliana]
  misc_feature (16)..(315): NCBI GI NO: 34907712 NR Description: P0035F12.16
  misc_feature (1)..(102): NCBI GI NO: 7452423 NR Description: hypothetical protein F10M23
  misc_feature (1)..(102): NCBI GI NO: 21070346 NR Description: VTC2 [Arabidopsis thaliana]
  misc_feature (1)..(313): NCBI GI NO: 27677438 NR Description: similar to CG3552-PC
  misc_feature (1)..(313): NCBI GI NO: 22766878 NR Description: Unknown (protein for MGC:47349) [Mus musculus]
MTRGLFRYDVTACETKVIPGNLGFVAQLNEGRHLKKRPTEFRVDRVLQPFDPAKFNFTKVGQEEVLFQFENSGGDDSYFLNNAPIIAVDRAPNVIAINVSPIEYGHVLLIPRVLDRLPQRIDPESFLLALQMAAEGGSPYFRLGYNSLGAFATINHLHFQAYYLSVPFPVEKAATHKIPLSEDTKKNGVTVSKLINYPVRGLVFEGGNTLDDLATVVSNACIWLQDNNVPYNVLISDCGKRVFLFPQCYAEKQALGEVSQELLDTQVNPAVWEISGHMVLKRRMDYEEASETSAWKLLAEVSLSEERFEEVKAYIFSAAGLVQYDEEEEEASDGEGPTAYVPVKVTPLPIAEGCLVLP

SEQ ID NO: 28353 - DNA, 1410 bp, Zea mays subsp. mays
  misc_feature (1)..(1410): Ceres Seq. ID no. 12405518
  misc_feature (623)..(623): n is a, c, t, g, unknown, or other
gtaatctcaatcgtatcgtccacctcaacaaaccttcgtccacgcttcgactcctgcaggagtgagggagagagtgatggagaggtgcgggagctgggactgcgacgcggcggcagcgcagaaggcggtaccggcgccgttcctgaccaagacgtaccagctggtggacgacccggccacggaccacatcgtctcctggggggacgaccgggtctccaccttcgtggtctggcgcccgccggagttcgcgcgcgacatcctccccaactacttcaagcacaacaacttctcctccttcgttcgacagctaaacacctacgggttccggaaggtcgtcccggagcggtgggagttcgggaacgagttcttccggaagggggagaagcagctgctgtgcgagatccaccggcggaagacgtcgacgtccgcggctccgccgtcgcctccgccattcttcggcggcgcctcacttcccgctcttccacccggacgccccgcaccaccaccaccaccaccagttcgtggggggaggagacgacggggctgtggcggccgcgcacgtcggcggcgtcggcgtcgccctcgcgttcccgcacccgcattgttggagggagccgccgcantccgccgcgccggtagccacgcggctgctagccctgggcgcggctcctccggcgccgtcgtccccgctgccggccgccgatgccggcggaggcgggcgcgcggccgtgctggtggaggagaacgagcggctgcggcgcagcaacgcggcgctgctgcaggagctggcgcacatgcgcaagctgtacaacgacatcatctacttcgtgcagaaccacgtgcgccccgcggcgcccagccctgccgcggccgcgttcctgcagggcctcggcctgcaggcgcgcaagaagcccgccgcggggccgctcaaccactccggtgggagcaccacgtccagcagctcgctcaccatcgcggaggaggagccctcgcccccgcccccgccgcagcaggccgacaagagcgccggaagcagcggcactgcgcggtctgccgccgaccgcgcgccgcccaccatgctcttcggagtgcacctcagcgccgcgcgaggcagcaagaggccggcttccccggaggaagaagacgaccagtcgcccacgtcgcctgctgggaagccacggctggcgctggagtgcgccggcttgagcctggccgtcgcggtgccctccgccggcgcctcgtcccctgctagcactagctagctaagcctcactcaccttgcgcgcaacctgacgcgcgtttgcatgctgctgcatgcaaacgcaacggcgggcgtggccgttttgttgttctagctctagtttgatcgacgtgttccatttgaaccggtagatccagatgggttctctc

SEQ ID NO: 28354 - protein, 391 aa, Zea mays subsp. mays
  peptide (1)..(391): Ceres Seq. ID no. 12405519
  misc_feature (19)..(143): Pfam Name: Pfam Description:  HSF-type DNA-binding
  misc_feature (16)..(143): NCBI GI NO: 15220101 NR Description: heat shock transcription factor, putative
  misc_feature (12)..(141): NCBI GI NO: 33146640 NR Description: putative heat shock transcription factor HSF5
  misc_feature (16)..(114): NCBI GI NO: 2129832 NR Description: heat shock transcription factor HSF5 - soybean
  misc_feature (15)..(136): NCBI GI NO: 33591098 NR Description: heat shock factor RHSF2
  misc_feature (14)..(143): NCBI GI NO: 5821136 NR Description: heat shock factor [Nicotiana tabacum]
  misc_feature (56)..(115): NCBI GI NO: 2129830 NR Description: heat shock transcription factor HSF31 - soybean
  misc_feature (14)..(118): NCBI GI NO: 6624618 NR Description: heat shock factor 7 [Arabidopsis thaliana]
  misc_feature (14)..(118): NCBI GI NO: 15234264 NR Description: heat shock transcription factor - like protein
  misc_feature (12)..(117): NCBI GI NO: 30697614 NR Description: heat shock transcription factor 6 (HSF6)
  misc_feature (14)..(131): NCBI GI NO: 123684 NR Description: HEAT SHOCK FACTOR PROTEIN HSF24
  misc_feature (183)..(183): Xaa is any aa, unknown or other
MERCGSWDCDAAAAQKAVPAPFLTKTYQLVDDPATDHIVSWGDDRVSTFVVWRPPEFARDILPNYFKHNNFSSFVRQLNTYGFRKVVPERWEFGNEFFRKGEKQLLCEIHRRKTSTSAAPPSPPPFFGGASLPALPPGRPAPPPPPPVRGGRRRRGCGGRARRRRRRRPRVPAPALLEGAAAXRRAGSHAAASPGRGSSGAVVPAAGRRCRRRRARGRAGGGERAAAAQQRGAAAGAGAHAQAVQRHHLLRAEPRAPRGAQPCRGRVPAGPRPAGAQEARRGAAQPLRWEHHVQQLAHHRGGGALAPAPAAAGRQERRKQRHCAVCRRPRAAHHALRSAPQRRARQQEAGFPGGRRRPVAHVACWEATAGAGVRRLEPGRRGALRRRLVPC

SEQ ID NO: 28355 - protein, 212 aa, Zea mays subsp. mays
  peptide (1)..(212): Ceres Seq. ID no. 12405520
  misc_feature (67)..(212): NCBI GI NO: 25143299 NR Description: pre-mRNA splicing SR protein related RSR-1 (68
  misc_feature (36)..(212): NCBI GI NO: 25143299 NR Description: pre-mRNA splicing SR protein related RSR-1 (68
  misc_feature (208)..(208): Xaa is any aa, unknown or other
VISIVSSTSTNLRPRFDSCRSEGESDGEVRELGLRRGGSAEGGTGAVPDQDVPAGGRPGHGPHRLLGGRPGLHLRGLAPAGVRARHPPQLLQAQQLLLLRSTAKHLRVPEGRPGAVGVRERVLPEGGEAAAVRDPPAEDVDVRGSAVASAILRRRLTSRSSTRTPRTTTTTTSSWGEETTGLWRPRTSAASASPSRSRTRIVGGSRRXPPRR

SEQ ID NO: 28356 - DNA, 2035 bp, Zea mays subsp. mays
  misc_feature (1)..(2035): Ceres Seq. ID no. 12405514
actctctttcccaccgccttcttccactactcttcaccctcccctcctccccatcgcgaactcacaagagaaccaagtagacgagggagaaggagatggcgaagaagaaggagaaggcggtgaacgtgtcgggcaagccgcggcactcgaacgacgtcaaccgccccaatgacaagaagggcgcgggcggcggcgccggtggcgggagccggtccgcggctaccgtgcggcggctcaagatgtacaagacgcggcccaagagggaccgctcctggaaggtgctcaggaacgattttcagtctaaagagctccccaacacccgcatcgagcccgaccgccggtggttcggcaatactcgcgttgtgggccagccacagcttgaaatgttccgggaggaactccagagtcggctttccgacaacttcagtgtcatcctgaaagaacggaagctgccactatcgctcctgcaagatcatcaaaagcaagcgaaggcacatctgcttgaagttgaaccttttgagcatgcttttgggccaaagggcaagaggaaacgtccgaaactaactgctcttgactacgaatctttgctgaagagagctgatgattcccaagatgtgtttgagcaaaagtatgcttcatcaaagttgccaagggaggaagaagaagatggcttacgtgatctagtgaggcatacaatgtttgagaagggacagagcaaaagaatctggggtgaactatacaaagttattgactcttcggacgttgttgtgcaggtgttggacgccagggatccaatgggcactcgatgctaccatctagagagacatctaaaagagaactgcaagcacaaacacttggttttcttgctaaataagtgtgatctaatccctgcttgggctacaaaaggatggttaaggaccctttcgaaggactatcccaccctagcattccatgcaagcatcaacaagtcatttggcaaaggatctcttctgtcagtattgaggcaatttgctcgtttgaagaatgacaaacaagctatttctgtcgggtttgttgggtaccccaatgttgggaagtcatcaattattaacacactacggtcgaagagtgtctgcaaggttgctccaatacctggagagacaaaagtgtggcagtacatcactctcactaaaaagatatttttgattcattgtcccggtgttgtatatcaaaacaatgattcagaaactgatatagttctgaagggtgtggtccgggtgacaaatttggcggatgctgctgagcacattggtgaagttcttaggcgtgttaaaaaggagcatctccaaagagcgtacaaaattcaagattggtctgatgataacgattttcttgtccagctgtgcaggaccactggaaaacttctcaagggcggggagcctgatctgacaacagcagccaagatggtacttcatgactggcagaggggtaaaatccccttctttgtaccccctccgcagcaaagcgacggcggtgcatctgaaagtgctgaacaacctattgggattaccaaagaggacggagtaagcagcgacaggactgccgcagccatgaaagccattgcaggaataatctcgtcacagcagaacatgaatgtgccctgccataaggaaaacaatgcagacaatgaagacactgaaaatgcagataacgaagacattgagagttcagataacgaagacaatgatgacatcgagcctgcaggagcgatctgagtgatctttgggtacagatgtggattattagagttgatatgtcaaggctaatgaatttgtcagccccaggtgttgtgtagctacttgaccatatcactggcgtgccaggaaaaaaaggatcatgttgagttgcactttttgtaactatcgtacctgaatctttgtaatagggcaagaagagagttttgctaggtacctggttgtatcgggatgcttatctgtgctgtctactacagatacagttacatctattttacttaaatcaagtggaagttatctcc

SEQ ID NO: 28357 - protein, 552 aa, Zea mays subsp. mays
  peptide (1)..(552): Ceres Seq. ID no. 12405515
  misc_feature (210)..(466): Pfam Name: Pfam Description:  GTPase of unknown function
  misc_feature (4)..(547): NCBI GI NO: 15219138 NR Description: putative GTP-binding protein; protein id:At1g52980
  misc_feature (22)..(547): NCBI GI NO: 27503448 NR Description: Similar to nucleolar GTPase [Xenopus laevis]
  misc_feature (1)..(467): NCBI GI NO: 21704088 NR Description: similar to Autoantigen NGP-1 [Mus musculus]
  misc_feature (1)..(516): NCBI GI NO: 7019419 NR Description: nucleolar GTPase [Homo sapiens]
  misc_feature (1)..(467): NCBI GI NO: 26346398 NR Description: unnamed protein product [Mus musculus]
  misc_feature (1)..(350): NCBI GI NO: 34870998 NR Description: similar to Autoantigen NGP-1 [Rattus norvegicus]
  misc_feature (350)..(487): NCBI GI NO: 34870998 NR Description: similar to Autoantigen NGP-1 [Rattus norvegicus]
  misc_feature (1)..(516): NCBI GI NO: 12652715 NR Description: nucleolar GTPase [Homo sapiens]
  misc_feature (18)..(467): NCBI GI NO: 28278918 NR Description: Similar to nucleolar GTPase [Danio rerio]
  misc_feature (18)..(467): NCBI GI NO: 33604045 NR Description: Unknown (protein for MGC:65800) [Danio rerio]
MAKKKEKAVNVSGKPRHSNDVNRPNDKKGAGGGAGGGSRSAATVRRLKMYKTRPKRDRSWKVLRNDFQSKELPNTRIEPDRRWFGNTRVVGQPQLEMFREELQSRLSDNFSVILKERKLPLSLLQDHQKQAKAHLLEVEPFEHAFGPKGKRKRPKLTALDYESLLKRADDSQDVFEQKYASSKLPREEEEDGLRDLVRHTMFEKGQSKRIWGELYKVIDSSDVVVQVLDARDPMGTRCYHLERHLKENCKHKHLVFLLNKCDLIPAWATKGWLRTLSKDYPTLAFHASINKSFGKGSLLSVLRQFARLKNDKQAISVGFVGYPNVGKSSIINTLRSKSVCKVAPIPGETKVWQYITLTKKIFLIHCPGVVYQNNDSETDIVLKGVVRVTNLADAAEHIGEVLRRVKKEHLQRAYKIQDWSDDNDFLVQLCRTTGKLLKGGEPDLTTAAKMVLHDWQRGKIPFFVPPPQQSDGGASESAEQPIGITKEDGVSSDRTAAAMKAIAGIISSQQNMNVPCHKENNADNEDTENADNEDIESSDNEDNDDIEPAGAI

SEQ ID NO: 28358 - protein, 504 aa, Zea mays subsp. mays
  peptide (1)..(504): Ceres Seq. ID no. 12405516
  misc_feature (162)..(418): Pfam Name: Pfam Description:  GTPase of unknown function
  misc_feature (1)..(499): NCBI GI NO: 15219138 NR Description: putative GTP-binding protein; protein id:At1g52980
  misc_feature (1)..(499): NCBI GI NO: 27503448 NR Description: Similar to nucleolar GTPase [Xenopus laevis]
  misc_feature (1)..(419): NCBI GI NO: 21704088 NR Description: similar to Autoantigen NGP-1 [Mus musculus]
  misc_feature (1)..(468): NCBI GI NO: 7019419 NR Description: nucleolar GTPase [Homo sapiens]
  misc_feature (1)..(419): NCBI GI NO: 26346398 NR Description: unnamed protein product [Mus musculus]
  misc_feature (1)..(302): NCBI GI NO: 34870998 NR Description: similar to Autoantigen NGP-1 [Rattus norvegicus]
  misc_feature (302)..(439): NCBI GI NO: 34870998 NR Description: similar to Autoantigen NGP-1 [Rattus norvegicus]
  misc_feature (1)..(468): NCBI GI NO: 12652715 NR Description: nucleolar GTPase [Homo sapiens]
  misc_feature (1)..(419): NCBI GI NO: 28278918 NR Description: Similar to nucleolar GTPase [Danio rerio]
  misc_feature (1)..(419): NCBI GI NO: 33604045 NR Description: Unknown (protein for MGC:65800) [Danio rerio]
MYKTRPKRDRSWKVLRNDFQSKELPNTRIEPDRRWFGNTRVVGQPQLEMFREELQSRLSDNFSVILKERKLPLSLLQDHQKQAKAHLLEVEPFEHAFGPKGKRKRPKLTALDYESLLKRADDSQDVFEQKYASSKLPREEEEDGLRDLVRHTMFEKGQSKRIWGELYKVIDSSDVVVQVLDARDPMGTRCYHLERHLKENCKHKHLVFLLNKCDLIPAWATKGWLRTLSKDYPTLAFHASINKSFGKGSLLSVLRQFARLKNDKQAISVGFVGYPNVGKSSIINTLRSKSVCKVAPIPGETKVWQYITLTKKIFLIHCPGVVYQNNDSETDIVLKGVVRVTNLADAAEHIGEVLRRVKKEHLQRAYKIQDWSDDNDFLVQLCRTTGKLLKGGEPDLTTAAKMVLHDWQRGKIPFFVPPPQQSDGGASESAEQPIGITKEDGVSSDRTAAAMKAIAGIISSQQNMNVPCHKENNADNEDTENADNEDIESSDNEDNDDIEPAGAI

SEQ ID NO: 28359 - protein, 456 aa, Zea mays subsp. mays
  peptide (1)..(456): Ceres Seq. ID no. 12405517
  misc_feature (114)..(370): Pfam Name: Pfam Description:  GTPase of unknown function
  misc_feature (1)..(451): NCBI GI NO: 15219138 NR Description: putative GTP-binding protein; protein id:At1g52980
  misc_feature (1)..(451): NCBI GI NO: 27503448 NR Description: Similar to nucleolar GTPase [Xenopus laevis]
  misc_feature (1)..(371): NCBI GI NO: 21704088 NR Description: similar to Autoantigen NGP-1 [Mus musculus]
  misc_feature (1)..(420): NCBI GI NO: 7019419 NR Description: nucleolar GTPase [Homo sapiens]
  misc_feature (1)..(371): NCBI GI NO: 26346398 NR Description: unnamed protein product [Mus musculus]
  misc_feature (1)..(254): NCBI GI NO: 34870998 NR Description: similar to Autoantigen NGP-1 [Rattus norvegicus]
  misc_feature (254)..(391): NCBI GI NO: 34870998 NR Description: similar to Autoantigen NGP-1 [Rattus norvegicus]
  misc_feature (1)..(420): NCBI GI NO: 12652715 NR Description: nucleolar GTPase [Homo sapiens]
  misc_feature (1)..(371): NCBI GI NO: 28278918 NR Description: Similar to nucleolar GTPase [Danio rerio]
  misc_feature (1)..(371): NCBI GI NO: 33604045 NR Description: Unknown (protein for MGC:65800) [Danio rerio]
MFREELQSRLSDNFSVILKERKLPLSLLQDHQKQAKAHLLEVEPFEHAFGPKGKRKRPKLTALDYESLLKRADDSQDVFEQKYASSKLPREEEEDGLRDLVRHTMFEKGQSKRIWGELYKVIDSSDVVVQVLDARDPMGTRCYHLERHLKENCKHKHLVFLLNKCDLIPAWATKGWLRTLSKDYPTLAFHASINKSFGKGSLLSVLRQFARLKNDKQAISVGFVGYPNVGKSSIINTLRSKSVCKVAPIPGETKVWQYITLTKKIFLIHCPGVVYQNNDSETDIVLKGVVRVTNLADAAEHIGEVLRRVKKEHLQRAYKIQDWSDDNDFLVQLCRTTGKLLKGGEPDLTTAAKMVLHDWQRGKIPFFVPPPQQSDGGASESAEQPIGITKEDGVSSDRTAAAMKAIAGIISSQQNMNVPCHKENNADNEDTENADNEDIESSDNEDNDDIEPAGAI

SEQ ID NO: 28360 - DNA, 1025 bp, Zea mays subsp. mays
  misc_feature (1)..(1025): Ceres Seq. ID no. 12356370
ccaatctgtgtttgtctttgcttgccccccttctcccccctcatctccccccttttcttgttcctgtgcctgtgcattggctggcgatggggtccacttctccttcaggcctggagctcaccatggctgtcccgggcctcagctcctcctctggctcagaggggtttggatgcaacaacaacaacgggagcgggaacgggaacaacatgagggacctggacatgaaccagccggcgagcggcggcgaggaggaggagttcccaatggggagcgtggaggaggaggaggacgagcgcggcggcgccggcgggccgcaccgcgccaagaagctccggctgtccaaggagcagtcccgcctcctggaggagagcttccgcctcaaccacaccctcacaccgaagcaaaaggaggccttggctgtcaagctcaagctgcggcccaggcaggtggaggtctggttccagaaccgcagggctaggacgaagcttaagcagacggagctggagtgcgagtacctgaagcgctgcttcggctcgctgaccgaggagaaccggcggctgcagcgggaggtggaggagctgcgcgcgatgcgggtggccccgcccaccgtgctctccccgcacacccggcagccgctcccggcgtccgcgctcaccatgtgcccgcgctgcgagcgcatcaccgccgcaacggccgcgcgcaccccacgcccggcgcccgccgcgagccccttccacccgcgccgcccgtccgcggcgttttagcctagtctcccgctgcatgcggttccggccggtagggggaaggagcggaaagtttggttgttagggggggggggcagagtgtttgtgctgtgtaaatttgatgatggatggagaaaaccagcgcgggcccgtgtagctttttaggtgtaggtgtaggtgtagggtttggaccttggagtcccttcgcgtcaacgtccccgtccccgtgttccgttccatgccgtgcatggcttgatggatcaaaagtttgtactagcttcc

SEQ ID NO: 28361 - protein, 253 aa, Zea mays subsp. mays
  peptide (1)..(253): Ceres Seq. ID no. 12356371
  misc_feature (106)..(162): Pfam Name: Pfam Description:  Homeobox domain
  misc_feature (29)..(253): NCBI GI NO: 5006851 NR Description: homeodomain leucine zipper protein [Oryza sativa]
  misc_feature (35)..(253): NCBI GI NO: 34911664 NR Description: putative homeodomain-leucine zipper
  misc_feature (27)..(247): NCBI GI NO: 30677923 NR Description: homeodomain-leucine zipper protein ATHB-17
  misc_feature (92)..(247): NCBI GI NO: 25386214 NR Description: probable homeodomain transcription factor
  misc_feature (31)..(229): NCBI GI NO: 30698765 NR Description: homeodomain-leucine zipper protein, putative
  misc_feature (59)..(250): NCBI GI NO: 15225368 NR Description: homeobox-leucine zipper protein, Athb-4
  misc_feature (93)..(252): NCBI GI NO: 7415620 NR Description: homeobox protein PpHB4 [Physcomitrella patens]
  misc_feature (58)..(251): NCBI GI NO: 18034437 NR Description: homeodomain leucine zipper protein CPHB-3
  misc_feature (88)..(252): NCBI GI NO: 3868833 NR Description: CRHB3 [Ceratopteris richardii]
  misc_feature (36)..(253): NCBI GI NO: 15232311 NR Description: homeobox-leucine zipper protein HAT3
NLCLSLLAPLLPPHLPPFLVPVPVHWLAMGSTSPSGLELTMAVPGLSSSSGSEGFGCNNNNGSGNGNNMRDLDMNQPASGGEEEEFPMGSVEEEEDERGGAGGPHRAKKLRLSKEQSRLLEESFRLNHTLTPKQKEALAVKLKLRPRQVEVWFQNRRARTKLKQTELECEYLKRCFGSLTEENRRLQREVEELRAMRVAPPTVLSPHTRQPLPASALTMCPRCERITAATAARTPRPAPAASPFHPRRPSAAF

SEQ ID NO: 28362 - protein, 225 aa, Zea mays subsp. mays
  peptide (1)..(225): Ceres Seq. ID no. 12356372
  misc_feature (78)..(134): Pfam Name: Pfam Description:  Homeobox domain
  misc_feature (1)..(225): NCBI GI NO: 5006851 NR Description: homeodomain leucine zipper protein [Oryza sativa]
  misc_feature (7)..(225): NCBI GI NO: 34911664 NR Description: putative homeodomain-leucine zipper
  misc_feature (1)..(219): NCBI GI NO: 30677923 NR Description: homeodomain-leucine zipper protein ATHB-17
  misc_feature (64)..(219): NCBI GI NO: 25386214 NR Description: probable homeodomain transcription factor
  misc_feature (3)..(201): NCBI GI NO: 30698765 NR Description: homeodomain-leucine zipper protein, putative
  misc_feature (31)..(222): NCBI GI NO: 15225368 NR Description: homeobox-leucine zipper protein, Athb-4
  misc_feature (65)..(224): NCBI GI NO: 7415620 NR Description: homeobox protein PpHB4 [Physcomitrella patens]
  misc_feature (30)..(223): NCBI GI NO: 18034437 NR Description: homeodomain leucine zipper protein CPHB-3
  misc_feature (60)..(224): NCBI GI NO: 3868833 NR Description: CRHB3 [Ceratopteris richardii]
  misc_feature (8)..(225): NCBI GI NO: 15232311 NR Description: homeobox-leucine zipper protein HAT3
MGSTSPSGLELTMAVPGLSSSSGSEGFGCNNNNGSGNGNNMRDLDMNQPASGGEEEEFPMGSVEEEEDERGGAGGPHRAKKLRLSKEQSRLLEESFRLNHTLTPKQKEALAVKLKLRPRQVEVWFQNRRARTKLKQTELECEYLKRCFGSLTEENRRLQREVEELRAMRVAPPTVLSPHTRQPLPASALTMCPRCERITAATAARTPRPAPAASPFHPRRPSAAF

SEQ ID NO: 28363 - protein, 213 aa, Zea mays subsp. mays
  peptide (1)..(213): Ceres Seq. ID no. 12356373
  misc_feature (66)..(122): Pfam Name: Pfam Description:  Homeobox domain
  misc_feature (1)..(213): NCBI GI NO: 5006851 NR Description: homeodomain leucine zipper protein [Oryza sativa]
  misc_feature (1)..(213): NCBI GI NO: 34911664 NR Description: putative homeodomain-leucine zipper
  misc_feature (1)..(207): NCBI GI NO: 30677923 NR Description: homeodomain-leucine zipper protein ATHB-17
  misc_feature (52)..(207): NCBI GI NO: 25386214 NR Description: probable homeodomain transcription factor
  misc_feature (1)..(189): NCBI GI NO: 30698765 NR Description: homeodomain-leucine zipper protein, putative
  misc_feature (19)..(210): NCBI GI NO: 15225368 NR Description: homeobox-leucine zipper protein, Athb-4
  misc_feature (53)..(212): NCBI GI NO: 7415620 NR Description: homeobox protein PpHB4 [Physcomitrella patens]
  misc_feature (18)..(211): NCBI GI NO: 18034437 NR Description: homeodomain leucine zipper protein CPHB-3
  misc_feature (48)..(212): NCBI GI NO: 3868833 NR Description: CRHB3 [Ceratopteris richardii]
  misc_feature (1)..(213): NCBI GI NO: 15232311 NR Description: homeobox-leucine zipper protein HAT3
MAVPGLSSSSGSEGFGCNNNNGSGNGNNMRDLDMNQPASGGEEEEFPMGSVEEEEDERGGAGGPHRAKKLRLSKEQSRLLEESFRLNHTLTPKQKEALAVKLKLRPRQVEVWFQNRRARTKLKQTELECEYLKRCFGSLTEENRRLQREVEELRAMRVAPPTVLSPHTRQPLPASALTMCPRCERITAATAARTPRPAPAASPFHPRRPSAAF

SEQ ID NO: 28364 - DNA, 688 bp, Zea mays subsp. mays
  misc_feature (1)..(688): Ceres Seq. ID no. 12383120
gtgtcaagcatgatattacggacaacctttctttaaagataaatgctcagttgacaagtgagccccactactcccaagggatgctgaattttgattataagggcaaagattttagatctcaggttcaattcggaaacaatggtttctatggagcaaactacatccagagtgtcagcaagaacctttccttgggaactgaagccttttggcttgggcagcaaaggaagtctggagtcggtgttgttgctcgctatgacacaaagaaaatggttgcgactgcacaaattgcaaccactggaatggtcgcgcttagttatgtacagaaagtttctgaaaaggtttcccttgcatctgatttcatgtacaatcaaatgacaaaggatgtaacagcaagctttggttatgattatatgctgagacagtgtcgattgagagggaaactggataccaatggcgtaatttcttctcttttggaggagcgattgactccaggtgtcactttccagttgtctgcagagctggaccactggaagaaagattacaaatttgggtttggtatggctctcggagagtaagacgatttgagcaaattctagacacatgtacaattagtggttggcattagtcgacagggattaaaacgattctactttatctttgcatttatttgtctcccagttattcgttt

SEQ ID NO: 28365 - protein, 190 aa, Zea mays subsp. mays
  peptide (1)..(190): Ceres Seq. ID no. 12383121
  misc_feature (1)..(183): Pfam Name: Pfam Description:  Eukaryotic porin
  misc_feature (1)..(189): NCBI GI NO: 15231008 NR Description: membrane import protein, putative
  misc_feature (16)..(189): NCBI GI NO: 11994775 NR Description: membrane import protein-like
  misc_feature (2)..(186): NCBI GI NO: 15222963 NR Description: hypothetical protein; protein id: At1g50400.1
  misc_feature (13)..(186): NCBI GI NO: 13162531 NR Description: Hypothetical protein [Arabidopsis thaliana]
  misc_feature (13)..(186): NCBI GI NO: 25405370 NR Description: hypothetical protein F14I3.2
  misc_feature (98)..(190): NCBI GI NO: 2982293 NR Description: ISP42-like protein [Picea mariana]
  misc_feature (45)..(190): NCBI GI NO: 34903264 NR Description: unnamed protein product
  misc_feature (13)..(93): NCBI GI NO: 34903264 NR Description: unnamed protein product
  misc_feature (29)..(188): NCBI GI NO: 40738660 NR Description: hypothetical protein AN6510.2
  misc_feature (5)..(186): NCBI GI NO: 23612250 NR Description: mitochondrial import receptor subunit tom40
VKHDITDNLSLKINAQLTSEPHYSQGMLNFDYKGKDFRSQVQFGNNGFYGANYIQSVSKNLSLGTEAFWLGQQRKSGVGVVARYDTKKMVATAQIATTGMVALSYVQKVSEKVSLASDFMYNQMTKDVTASFGYDYMLRQCRLRGKLDTNGVISSLLEERLTPGVTFQLSAELDHWKKDYKFGFGMALGE

SEQ ID NO: 28366 - protein, 164 aa, Zea mays subsp. mays
  peptide (1)..(164): Ceres Seq. ID no. 12383122
  misc_feature (1)..(157): Pfam Name: Pfam Description:  Eukaryotic porin
  misc_feature (1)..(163): NCBI GI NO: 15231008 NR Description: membrane import protein, putative
  misc_feature (1)..(163): NCBI GI NO: 11994775 NR Description: membrane import protein-like
  misc_feature (1)..(160): NCBI GI NO: 15222963 NR Description: hypothetical protein; protein id: At1g50400.1
  misc_feature (1)..(160): NCBI GI NO: 13162531 NR Description: Hypothetical protein [Arabidopsis thaliana]
  misc_feature (1)..(160): NCBI GI NO: 25405370 NR Description: hypothetical protein F14I3.2
  misc_feature (72)..(164): NCBI GI NO: 2982293 NR Description: ISP42-like protein [Picea mariana]
  misc_feature (19)..(164): NCBI GI NO: 34903264 NR Description: unnamed protein product
  misc_feature (1)..(67): NCBI GI NO: 34903264 NR Description: unnamed protein product
  misc_feature (3)..(162): NCBI GI NO: 40738660 NR Description: hypothetical protein AN6510.2
  misc_feature (1)..(160): NCBI GI NO: 23612250 NR Description: mitochondrial import receptor subunit tom40
MLNFDYKGKDFRSQVQFGNNGFYGANYIQSVSKNLSLGTEAFWLGQQRKSGVGVVARYDTKKMVATAQIATTGMVALSYVQKVSEKVSLASDFMYNQMTKDVTASFGYDYMLRQCRLRGKLDTNGVISSLLEERLTPGVTFQLSAELDHWKKDYKFGFGMALGE

SEQ ID NO: 28367 - protein, 102 aa, Zea mays subsp. mays
  peptide (1)..(102): Ceres Seq. ID no. 12383123
  misc_feature (1)..(95): Pfam Name: Pfam Description:  Eukaryotic porin
  misc_feature (1)..(101): NCBI GI NO: 15231008 NR Description: membrane import protein, putative
  misc_feature (1)..(101): NCBI GI NO: 11994775 NR Description: membrane import protein-like
  misc_feature (1)..(98): NCBI GI NO: 15222963 NR Description: hypothetical protein; protein id: At1g50400.1
  misc_feature (1)..(98): NCBI GI NO: 13162531 NR Description: Hypothetical protein [Arabidopsis thaliana]
  misc_feature (1)..(98): NCBI GI NO: 25405370 NR Description: hypothetical protein F14I3.2
  misc_feature (10)..(102): NCBI GI NO: 2982293 NR Description: ISP42-like protein [Picea mariana]
  misc_feature (1)..(102): NCBI GI NO: 34903264 NR Description: unnamed protein product
  misc_feature (1)..(100): NCBI GI NO: 40738660 NR Description: hypothetical protein AN6510.2
  misc_feature (1)..(98): NCBI GI NO: 23612250 NR Description: mitochondrial import receptor subunit tom40
  misc_feature (1)..(100): NCBI GI NO: 19112353 NR Description: MITOCHONDRIAL IMPORT RECEPTOR SUBUNIT TOM40
MVATAQIATTGMVALSYVQKVSEKVSLASDFMYNQMTKDVTASFGYDYMLRQCRLRGKLDTNGVISSLLEERLTPGVTFQLSAELDHWKKDYKFGFGMALGE

SEQ ID NO: 28368 - DNA, 1761 bp, Zea mays subsp. mays
  misc_feature (1)..(1761): Ceres Seq. ID no. 12382163
gcacgagaccattacctagaacatcctaatcaaaaaagaaggaacatcgaagaaaggaaggaggtgggcggcaatggaggatgcgatggcggcggacgggaagagcgtgctgcaggggcggtacgagctggggcgggtgctggggcacggcaacttcgggcgggtgcacgcggcgcgggacctgcgcacgggccgcagcgtcgcggtcaaggtggtggccaaggacaagctggagcgcgcgggcatggcggagcagatcaagcgggagatcgccgtcatgaagatggtgtcccaccccaacatcgtggagctgcacgaggtgatggccacccgctccaagatctacctcgcgctcgagctcgtccgcggcggggagctcttctcccgcatcgcgcgcgcggggcgggtccgggaggacgtggcgcgctgttacttccggcagctcgtcgccgcggtcgacttctgccacggccgcggggtgttccaccgagacctgaagctcgagaacctgctcctcgacgaggtaggcaacctcaaagtggcggactttgggctcagcgcgctcgccgggcacgcgcgctccgacgggctgctccataccgcctgtggcacgccgtcatacgtcgcccccgaggtgctcggcgggaagggctacgacggcgccaaggcggacctctggtcctgtggcgtcatcctctacgtgctcctcgttggcagcttgccattccacgaggacaacctcatggtcatgtaccggaagatgcagcgcggcgagttcctctgcccgccgtgggtctcagcggacgcccggaagctcatcggcgagctgctcgaccccgacccgagcacgcgcatcaccgtcgctcgcctcgtcgagacgccgtggtaccggaagccgttgcccgtcctgccgccgctcaacctcaaggagccaaccccggacgcgcgccgcgccacctctgacaaggaagagcccgaggtgctgaacgcgttccacctcatctctttctcggagggcttcgacctgtccccgctcttcgaccagggccgtggcggcggcgtagggaggtctagcgcgggcggcatccgtttcgtgacgcgcgaggccgccagcagcgtggtctcccgtctggagtcgctggtcaccggccgcggagccaacatgcgcgtgacaaagagcggctcgcggggcgttcgtttggaggccgtgtcgcgcgggcgctcgggggcgcggctggcagtggccgcggagatcttcagcgtggcgccgtcggtgctcctggtggacgtgaagaaggacggcggcgacacgatggagtaccggtcgttctgttgcgaggagctccggccggcgctcaaggacatcgtctgggcctccagccaggacacaccgggcgccgcttgatgtcgtcgctgtcgctcctgccaccattattgtccttgcccatcaattgctgttggtgtccgtgtagggggggtcgtgctcgtgcattattgtttggtgacgaagtgatgtttgtttgtcgtttgccactctcgtagttggtttctgctgtggtgcagcggctgctggcagttgcagttgggctgttgcccgcggggcgcgagcaaagcagaatcagcgggaactagcattcgtatcctgcatgcacgcccataccgtgtcagctctgaagtgggaagaactgtaacaagtagtagtacgaatgtaccagggtgatgtgctttcgagtcacttgtgtatatattcatttttttagc

SEQ ID NO: 28369 - protein, 443 aa, Zea mays subsp. mays
  peptide (1)..(443): Ceres Seq. ID no. 12382164
  misc_feature (17)..(272): Pfam Name: Pfam Description:  Protein kinase domain
  misc_feature (11)..(436): NCBI GI NO: 21954717 NR Description: SOS2-like protein kinase [Glycine max]
  misc_feature (7)..(436): NCBI GI NO: 15235768 NR Description:
  misc_feature (3)..(440): NCBI GI NO: 17224924 NR Description: CBL-interacting protein kinase [Brassica napus]
  misc_feature (13)..(433): NCBI GI NO: 4884974 NR Description: putative serine/threonine protein kinase
  misc_feature (5)..(440): NCBI GI NO: 33146431 NR Description: putative Serine/threonine Kinase
  misc_feature (12)..(433): NCBI GI NO: 15242509 NR Description: serine threonine protein kinase
  misc_feature (11)..(443): NCBI GI NO: 34903780 NR Description: unnamed protein product
  misc_feature (8)..(438): NCBI GI NO: 34907870 NR Description: putative serine/threonine protein kinase
  misc_feature (12)..(307): NCBI GI NO: 34909714 NR Description: OsPK4-like protein
  misc_feature (301)..(440): NCBI GI NO: 34909714 NR Description: OsPK4-like protein
MEDAMAADGKSVLQGRYELGRVLGHGNFGRVHAARDLRTGRSVAVKVVAKDKLERAGMAEQIKREIAVMKMVSHPNIVELHEVMATRSKIYLALELVRGGELFSRIARAGRVREDVARCYFRQLVAAVDFCHGRGVFHRDLKLENLLLDEVGNLKVADFGLSALAGHARSDGLLHTACGTPSYVAPEVLGGKGYDGAKADLWSCGVILYVLLVGSLPFHEDNLMVMYRKMQRGEFLCPPWVSADARKLIGELLDPDPSTRITVARLVETPWYRKPLPVLPPLNLKEPTPDARRATSDKEEPEVLNAFHLISFSEGFDLSPLFDQGRGGGVGRSSAGGIRFVTREAASSVVSRLESLVTGRGANMRVTKSGSRGVRLEAVSRGRSGARLAVAAEIFSVAPSVLLVDVKKDGGDTMEYRSFCCEELRPALKDIVWASSQDTPGAA

SEQ ID NO: 28370 - protein, 439 aa, Zea mays subsp. mays
  peptide (1)..(439): Ceres Seq. ID no. 12382165
  misc_feature (13)..(268): Pfam Name: Pfam Description:  Protein kinase domain
  misc_feature (7)..(432): NCBI GI NO: 21954717 NR Description: SOS2-like protein kinase [Glycine max]
  misc_feature (3)..(432): NCBI GI NO: 15235768 NR Description:
  misc_feature (1)..(436): NCBI GI NO: 17224924 NR Description: CBL-interacting protein kinase [Brassica napus]
  misc_feature (9)..(429): NCBI GI NO: 4884974 NR Description: putative serine/threonine protein kinase
  misc_feature (1)..(436): NCBI GI NO: 33146431 NR Description: putative Serine/threonine Kinase
  misc_feature (8)..(429): NCBI GI NO: 15242509 NR Description: serine threonine protein kinase
  misc_feature (7)..(439): NCBI GI NO: 34903780 NR Description: unnamed protein product
  misc_feature (4)..(434): NCBI GI NO: 34907870 NR Description: putative serine/threonine protein kinase
  misc_feature (8)..(303): NCBI GI NO: 34909714 NR Description: OsPK4-like protein
  misc_feature (297)..(436): NCBI GI NO: 34909714 NR Description: OsPK4-like protein
MAADGKSVLQGRYELGRVLGHGNFGRVHAARDLRTGRSVAVKVVAKDKLERAGMAEQIKREIAVMKMVSHPNIVELHEVMATRSKIYLALELVRGGELFSRIARAGRVREDVARCYFRQLVAAVDFCHGRGVFHRDLKLENLLLDEVGNLKVADFGLSALAGHARSDGLLHTACGTPSYVAPEVLGGKGYDGAKADLWSCGVILYVLLVGSLPFHEDNLMVMYRKMQRGEFLCPPWVSADARKLIGELLDPDPSTRITVARLVETPWYRKPLPVLPPLNLKEPTPDARRATSDKEEPEVLNAFHLISFSEGFDLSPLFDQGRGGGVGRSSAGGIRFVTREAASSVVSRLESLVTGRGANMRVTKSGSRGVRLEAVSRGRSGARLAVAAEIFSVAPSVLLVDVKKDGGDTMEYRSFCCEELRPALKDIVWASSQDTPGAA

SEQ ID NO: 28371 - protein, 386 aa, Zea mays subsp. mays
  peptide (1)..(386): Ceres Seq. ID no. 12382166
  misc_feature (1)..(215): Pfam Name: Pfam Description:  Protein kinase domain
  misc_feature (1)..(379): NCBI GI NO: 21954717 NR Description: SOS2-like protein kinase [Glycine max]
  misc_feature (1)..(379): NCBI GI NO: 15235768 NR Description:
  misc_feature (1)..(383): NCBI GI NO: 17224924 NR Description: CBL-interacting protein kinase [Brassica napus]
  misc_feature (1)..(376): NCBI GI NO: 4884974 NR Description: putative serine/threonine protein kinase
  misc_feature (1)..(383): NCBI GI NO: 33146431 NR Description: putative Serine/threonine Kinase
  misc_feature (1)..(376): NCBI GI NO: 15242509 NR Description: serine threonine protein kinase
  misc_feature (1)..(386): NCBI GI NO: 34903780 NR Description: unnamed protein product
  misc_feature (1)..(381): NCBI GI NO: 34907870 NR Description: putative serine/threonine protein kinase
  misc_feature (1)..(250): NCBI GI NO: 34909714 NR Description: OsPK4-like protein
  misc_feature (244)..(383): NCBI GI NO: 34909714 NR Description: OsPK4-like protein
MAEQIKREIAVMKMVSHPNIVELHEVMATRSKIYLALELVRGGELFSRIARAGRVREDVARCYFRQLVAAVDFCHGRGVFHRDLKLENLLLDEVGNLKVADFGLSALAGHARSDGLLHTACGTPSYVAPEVLGGKGYDGAKADLWSCGVILYVLLVGSLPFHEDNLMVMYRKMQRGEFLCPPWVSADARKLIGELLDPDPSTRITVARLVETPWYRKPLPVLPPLNLKEPTPDARRATSDKEEPEVLNAFHLISFSEGFDLSPLFDQGRGGGVGRSSAGGIRFVTREAASSVVSRLESLVTGRGANMRVTKSGSRGVRLEAVSRGRSGARLAVAAEIFSVAPSVLLVDVKKDGGDTMEYRSFCCEELRPALKDIVWASSQDTPGAA

SEQ ID NO: 28372 - DNA, 733 bp, Zea mays subsp. mays
  misc_feature (1)..(733): Ceres Seq. ID no. 12414009
gttccccagcagcctcttccccttcccgaccagagcaagcacgccaccgcttccgtcgtcgtcctcccgaccgtctcactcccgcccccacctccgcatccgatctccgaaacctaataatccaacggtcgcgcccgcgtcctctcggatggaggtggcccagccccaggcgagcaacgcccagggaggggcggagccggccatgaagctactgttcgtggagatgggcgtcggctacgatcagcacggccaagatatcaccgccgccgccgtgcgcgcctgcaaggacgccatcacctccaactccatccccgccttccggggcgggtccattccaggagtgaacacggaccagatgaagctgcagatcaagctcggagtgcctaggtcgacgcagcacttgctggatgctgagagagtcaaggccgtcttcccctatggcaagataatcagctttgaggtcgttgacggtggcatgatctgttcaagcggcgtgtgcctggaagcaatgggggataagaacgatgactgctacatagtcaacgctgcagtgtatgtcggctactgatgtactgtagtacctggaatggaacagtagagattggttatggttcctccgttatagaaaaaaaaaactgctacctccgtcctaaaataaaacagttgatattttttcttcatagaagccaaatattgtaaactttgactaaatattactccctccattttcttt

SEQ ID NO: 28373 - protein, 188 aa, Zea mays subsp. mays
  peptide (1)..(188): Ceres Seq. ID no. 12414010
  misc_feature (11)..(188): NCBI GI NO: 18396927 NR Description: expressed protein; protein id: At1g29040
  misc_feature (11)..(188): NCBI GI NO: 21954066 NR Description: unknown protein [Arabidopsis thaliana]
  misc_feature (5)..(145): NCBI GI NO: 34912624 NR Description: P0410E01.16
  misc_feature (11)..(188): NCBI GI NO: 30690579 NR Description: expressed protein [Arabidopsis thaliana]
  misc_feature (68)..(188): NCBI GI NO: 37520060 NR Description: hypothetical protein glr0491
  misc_feature (70)..(188): NCBI GI NO: 23098097 NR Description: hypothetical protein
  misc_feature (69)..(188): NCBI GI NO: 23098421 NR Description: hypothetical protein
  misc_feature (69)..(188): NCBI GI NO: 16802555 NR Description: lmo0512 [Listeria monocytogenes EGD-e]
  misc_feature (69)..(188): NCBI GI NO: 16799587 NR Description: lin0512 [Listeria innocua]
  misc_feature (67)..(186): NCBI GI NO: 23127863 NR Description: hypothetical protein [Nostoc punctiforme]
FPSSLFPFPTRASTPPLPSSSSRPSHSRPHLRIRSPKPNNPTVAPASSRMEVAQPQASNAQGGAEPAMKLLFVEMGVGYDQHGQDITAAAVRACKDAITSNSIPAFRGGSIPGVNTDQMKLQIKLGVPRSTQHLLDAERVKAVFPYGKIISFEVVDGGMICSSGVCLEAMGDKNDDCYIVNAAVYVGY

SEQ ID NO: 28374 - protein, 139 aa, Zea mays subsp. mays
  peptide (1)..(139): Ceres Seq. ID no. 12414011
  misc_feature (1)..(139): NCBI GI NO: 18396927 NR Description: expressed protein; protein id: At1g29040
  misc_feature (1)..(139): NCBI GI NO: 21954066 NR Description: unknown protein [Arabidopsis thaliana]
  misc_feature (1)..(96): NCBI GI NO: 34912624 NR Description: P0410E01.16
  misc_feature (1)..(139): NCBI GI NO: 30690579 NR Description: expressed protein [Arabidopsis thaliana]
  misc_feature (19)..(139): NCBI GI NO: 37520060 NR Description: hypothetical protein glr0491
  misc_feature (21)..(139): NCBI GI NO: 23098097 NR Description: hypothetical protein
  misc_feature (20)..(139): NCBI GI NO: 23098421 NR Description: hypothetical protein
  misc_feature (20)..(139): NCBI GI NO: 16802555 NR Description: lmo0512 [Listeria monocytogenes EGD-e]
  misc_feature (20)..(139): NCBI GI NO: 16799587 NR Description: lin0512 [Listeria innocua]
  misc_feature (18)..(137): NCBI GI NO: 23127863 NR Description: hypothetical protein [Nostoc punctiforme]
MEVAQPQASNAQGGAEPAMKLLFVEMGVGYDQHGQDITAAAVRACKDAITSNSIPAFRGGSIPGVNTDQMKLQIKLGVPRSTQHLLDAERVKAVFPYGKIISFEVVDGGMICSSGVCLEAMGDKNDDCYIVNAAVYVGY

SEQ ID NO: 28375 - protein, 121 aa, Zea mays subsp. mays
  peptide (1)..(121): Ceres Seq. ID no. 12414012
  misc_feature (1)..(121): NCBI GI NO: 18396927 NR Description: expressed protein; protein id: At1g29040
  misc_feature (1)..(121): NCBI GI NO: 21954066 NR Description: unknown protein [Arabidopsis thaliana]
  misc_feature (1)..(78): NCBI GI NO: 34912624 NR Description: P0410E01.16
  misc_feature (1)..(121): NCBI GI NO: 30690579 NR Description: expressed protein [Arabidopsis thaliana]
  misc_feature (1)..(121): NCBI GI NO: 37520060 NR Description: hypothetical protein glr0491
  misc_feature (3)..(121): NCBI GI NO: 23098097 NR Description: hypothetical protein
  misc_feature (2)..(121): NCBI GI NO: 23098421 NR Description: hypothetical protein
  misc_feature (2)..(121): NCBI GI NO: 16802555 NR Description: lmo0512 [Listeria monocytogenes EGD-e]
  misc_feature (2)..(121): NCBI GI NO: 16799587 NR Description: lin0512 [Listeria innocua]
  misc_feature (1)..(119): NCBI GI NO: 23127863 NR Description: hypothetical protein [Nostoc punctiforme]
MKLLFVEMGVGYDQHGQDITAAAVRACKDAITSNSIPAFRGGSIPGVNTDQMKLQIKLGVPRSTQHLLDAERVKAVFPYGKIISFEVVDGGMICSSGVCLEAMGDKNDDCYIVNAAVYVGY

SEQ ID NO: 28376 - DNA, 1220 bp, Zea mays subsp. mays
  misc_feature (1)..(1220): Ceres Seq. ID no. 12366799
aattcacgattgagaaaccctcacctcttcccttccttggttcctccccaccgccgccaccgccggaaaaaaaaaaaatgggtgccgatggggaagaagcgtcgcggatagtcgtgccaatggcggtggaggggacctcggagcagctggcgttcgtggaggagtcgaagctgcagaagcgcaaggagaacgcggactgggccgtcaggaaccgggagcgcagggcggtaaagcgccagcgcatccgcgacgagcacaaggtcaccgtaaggcggcctgaggacttcgttgccgcgttccggaacaaggaacgcgacttcctgcggatgaggacccgcctcaaggtccgcaagcagccgcccgccgaggcgctcggctccaagctcgtcttcgcaattcgcatccctggctgcgtggacttgcatccgaacatcaggaaggtcttgaggaagctacggctgacgacggtcctcaccggcgtattcctcagggccaccgagctgacgctgaagaggcttcttgtggtcgaaccctttgtcacctacgggtttccaaacttgaagaacgtgaaagagcttatttacaagaagggccgtgggtttttcgacaaggagcctttccctcttaccagtaacgatctaattgagaaggctcttggagatcacggcatcatatgcttggaagacgttgtgcacgagatcgccacggttggccgcacttccgagaagcatcgaggttcctcatgcccttcaggctcaagtgtccggagaggaggctgcagatgaagaggaaaccctacaaggatggcggcgactcgggcgaccgtggcgacaagatcaacgaactaatcgagaagctgaactagaagcgcagaccttgcctcctccggccgtcgttttgcgttggagctatggatctgttattaccttgtcggttttgtaatagcattagctgagtgtgccttcggctttgaaaccttacctgcacttgtgcgatcaggtcatgaaatagcaggcgcttctttggttatccacatgcctcttcggttggtgcgacaatatatcagctgtgttatgaatgatgtagtgtgctagtgtagtgcagacgcttataatgtatgcacacttacaaccgtgaacggacatatatgcaaacacttctatgatcttcgaaggagattgatgaaagtcactttgcttgatttagggcctgtttaattc

SEQ ID NO: 28377 - protein, 260 aa, Zea mays subsp. mays
  peptide (1)..(260): Ceres Seq. ID no. 12366800
  misc_feature (128)..(179): Pfam Name: Pfam Description:  Ribosomal protein L30p/L7e
  misc_feature (40)..(237): NCBI GI NO: 38636688 NR Description: putative 60S ribosomal protein L7 (RPL7A)
  misc_feature (43)..(237): NCBI GI NO: 15220825 NR Description: ribosomal protein L7, putative
  misc_feature (52)..(237): NCBI GI NO: 445613 NR Description: ribosomal protein L7
  misc_feature (50)..(237): NCBI GI NO: 38637548 NR Description: putative 60S ribosomal protein L7
  misc_feature (47)..(237): NCBI GI NO: 15226212 NR Description: putative ribosomal protein L7
  misc_feature (46)..(237): NCBI GI NO: 15231288 NR Description: ribosomal protein, putative; protein id:At3g13580
  misc_feature (40)..(237): NCBI GI NO: 30689623 NR Description: 60S ribosomal protein L7 (RPL7C)
  misc_feature (46)..(237): NCBI GI NO: 27311547 NR Description: Unknown protein [Arabidopsis thaliana]
  misc_feature (46)..(237): NCBI GI NO: 30689617 NR Description: 60S ribosomal protein L7 (RPL7C)
  misc_feature (52)..(237): NCBI GI NO: 38346542 NR Description: OSJNBa0035M09.3
FTIEKPSPLPFLGSSPPPPPPEKKKMGADGEEASRIVVPMAVEGTSEQLAFVEESKLQKRKENADWAVRNRERRAVKRQRIRDEHKVTVRRPEDFVAAFRNKERDFLRMRTRLKVRKQPPAEALGSKLVFAIRIPGCVDLHPNIRKVLRKLRLTTVLTGVFLRATELTLKRLLVVEPFVTYGFPNLKNVKELIYKKGRGFFDKEPFPLTSNDLIEKALGDHGIICLEDVVHEIATVGRTSEKHRGSSCPSGSSVRRGGCR

SEQ ID NO: 28378 - protein, 235 aa, Zea mays subsp. mays
  peptide (1)..(235): Ceres Seq. ID no. 12366801
  misc_feature (103)..(154): Pfam Name: Pfam Description:  Ribosomal protein L30p/L7e
  misc_feature (15)..(212): NCBI GI NO: 38636688 NR Description: putative 60S ribosomal protein L7 (RPL7A)
  misc_feature (18)..(212): NCBI GI NO: 15220825 NR Description: ribosomal protein L7, putative
  misc_feature (27)..(212): NCBI GI NO: 445613 NR Description: ribosomal protein L7
  misc_feature (25)..(212): NCBI GI NO: 38637548 NR Description: putative 60S ribosomal protein L7
  misc_feature (22)..(212): NCBI GI NO: 15226212 NR Description: putative ribosomal protein L7
  misc_feature (21)..(212): NCBI GI NO: 15231288 NR Description: ribosomal protein, putative; protein id:At3g13580
  misc_feature (15)..(212): NCBI GI NO: 30689623 NR Description: 60S ribosomal protein L7 (RPL7C)
  misc_feature (21)..(212): NCBI GI NO: 27311547 NR Description: Unknown protein [Arabidopsis thaliana]
  misc_feature (21)..(212): NCBI GI NO: 30689617 NR Description: 60S ribosomal protein L7 (RPL7C)
  misc_feature (27)..(212): NCBI GI NO: 38346542 NR Description: OSJNBa0035M09.3
MGADGEEASRIVVPMAVEGTSEQLAFVEESKLQKRKENADWAVRNRERRAVKRQRIRDEHKVTVRRPEDFVAAFRNKERDFLRMRTRLKVRKQPPAEALGSKLVFAIRIPGCVDLHPNIRKVLRKLRLTTVLTGVFLRATELTLKRLLVVEPFVTYGFPNLKNVKELIYKKGRGFFDKEPFPLTSNDLIEKALGDHGIICLEDVVHEIATVGRTSEKHRGSSCPSGSSVRRGGCR

SEQ ID NO: 28379 - protein, 221 aa, Zea mays subsp. mays
  peptide (1)..(221): Ceres Seq. ID no. 12366802
  misc_feature (89)..(140): Pfam Name: Pfam Description:  Ribosomal protein L30p/L7e
  misc_feature (1)..(198): NCBI GI NO: 38636688 NR Description: putative 60S ribosomal protein L7 (RPL7A)
  misc_feature (4)..(198): NCBI GI NO: 15220825 NR Description: ribosomal protein L7, putative
  misc_feature (13)..(198): NCBI GI NO: 445613 NR Description: ribosomal protein L7
  misc_feature (11)..(198): NCBI GI NO: 38637548 NR Description: putative 60S ribosomal protein L7
  misc_feature (8)..(198): NCBI GI NO: 15226212 NR Description: putative ribosomal protein L7
  misc_feature (7)..(198): NCBI GI NO: 15231288 NR Description: ribosomal protein, putative; protein id:At3g13580
  misc_feature (1)..(198): NCBI GI NO: 30689623 NR Description: 60S ribosomal protein L7 (RPL7C)
  misc_feature (7)..(198): NCBI GI NO: 27311547 NR Description: Unknown protein [Arabidopsis thaliana]
  misc_feature (7)..(198): NCBI GI NO: 30689617 NR Description: 60S ribosomal protein L7 (RPL7C)
  misc_feature (13)..(198): NCBI GI NO: 38346542 NR Description: OSJNBa0035M09.3
MAVEGTSEQLAFVEESKLQKRKENADWAVRNRERRAVKRQRIRDEHKVTVRRPEDFVAAFRNKERDFLRMRTRLKVRKQPPAEALGSKLVFAIRIPGCVDLHPNIRKVLRKLRLTTVLTGVFLRATELTLKRLLVVEPFVTYGFPNLKNVKELIYKKGRGFFDKEPFPLTSNDLIEKALGDHGIICLEDVVHEIATVGRTSEKHRGSSCPSGSSVRRGGCR

SEQ ID NO: 28380 - DNA, 1285 bp, Zea mays subsp. mays
  misc_feature (1)..(1285): Ceres Seq. ID no. 12353872
tcctccccgctccagcgcccctgcagttctcgctccactgacagctcgccgaggggccgcgccgcgctcgagacccgtcgatggcgaggcggagcctggcggtcgacgcaaccgcaggcgccgcatcccgggttcggttcgcgcccacctccaataacctgctcgtctcctcatgggattcggggctgcggttgtacgatgccgacgagggcacgctcagggtcaacgtggagtcagaggcggcattcctcgactgctgcttcgaggatgagtctgcagcgtttgcctgcggctctgatggatctgtgagaaggtacgacttccactcaggttcgcaggatacggtggggctccatgaagatgcactagcctgcattgagttctcttcactgaccggtcagattatgacaggcagccttgacaagaagctaaagctttgggattcaaaaacaagaaatgtaagcccgagcggcaccataaccttaaattcagatgtggcctcaatttctatatgcggcatttacatattagctgcagttgagagaaatgtttatctttatgacatgaggaatctaacaagaccagttgatgaaaaagactgtcctctggattatcaaattcgatgccttcatacttctctagagtggaatgcttatgttgctggctctgtggatggagttgttgcattgaagtatcttgatcgtggaacagatagagatttgggatatgcatttcgttgtcatccaaattccagaaacggaaaatggaatctggtccctgtaaattgcatctcagttcatccctgcaacagaactttcgttacgggagatgataaaggatgcactattgtttgggatgctcaattgaaaaagaagctgattgagcttccaatgtatttgggcagtgtggcgtcagtggcatacaaccataatggccaacttctggcggttgcctcaaactattttttagaagtataaagaggagcaacaccaccaggtattcattgaaactgtggagaacttcaaaggcaagtcccgtgtgggatagagccttctaacaaaacatgttctgttcatctgttgtattgtattttgtctaccatacatgttaaaggtcaccaagatgtgacagcatgttgtattatgttgtatgactaagcattttttttaggaaacgacataatatggctaagcaatacttgtatatattggttacatctagtctgagacagctgtggtgtgttgtaactcttttgagcttttgcaaccagtattgctgttctggt

SEQ ID NO: 28381 - protein, 298 aa, Zea mays subsp. mays
  peptide (1)..(298): Ceres Seq. ID no. 12353873
  misc_feature (14)..(294): NCBI GI NO: 18409261 NR Description: mitotic checkpoint protein, putative
  misc_feature (14)..(294): NCBI GI NO: 12597795 NR Description: mitotic checkpoint protein, putative
  misc_feature (14)..(294): NCBI GI NO: 21593642 NR Description: mitotic checkpoint protein, putative
  misc_feature (16)..(297): NCBI GI NO: 15222841 NR Description: mitotic checkpoint protein, putative
  misc_feature (1)..(297): NCBI GI NO: 18402300 NR Description: mitotic checkpoint protein, putative
  misc_feature (16)..(297): NCBI GI NO: 28564814 NR Description: putative mitotic checkpoint protein
  misc_feature (14)..(298): NCBI GI NO: 37362190 NR Description: BUB3 budding uninhibited by benzimidazoles 3-like
  misc_feature (16)..(298): NCBI GI NO: 4757880 NR Description: BUB3 budding uninhibited by benzimidazoles 3 homolog
  misc_feature (16)..(298): NCBI GI NO: 3986296 NR Description: mitotic checkpoint [Xenopus laevis]
  misc_feature (16)..(298): NCBI GI NO: 13122448 NR Description: WD repeat protein Bub3 [Xenopus laevis]
MARRSLAVDATAGAASRVRFAPTSNNLLVSSWDSGLRLYDADEGTLRVNVESEAAFLDCCFEDESAAFACGSDGSVRRYDFHSGSQDTVGLHEDALACIEFSSLTGQIMTGSLDKKLKLWDSKTRNVSPSGTITLNSDVASISICGIYILAAVERNVYLYDMRNLTRPVDEKDCPLDYQIRCLHTSLEWNAYVAGSVDGVVALKYLDRGTDRDLGYAFRCHPNSRNGKWNLVPVNCISVHPCNRTFVTGDDKGCTIVWDAQLKKKLIELPMYLGSVASVAYNHNGQLLAVASNYFLEV

SEQ ID NO: 28382 - protein, 190 aa, Zea mays subsp. mays
  peptide (1)..(190): Ceres Seq. ID no. 12353874
  misc_feature (1)..(186): NCBI GI NO: 18409261 NR Description: mitotic checkpoint protein, putative
  misc_feature (1)..(186): NCBI GI NO: 12597795 NR Description: mitotic checkpoint protein, putative
  misc_feature (1)..(186): NCBI GI NO: 21593642 NR Description: mitotic checkpoint protein, putative
  misc_feature (1)..(189): NCBI GI NO: 15222841 NR Description: mitotic checkpoint protein, putative
  misc_feature (1)..(189): NCBI GI NO: 18402300 NR Description: mitotic checkpoint protein, putative
  misc_feature (1)..(189): NCBI GI NO: 28564814 NR Description: putative mitotic checkpoint protein
  misc_feature (1)..(190): NCBI GI NO: 37362190 NR Description: BUB3 budding uninhibited by benzimidazoles 3-like
  misc_feature (1)..(190): NCBI GI NO: 4757880 NR Description: BUB3 budding uninhibited by benzimidazoles 3 homolog
  misc_feature (1)..(190): NCBI GI NO: 3986296 NR Description: mitotic checkpoint [Xenopus laevis]
  misc_feature (1)..(190): NCBI GI NO: 13122448 NR Description: WD repeat protein Bub3 [Xenopus laevis]
MTGSLDKKLKLWDSKTRNVSPSGTITLNSDVASISICGIYILAAVERNVYLYDMRNLTRPVDEKDCPLDYQIRCLHTSLEWNAYVAGSVDGVVALKYLDRGTDRDLGYAFRCHPNSRNGKWNLVPVNCISVHPCNRTFVTGDDKGCTIVWDAQLKKKLIELPMYLGSVASVAYNHNGQLLAVASNYFLEV

SEQ ID NO: 28383 - DNA, 1274 bp, Zea mays subsp. mays
  misc_feature (1)..(1274): Ceres Seq. ID no. 12405506
gtccgcctcgctgtgcctgtgttgtacttgtactactgctactgctaggtagccaactcatttcctcccccaacccaaatgggcgactccaccgccaccaacccctcctcggcgaccgcagccatggatcccgactccgaggtcgtcttcgacttccagccctacctctgccagtacaagagcggccgcatccaccggcccggcggcgcccccaccgtccccgccggcacggacccggccaccggcgtcgtctccaaggacatccgctccggccccgcctccgcgcgcgtctacctccctcccggcgccaccggcaagatcccggtgatcgtctacttccacggcggcggcttcgtggtcggctcgccggcgcggccgggcacgcacagctacctgaacgacctcgtcgcccggtcgggcgccatcggcgtgtccgtctactaccgcctcgcgccggagcacaagctgcccgccgcgtacgacgacgcgtgggcggcgctgcggtgggcggtgacgctcggcggcgaggacccgtggctgctggagcacgccgacctgtcccgcgtgttcctggcgggctgcagcgccggcgccaacatcgcgcacgacacggccgtgcgagcctccgcggccggcgcgctccccgacggcgtggccatccgcgggctcgccctggtgcacccgtacttcactggcagggaggccgtgggcggcgagacggcggcgttcggccccgagatccggccgtccatggaccggacttggcggttcgtggtgtcggacacggtggggctggacgacccgcgcgtgaacccgttcgtggacgacgcggcgcgcaaggcctccgccgggatcccgtgccagcgcgtgctggtgtgtgtggccgagaacgacttcctgctcaaggagcgcgcgctgtggtaccaccgggagatcaaggccagtggctacgccggcgaggtcgagctgttcgagtctaagggcgtcggccacgcgttccacttcgacatgctggactcggagcagggcgtcgcactccaggagcggatcgtggctttcataaataaatgaaaaccgagacgataaataagagttttcttttttttgtccactatcgattcacggagtaaatcgattgtttggtttggtccattttatccgctgtcggtccacggagtaattcgttgtctcgttttttgttagaacaatttgtatcgattcacagagctatcagtgcggtgattgatcaccagcggtatgtaactccattcctg

SEQ ID NO: 28384 - protein, 330 aa, Zea mays subsp. mays
  peptide (1)..(330): Ceres Seq. ID no. 12405507
  misc_feature (73)..(126): Pfam Name: Pfam Description:  Carboxylesterase
  misc_feature (19)..(329): NCBI GI NO: 38344841 NR Description: OSJNBa0064H22.22
  misc_feature (21)..(330): NCBI GI NO: 18401743 NR Description: expressed protein; protein id: At1g47480
  misc_feature (21)..(330): NCBI GI NO: 21536771 NR Description: unknown [Arabidopsis thaliana]
  misc_feature (21)..(330): NCBI GI NO: 34393904 NR Description: putative cell death associated protein
  misc_feature (19)..(328): NCBI GI NO: 18086341 NR Description: AT3g48690/T8P19_200 [Arabidopsis thaliana]
  misc_feature (19)..(328): NCBI GI NO: 15228425 NR Description: putative protein; protein id: At3g48690
  misc_feature (19)..(328): NCBI GI NO: 15228426 NR Description: putative protein; protein id: At3g48700.1
  misc_feature (19)..(330): NCBI GI NO: 15221975 NR Description: hypothetical protein; protein id: At1g19190.1
  misc_feature (19)..(330): NCBI GI NO: 15227669 NR Description: putative esterase; protein id: At2g03550.1
  misc_feature (22)..(330): NCBI GI NO: 28393060 NR Description: putative esterase [Arabidopsis thaliana]
MGDSTATNPSSATAAMDPDSEVVFDFQPYLCQYKSGRIHRPGGAPTVPAGTDPATGVVSKDIRSGPASARVYLPPGATGKIPVIVYFHGGGFVVGSPARPGTHSYLNDLVARSGAIGVSVYYRLAPEHKLPAAYDDAWAALRWAVTLGGEDPWLLEHADLSRVFLAGCSAGANIAHDTAVRASAAGALPDGVAIRGLALVHPYFTGREAVGGETAAFGPEIRPSMDRTWRFVVSDTVGLDDPRVNPFVDDAARKASAGIPCQRVLVCVAENDFLLKERALWYHREIKASGYAGEVELFESKGVGHAFHFDMLDSEQGVALQERIVAFINK

SEQ ID NO: 28385 - protein, 325 aa, Zea mays subsp. mays
  peptide (1)..(325): Ceres Seq. ID no. 12405508
  misc_feature (117)..(223): Pfam Name: Pfam Description:  Cupin
  misc_feature (25)..(325): NCBI GI NO: 23018055 NR Description: hypothetical protein [Thermobifida fusca]
PPRCACVVLVLLLLLGSQLISSPNPNGRLHRHQPLLGDRSHGSRLRGRLRLPALPLPVQERPHPPARRRPHRPRRHGPGHRRRLQGHPLRPRLRARLPPSRRHRQDPGDRLLPRRRLRGRLAGAAGHAQLPERPRRPVGRHRRVRLLPPRAGAQAARRVRRRVGGAAVGGDARRRGPVAAGARRPVPRVPGGLQRRRQHRARHGRASLRGRRAPRRRGHPRARPGAPVLHWQGGRGRRDGGVRPRDPAVHGPDLAVRGVGHGGAGRPAREPVRGRRGAQGLRRDPVPARAGVCGRERLPAQGARAVVPPGDQGQWLRRRGRAVRV

SEQ ID NO: 28386 - protein, 315 aa, Zea mays subsp. mays
  peptide (1)..(315): Ceres Seq. ID no. 12405509
  misc_feature (58)..(111): Pfam Name: Pfam Description:  Carboxylesterase
  misc_feature (4)..(314): NCBI GI NO: 38344841 NR Description: OSJNBa0064H22.22
  misc_feature (6)..(315): NCBI GI NO: 18401743 NR Description: expressed protein; protein id: At1g47480
  misc_feature (6)..(315): NCBI GI NO: 21536771 NR Description: unknown [Arabidopsis thaliana]
  misc_feature (6)..(315): NCBI GI NO: 34393904 NR Description: putative cell death associated protein
  misc_feature (4)..(313): NCBI GI NO: 18086341 NR Description: AT3g48690/T8P19_200 [Arabidopsis thaliana]
  misc_feature (4)..(313): NCBI GI NO: 15228425 NR Description: putative protein; protein id: At3g48690
  misc_feature (4)..(313): NCBI GI NO: 15228426 NR Description: putative protein; protein id: At3g48700.1
  misc_feature (4)..(315): NCBI GI NO: 15221975 NR Description: hypothetical protein; protein id: At1g19190.1
  misc_feature (4)..(315): NCBI GI NO: 15227669 NR Description: putative esterase; protein id: At2g03550.1
  misc_feature (7)..(315): NCBI GI NO: 28393060 NR Description: putative esterase [Arabidopsis thaliana]
MDPDSEVVFDFQPYLCQYKSGRIHRPGGAPTVPAGTDPATGVVSKDIRSGPASARVYLPPGATGKIPVIVYFHGGGFVVGSPARPGTHSYLNDLVARSGAIGVSVYYRLAPEHKLPAAYDDAWAALRWAVTLGGEDPWLLEHADLSRVFLAGCSAGANIAHDTAVRASAAGALPDGVAIRGLALVHPYFTGREAVGGETAAFGPEIRPSMDRTWRFVVSDTVGLDDPRVNPFVDDAARKASAGIPCQRVLVCVAENDFLLKERALWYHREIKASGYAGEVELFESKGVGHAFHFDMLDSEQGVALQERIVAFINK

SEQ ID NO: 28387 - DNA, 1280 bp, Zea mays subsp. mays
  misc_feature (1)..(1280): Ceres Seq. ID no. 12405502
cattccatccgagattacttaacaagaacattcttgctctacccacatcacataattgacgctctgagccctgcttttgtttaacaccgatagatccatccatcagcagcatggcattcaggtcttgtctagtacggctgctgctccctatggcagcactgcttctgctcgctgcaagctcgcccgccgcggctcagctggtggccggctactacagcaagacatgcccggacgccgaggccatcgtccgcaacgagacggagaagatcatcgccgccgcgcccagcctcgccggcccacttctcaggctccatttccacgactgcttcgtcaggggttgtgatgcctcggtcctgctcgacgaccccaacgggggtaacaaggccgagaaggacgccaagccgaacaggagcctgcggggcttcggctccgtggagagagtgaaggccaagctggaagccgcatgccccagcacggtttcctgcgccgacgtcctggccctgatggcccgcgacgccgtggtgctcgccaagggcccatcctggccagtggccctggggaggcgagacggcagggtgtcgagcgccacggaagcggccgacagcctgcctcccgccttcggcgacgtcccgctgctcgccgagatcttcgccgccaacggcctcgacctcaaggacctggcccgtgctctctggcgcgcacaccctcggcacggcgcactgcccgtcgtacgccgggcggctctacaacttcagcaccgcctacggcggcgcggacccgtccctcgacagcgagtacgccgaccggctgaggacgcgctgccggagcgccgacgacacggccacgctctccgagatggaccccggcagctacaagaccttcgacacgagctactaccgccacgtcgccaagcggaggggcctcttccagtccgacgccgcgctgctcgccgacgccaccaccagggagtacgtcctgcgcatggccaccggcaggttcgacggcgtgttcttccaggacttcggcgagtccatgatcaagatgggcaacgctggcgtgctcatcggtgctgctcagggggagatcaggaagaaatgctacatcgtcaactaactagctagttattatatatacaagctagctatactacgaaagcttttaatttgtttgtttgccgcaacggaattgtagcttgctgtattaattaatcaatcagttctctacatatgttatttgcatgcttatgtatagcctattattaatggacgatagactataat

SEQ ID NO: 28388 - protein, 336 aa, Zea mays subsp. mays
  peptide (1)..(336): Ceres Seq. ID no. 12405503
  misc_feature (46)..(190): Pfam Name: Pfam Description:  Peroxidase
  misc_feature (14)..(190): NCBI GI NO: 585661 NR Description: Peroxidase 1 precursor
  misc_feature (1)..(198): NCBI GI NO: 34915484 NR Description: putative peroxidase
  misc_feature (9)..(190): NCBI GI NO: 15232058 NR Description: peroxidase, putative; protein id: At3g01190
  misc_feature (5)..(198): NCBI GI NO: 15220463 NR Description: peroxidase, putative; protein id: At1g05260
  misc_feature (5)..(198): NCBI GI NO: 21536908 NR Description: putative peroxidase [Arabidopsis thaliana]
  misc_feature (19)..(190): NCBI GI NO: 15242237 NR Description: peroxidase, putative; protein id: At5g15180
  misc_feature (8)..(198): NCBI GI NO: 1402920 NR Description: peroxidase [Arabidopsis thaliana]
  misc_feature (8)..(198): NCBI GI NO: 15233153 NR Description: peroxidase, putative; protein id: At3g21770
  misc_feature (8)..(198): NCBI GI NO: 1546704 NR Description: peroxidase ATP7a [Arabidopsis thaliana]
  misc_feature (14)..(198): NCBI GI NO: 678547 NR Description: peroxidase
MAFRSCLVRLLLPMAALLLLAASSPAAAQLVAGYYSKTCPDAEAIVRNETEKIIAAAPSLAGPLLRLHFHDCFVRGCDASVLLDDPNGGNKAEKDAKPNRSLRGFGSVERVKAKLEAACPSTVSCADVLALMARDAVVLAKGPSWPVALGRRDGRVSSATEAADSLPPAFGDVPLLAEIFAANGLDLKDLARALWRAHPRHGALPVVRRAALQLQHRLRRRGPVPRQRVRRPAEDALPERRRHGHALRDGPRQLQDLRHELLPPRRQAEGPLPVRRRAARRRHHQGVRPAHGHRQVRRRVLPGLRRVHDQDGQRWRAHRCCSGGDQEEMLHRQLTS

SEQ ID NO: 28389 - protein, 323 aa, Zea mays subsp. mays
  peptide (1)..(323): Ceres Seq. ID no. 12405504
  misc_feature (33)..(177): Pfam Name: Pfam Description:  Peroxidase
  misc_feature (1)..(177): NCBI GI NO: 585661 NR Description: Peroxidase 1 precursor
  misc_feature (1)..(185): NCBI GI NO: 34915484 NR Description: putative peroxidase
  misc_feature (1)..(177): NCBI GI NO: 15232058 NR Description: peroxidase, putative; protein id: At3g01190
  misc_feature (1)..(185): NCBI GI NO: 15220463 NR Description: peroxidase, putative; protein id: At1g05260
  misc_feature (1)..(185): NCBI GI NO: 21536908 NR Description: putative peroxidase [Arabidopsis thaliana]
  misc_feature (6)..(177): NCBI GI NO: 15242237 NR Description: peroxidase, putative; protein id: At5g15180
  misc_feature (1)..(185): NCBI GI NO: 1402920 NR Description: peroxidase [Arabidopsis thaliana]
  misc_feature (1)..(185): NCBI GI NO: 15233153 NR Description: peroxidase, putative; protein id: At3g21770
  misc_feature (1)..(185): NCBI GI NO: 1546704 NR Description: peroxidase ATP7a [Arabidopsis thaliana]
  misc_feature (1)..(185): NCBI GI NO: 678547 NR Description: peroxidase
MAALLLLAASSPAAAQLVAGYYSKTCPDAEAIVRNETEKIIAAAPSLAGPLLRLHFHDCFVRGCDASVLLDDPNGGNKAEKDAKPNRSLRGFGSVERVKAKLEAACPSTVSCADVLALMARDAVVLAKGPSWPVALGRRDGRVSSATEAADSLPPAFGDVPLLAEIFAANGLDLKDLARALWRAHPRHGALPVVRRAALQLQHRLRRRGPVPRQRVRRPAEDALPERRRHGHALRDGPRQLQDLRHELLPPRRQAEGPLPVRRRAARRRHHQGVRPAHGHRQVRRRVLPGLRRVHDQDGQRWRAHRCCSGGDQEEMLHRQLTS

SEQ ID NO: 28390 - protein, 205 aa, Zea mays subsp. mays
  peptide (1)..(205): Ceres Seq. ID no. 12405505
  misc_feature (1)..(59): Pfam Name: Pfam Description:  Peroxidase
  misc_feature (1)..(59): NCBI GI NO: 585661 NR Description: Peroxidase 1 precursor
  misc_feature (1)..(67): NCBI GI NO: 34915484 NR Description: putative peroxidase
  misc_feature (1)..(59): NCBI GI NO: 15232058 NR Description: peroxidase, putative; protein id: At3g01190
  misc_feature (1)..(67): NCBI GI NO: 15220463 NR Description: peroxidase, putative; protein id: At1g05260
  misc_feature (1)..(67): NCBI GI NO: 21536908 NR Description: putative peroxidase [Arabidopsis thaliana]
  misc_feature (1)..(59): NCBI GI NO: 15242237 NR Description: peroxidase, putative; protein id: At5g15180
  misc_feature (1)..(67): NCBI GI NO: 1402920 NR Description: peroxidase [Arabidopsis thaliana]
  misc_feature (1)..(67): NCBI GI NO: 1546704 NR Description: peroxidase ATP7a [Arabidopsis thaliana]
  misc_feature (1)..(67): NCBI GI NO: 15233153 NR Description: peroxidase, putative; protein id: At3g21770
  misc_feature (1)..(67): NCBI GI NO: 678547 NR Description: peroxidase
MARDAVVLAKGPSWPVALGRRDGRVSSATEAADSLPPAFGDVPLLAEIFAANGLDLKDLARALWRAHPRHGALPVVRRAALQLQHRLRRRGPVPRQRVRRPAEDALPERRRHGHALRDGPRQLQDLRHELLPPRRQAEGPLPVRRRAARRRHHQGVRPAHGHRQVRRRVLPGLRRVHDQDGQRWRAHRCCSGGDQEEMLHRQLTS

SEQ ID NO: 28391 - DNA, 1472 bp, Zea mays subsp. mays
  misc_feature (1)..(1472): Ceres Seq. ID no. 12409035
actctcctctcctctccgcctcaccttgccctgcccgcacacaccacctgtccccgcacggccgcaccgctccgctcccgaggcttagggctccggccgcgctcccttcccttcccggcattcccgatctctcgccgccgcccgcctggccttgatctcgatcgccctcccctctccgctctcgctccggcaggccggcccgggtttgtctcgccgctattgggcctcggcacgctgcgatggtgtcgggcgtgtgcgtggggacggaggggcaggtggaccctgaggcggtggcgccggctgtcgcggaggaggcggtggtgccggcgcccgcgagggaggtcgtggtggggtacgcgctcacgagtaagaaggccaagagcttcctccaacccaagctccggggggctcgccaggaaaaagggaatcttgtttgtcgctattgatcagaaacgcccattgtctgatcaaggtccatttgacattgttcttcataagttgactggaagggggtggcagcaattgctggaggaatatagggaggcacacccagaagttactgttcttgatccacctggcgcaatagcaaacttgcttgatcgccagtctatgcttcaagaagtatctgaattggacctcacagattgtcatggtaaagtacgtgtgcctaagcagctattcgttaatactgatccctcatcaataccagctgcagttaggagggcaggtctctctctcccattggtggcaaaacccttggtggcgaagtcccatgagctatcccttgcttatgatccaacttcactgaccaaacttgagccccccttggttcttcaggaatttgttaaccatggtggcgtcatgtttaaggtgtacattgttggggatgcaataagggttgtacgtcgattttcactcccaaatgttgatgaaggcgatctatcgaacaatgctggggtatttcggtttccaagggtctcttgtgctgcagccagtgcagatgatgcagatcttgaccctcgtgttgctgaacttcctccgagaccattgcttgagatcttggcacgagagctgcgccgacgactgggtcttagactattcaacatcgatatgattagggagcatgggacgcgagatcggttttatgtcatagacatgaactactttcctgggtacggcaaaatgcctggatacgagcacgtgttcaccgacttcctgctgagccttgccaagaaagagtacaagagacgacaaagctatagctcgctaagctcaggcgaatggtgataagcgaggagactactcggcggggcatgtatatgtctatcatccacgatgcgtgcgtacagatgtacttgtgcatgacgagagataatgggtcgtagaagcggagggctgttgtcaggctataactaactgttgctttacatgtgctaactgttgatgcttcagaataaattttgtttgggtgg

SEQ ID NO: 28392 - protein, 428 aa, Zea mays subsp. mays
  peptide (1)..(428): Ceres Seq. ID no. 12409036
  misc_feature (132)..(408): Pfam Name: Pfam Description:  Inositol 1, 3, 4-trisphosphate 5/6-kinase
  misc_feature (132)..(417): NCBI GI NO: 18413088 NR Description: inositol 1
  misc_feature (124)..(421): NCBI GI NO: 37530372 NR Description: putative inositol 1,3,4-trisphosphate 5/6-kinase
  misc_feature (139)..(416): NCBI GI NO: 27311236 NR Description: Putative inositol 1,3,4-trisphosphate 5/6-kinase
  misc_feature (132)..(391): NCBI GI NO: 7487925 NR Description: inositol 1
  misc_feature (169)..(417): NCBI GI NO: 30680654 NR Description: inositol 1
  misc_feature (249)..(418): NCBI GI NO: 30689810 NR Description: expressed protein [Arabidopsis thaliana]
  misc_feature (124)..(248): NCBI GI NO: 30689810 NR Description: expressed protein [Arabidopsis thaliana]
  misc_feature (249)..(391): NCBI GI NO: 7487088 NR Description: hypothetical protein T16L1
  misc_feature (124)..(248): NCBI GI NO: 7487088 NR Description: hypothetical protein T16L1
  misc_feature (124)..(413): NCBI GI NO: 37537118 NR Description: putative inositol 1,3,4-trisphosphate 5/6-kinase
TLLSSPPHLALPAHTTCPRTAAPLRSRGLGLRPRSLPFPAFPISRRRPPGLDLDRPPLSALAPAGRPGFVSPLLGLGTLRWCRACAWGRRGRWTLRRWRRLSRRRRWCRRPRGRSWWGTRSRVRRPRASSNPSSGGLARKKGILFVAIDQKRPLSDQGPFDIVLHKLTGRGWQQLLEEYREAHPEVTVLDPPGAIANLLDRQSMLQEVSELDLTDCHGKVRVPKQLFVNTDPSSIPAAVRRAGLSLPLVAKPLVAKSHELSLAYDPTSLTKLEPPLVLQEFVNHGGVMFKVYIVGDAIRVVRRFSLPNVDEGDLSNNAGVFRFPRVSCAAASADDADLDPRVAELPPRPLLEILARELRRRLGLRLFNIDMIREHGTRDRFYVIDMNYFPGYGKMPGYEHVFTDFLLSLAKKEYKRRQSYSSLSSGEW

SEQ ID NO: 28393 - protein, 225 aa, Zea mays subsp. mays
  peptide (1)..(225): Ceres Seq. ID no. 12409037
  misc_feature (1)..(205): Pfam Name: Pfam Description:  Inositol 1, 3, 4-trisphosphate 5/6-kinase
  misc_feature (1)..(214): NCBI GI NO: 18413088 NR Description: inositol 1
  misc_feature (1)..(218): NCBI GI NO: 37530372 NR Description: putative inositol 1,3,4-trisphosphate 5/6-kinase
  misc_feature (1)..(213): NCBI GI NO: 27311236 NR Description: Putative inositol 1,3,4-trisphosphate 5/6-kinase
  misc_feature (1)..(188): NCBI GI NO: 7487925 NR Description: inositol 1
  misc_feature (1)..(214): NCBI GI NO: 30680654 NR Description: inositol 1
  misc_feature (46)..(215): NCBI GI NO: 30689810 NR Description: expressed protein [Arabidopsis thaliana]
  misc_feature (1)..(45): NCBI GI NO: 30689810 NR Description: expressed protein [Arabidopsis thaliana]
  misc_feature (46)..(188): NCBI GI NO: 7487088 NR Description: hypothetical protein T16L1
  misc_feature (1)..(45): NCBI GI NO: 7487088 NR Description: hypothetical protein T16L1
  misc_feature (1)..(210): NCBI GI NO: 37537118 NR Description: putative inositol 1,3,4-trisphosphate 5/6-kinase
MLQEVSELDLTDCHGKVRVPKQLFVNTDPSSIPAAVRRAGLSLPLVAKPLVAKSHELSLAYDPTSLTKLEPPLVLQEFVNHGGVMFKVYIVGDAIRVVRRFSLPNVDEGDLSNNAGVFRFPRVSCAAASADDADLDPRVAELPPRPLLEILARELRRRLGLRLFNIDMIREHGTRDRFYVIDMNYFPGYGKMPGYEHVFTDFLLSLAKKEYKRRQSYSSLSSGEW

SEQ ID NO: 28394 - DNA, 1041 bp, Zea mays subsp. mays
  misc_feature (1)..(1041): Ceres Seq. ID no. 12412692
gaaaatacatcgccatttccccaatttaccgctgacaccctccacaaaccgcgaatttcctccccggctcctctccctcctccccagtcaatccccacacagtctcggccgggccctcgcgaggccgccgtggaaggacccccagcgatgggctccggcgaggaggacacaggaggcggaggaggggcggtgcggggcgcggtgctgaaggcgctcgtggttgtcggcggcgtcctgctgctccgccgcctgcgccgctccactacccgatgggaccacgcgcgagccgtcgccgacgcgctctccggagaaaagttctcgagggagcaggcgaggaaggatcctgacaacttcttcaatttgagaatgctcacatgtcctgcaaccgagatggtggatggttcaagggtgctttactttgagcaggcattttggagatctccagaaaagccttttagacaaagattctacatggtaaagccctgtccgaaggagatgaaatgcgatgttgagttgagttcatatgcaattagggatgctgaagagtacaagaatttctgtgaccgtcaaaaggatcagaggccacaggcagaagaagtaattgcagatatcgcagagcatctgaccaccatacacttgtcacgatgcggacgaggaaagcgttgcttatacgaaggatctaccccacctgaaggttttcccaacaactggagcggcgcgtcgtactgtacgtcggatctgtccatccacaaaaacggcgaagtacatatctgggacaaaggttttgacgacgaagggaaccaggtttgggggaccaaggctggcccctacgagttcaagcctgctcccaaatccaaatatgacgacatgttctcgccgttaaatttctcggctcctttgtcgctagagaagaagctggataaagcatatgtaattgatgaccagtagggcctgccctaaatttttgttcataggaatggaataagtgaatagaatgtatatgtatatactgtactgagttataatgcattctttgttttg

SEQ ID NO: 28395 - protein, 315 aa, Zea mays subsp. mays
  peptide (1)..(315): Ceres Seq. ID no. 12412693
  misc_feature (51)..(314): NCBI GI NO: 15241343 NR Description: putative protein; protein id: At5g51020
  misc_feature (51)..(314): NCBI GI NO: 21554618 NR Description: unknown [Arabidopsis thaliana]
  misc_feature (97)..(280): NCBI GI NO: 37520007 NR Description: hypothetical protein glr0438
ENTSPFPQFTADTLHKPRISSPAPLPPPQSIPTQSRPGPREAAVEGPPAMGSGEEDTGGGGGAVRGAVLKALVVVGGVLLLRRLRRSTTRWDHARAVADALSGEKFSREQARKDPDNFFNLRMLTCPATEMVDGSRVLYFEQAFWRSPEKPFRQRFYMVKPCPKEMKCDVELSSYAIRDAEEYKNFCDRQKDQRPQAEEVIADIAEHLTTIHLSRCGRGKRCLYEGSTPPEGFPNNWSGASYCTSDLSIHKNGEVHIWDKGFDDEGNQVWGTKAGPYEFKPAPKSKYDDMFSPLNFSAPLSLEKKLDKAYVIDDQ

SEQ ID NO: 28396 - protein, 266 aa, Zea mays subsp. mays
  peptide (1)..(266): Ceres Seq. ID no. 12412694
  misc_feature (2)..(265): NCBI GI NO: 15241343 NR Description: putative protein; protein id: At5g51020
  misc_feature (2)..(265): NCBI GI NO: 21554618 NR Description: unknown [Arabidopsis thaliana]
  misc_feature (48)..(231): NCBI GI NO: 37520007 NR Description: hypothetical protein glr0438
MGSGEEDTGGGGGAVRGAVLKALVVVGGVLLLRRLRRSTTRWDHARAVADALSGEKFSREQARKDPDNFFNLRMLTCPATEMVDGSRVLYFEQAFWRSPEKPFRQRFYMVKPCPKEMKCDVELSSYAIRDAEEYKNFCDRQKDQRPQAEEVIADIAEHLTTIHLSRCGRGKRCLYEGSTPPEGFPNNWSGASYCTSDLSIHKNGEVHIWDKGFDDEGNQVWGTKAGPYEFKPAPKSKYDDMFSPLNFSAPLSLEKKLDKAYVIDDQ

SEQ ID NO: 28397 - protein, 193 aa, Zea mays subsp. mays
  peptide (1)..(193): Ceres Seq. ID no. 12412695
  misc_feature (1)..(192): NCBI GI NO: 15241343 NR Description: putative protein; protein id: At5g51020
  misc_feature (1)..(192): NCBI GI NO: 21554618 NR Description: unknown [Arabidopsis thaliana]
  misc_feature (1)..(158): NCBI GI NO: 37520007 NR Description: hypothetical protein glr0438
MLTCPATEMVDGSRVLYFEQAFWRSPEKPFRQRFYMVKPCPKEMKCDVELSSYAIRDAEEYKNFCDRQKDQRPQAEEVIADIAEHLTTIHLSRCGRGKRCLYEGSTPPEGFPNNWSGASYCTSDLSIHKNGEVHIWDKGFDDEGNQVWGTKAGPYEFKPAPKSKYDDMFSPLNFSAPLSLEKKLDKAYVIDDQ

SEQ ID NO: 28398 - DNA, 1439 bp, Zea mays subsp. mays
  misc_feature (1)..(1439): Ceres Seq. ID no. 12377701
  misc_feature (1038)..(1038): n is a, c, t, g, unknown, or other
  misc_feature (305)..(305): n is a, c, t, g, unknown, or other
gcacgagaccattacctagaacatcctaatcgaaaacgggtcgtcggcgtcctggtggtggtcgtatcttatctctctcactgccatagtgccatcgtgcgagcggcgagaaagtagaaggaagtgtgtcgtactcgtactcataccgggttggttggtttttgagacgtgtgcggtcgggagaggggatggagagaaagggagggtgctgcctcgcgccgaggtacgccgccaccgcggccgcgcagcaggcaggcgcggcctggcagatggggaggatcatgctcaagttccgcccgattgcncctaagccggcggccatggcgcccgcgccggcaccggcatcggcaccggtgaccggatcagccgccggtgccgggagagggaagcgaaaggccgcgtgcggaggcggcgggaggaggggccggaagcccaagaaggcggccaaagttgcgatggtgactgcagcgcctgcggcgacggcggcggcgcaagatgtgggcgactgccgggagcactgcgacaaggagaagtcgtcttcgtcgccgtcctcgtcctcgtcggggacgtcatccgtggactcgtcgccgccaccccggccgcagcagcgccagctcgcaacgctgccgctcatgcccgtgacggcggcggaggataaggccgctgcttgtcctgcgacagtggggccggatcagctcgtgccgtctcaggtggctacggcggcacggccgttggctccgcgcgcgatgcgccccgctgctgctgcagcttacttggtgacggtggaagaggtgaccgcgacgtggcgcgacggcgaggcgccggcctccgcgacgggcgcagacgaggccccggcgttcgtgtcggaccagtgggggcgcgtcacgtggtggaacgccgcgtttgtccgcgctgcatccgcggacgacggcgacgaggcggcggcgcccgtcgtgctcggcggagccctcccggcgtggggcacctgcgcgggattcacgtgccgcgtccgcgcccggcactggagcgcccggcgcntcggttcccccgtggtggcgccctgcgatgtttggcgtctggacgccgccggcagctacctttggcggctggacctgcaggccgcgctcactctcggcggctgcctgtgaaccgtacaccactgtcaagagcaagcaacgaatatgctgtgctactcctctacgtgcggagacgtgttgtattttattctatgagcgttatttactgacgtaaggcatggtttaatcgacggattgctatcctggtcgggcttaattaaggacgttgaagcctggtaaggtatactaagttagcgtccctcggaatgggagtgagtgagttgggaggacttgaaaatgtaagaagaaaaaaaacaaagcatgtgatggatgcttctagatgtgcaagatcagtcttcatcc

SEQ ID NO: 28399 - protein, 319 aa, Zea mays subsp. mays
  peptide (1)..(319): Ceres Seq. ID no. 12377702
  misc_feature (1)..(315): NCBI GI NO: 15242729 NR Description: putative protein; protein id: At5g63350.1
  misc_feature (217)..(315): NCBI GI NO: 15232126 NR Description: hypothetical protein; protein id: At3g27250.1
  misc_feature (219)..(315): NCBI GI NO: 18408645 NR Description: expressed protein; protein id: At3g48510
  misc_feature (219)..(315): NCBI GI NO: 21537225 NR Description: unknown [Arabidopsis thaliana]
  misc_feature (25)..(193): NCBI GI NO: 16127671 NR Description: arylesterase-related protein
  misc_feature (39)..(39): Xaa is any aa, unknown or other
  misc_feature (284)..(284): Xaa is any aa, unknown or other
MERKGGCCLAPRYAATAAAQQAGAAWQMGRIMLKFRPIXPKPAAMAPAPAPASAPVTGSAAGAGRGKRKAACGGGGRRGRKPKKAAKVAMVTAAPAATAAAQDVGDCREHCDKEKSSSSPSSSSSGTSSVDSSPPPRPQQRQLATLPLMPVTAAEDKAAACPATVGPDQLVPSQVATAARPLAPRAMRPAAAAAYLVTVEEVTATWRDGEAPASATGADEAPAFVSDQWGRVTWWNAAFVRAASADDGDEAAAPVVLGGALPAWGTCAGFTCRVRARHWSARRXGSPVVAPCDVWRLDAAGSYLWRLDLQAALTLGGCL

SEQ ID NO: 28400 - protein, 292 aa, Zea mays subsp. mays
  peptide (1)..(292): Ceres Seq. ID no. 12377703
  misc_feature (1)..(288): NCBI GI NO: 15242729 NR Description: putative protein; protein id: At5g63350.1
  misc_feature (190)..(288): NCBI GI NO: 15232126 NR Description: hypothetical protein; protein id: At3g27250.1
  misc_feature (192)..(288): NCBI GI NO: 18408645 NR Description: expressed protein; protein id: At3g48510
  misc_feature (192)..(288): NCBI GI NO: 21537225 NR Description: unknown [Arabidopsis thaliana]
  misc_feature (1)..(166): NCBI GI NO: 16127671 NR Description: arylesterase-related protein
  misc_feature (12)..(12): Xaa is any aa, unknown or other
  misc_feature (257)..(257): Xaa is any aa, unknown or other
MGRIMLKFRPIXPKPAAMAPAPAPASAPVTGSAAGAGRGKRKAACGGGGRRGRKPKKAAKVAMVTAAPAATAAAQDVGDCREHCDKEKSSSSPSSSSSGTSSVDSSPPPRPQQRQLATLPLMPVTAAEDKAAACPATVGPDQLVPSQVATAARPLAPRAMRPAAAAAYLVTVEEVTATWRDGEAPASATGADEAPAFVSDQWGRVTWWNAAFVRAASADDGDEAAAPVVLGGALPAWGTCAGFTCRVRARHWSARRXGSPVVAPCDVWRLDAAGSYLWRLDLQAALTLGGCL

SEQ ID NO: 28401 - protein, 288 aa, Zea mays subsp. mays
  peptide (1)..(288): Ceres Seq. ID no. 12377704
  misc_feature (1)..(284): NCBI GI NO: 15242729 NR Description: putative protein; protein id: At5g63350.1
  misc_feature (186)..(284): NCBI GI NO: 15232126 NR Description: hypothetical protein; protein id: At3g27250.1
  misc_feature (188)..(284): NCBI GI NO: 18408645 NR Description: expressed protein; protein id: At3g48510
  misc_feature (188)..(284): NCBI GI NO: 21537225 NR Description: unknown [Arabidopsis thaliana]
  misc_feature (1)..(162): NCBI GI NO: 16127671 NR Description: arylesterase-related protein
  misc_feature (8)..(8): Xaa is any aa, unknown or other
  misc_feature (253)..(253): Xaa is any aa, unknown or other
MLKFRPIXPKPAAMAPAPAPASAPVTGSAAGAGRGKRKAACGGGGRRGRKPKKAAKVAMVTAAPAATAAAQDVGDCREHCDKEKSSSSPSSSSSGTSSVDSSPPPRPQQRQLATLPLMPVTAAEDKAAACPATVGPDQLVPSQVATAARPLAPRAMRPAAAAAYLVTVEEVTATWRDGEAPASATGADEAPAFVSDQWGRVTWWNAAFVRAASADDGDEAAAPVVLGGALPAWGTCAGFTCRVRARHWSARRXGSPVVAPCDVWRLDAAGSYLWRLDLQAALTLGGCL

SEQ ID NO: 28402 - DNA, 1746 bp, Zea mays subsp. mays
  misc_feature (1)..(1746): Ceres Seq. ID no. 13498516
cttcaatttttactatttaattatacagatacatatccagccggcgcagccaggaggcgactgaccgaattgtattgtttgttcgatcgaagcaggcagatggcaggcggcggattcgtggaggacatgaacatgatgagggagcagagcctcctcgaggcgacgtgcggcgacctcttcgaccacatcgacgacctcctcgacttccccaacgaggactccgccgccgccgtgctcctcctggacgcgccggcgccggggagcccgctgtcggcgcgcatcatcgacgtcggccgcgccggcaatgcgctcgccccgcctgctgcccccgcgcagcacgacgcttccgctagcgccttcttcgccgccgcggggaacgatgtgttcgacaccaaggacgtcgtcggcgcacacatcggctcgtgcgacgacattgacatggacatggcgcagctggagtggctatcggggctcttcgacgacgcctccatcccgcacgagccggtgttccctggcgcgacggcgggcggcgcggcgcccatcatgaagagctccgcgctggcggccggcagcgctgctgccgccggacaaaatggaggacgcgctgctgttccgcagctccagccccatctcggtgctggagcacggcagcggtggcagcggcagcgccagcgccaccggctccgcgtcctcgtcctcctcctcggcgtcctcctcctcggagtccttctccgggagtgggagtggaggagggcatgtttggtcggcgccagtgtcgccgcgcccggcgccgccgccggtgctcgtcataccggcgcgcgcgcggagcaagcgctcccgttcgtccgcgttcaccggcgccgccgcgcgcgccggggcggagacgccaaccatcctcgtgccgacgcccatgtactcgtccgggtctgcccactcggaccccgagagcatcgccgagtccagcccgcacccggcgccgcccatgaagaagaagaagaaggccaagaagcctgcgccccccgcgccagctgcctcttctgacgacaacgatggcgacgccgactacgaggaaggcggcgagcaagcggagccgcagggcggcgccgtcaggaggtgcacgcattgccagatcgagaagacgccgcagtggcgcgcggggccgctggggcccaagacgctctgcaacgcctgcggcgtgcgctacaagtccggtcgcctgttcccggagtaccgccccgcggcgagccccaccttcgtgccgtccatccactccaactcgcacaagagggtggtggagatgcgccagaaggctgtccggagcggcgaccccgtcgtgcgaccttctccatttcatccgccgccgggattgacgtcccggcatggcgtcgccggactgtcggtcggtctcgtcccccatatagctatatatgtatgcatgcatggttgcttcatcagtcgtcgtcgcccattatggtcatcatcaccgcttcaccggtcaccgccatggatcgtctcccgcccatcatcacatgcattggtttgtgtcagcatccatccaatcccaatccatcgccgggcgtcccggcgttgttagttcattaggtcttttttttcctcatcggggggctagtgttattttacctttgatccttttgtctattggttaattggtttcccctggatgttttttgtttgtatagagtgaaaaagagagaggagaaatagatgaatcagagtggttgctgc

SEQ ID NO: 28403 - protein, 346 aa, Zea mays subsp. mays
  peptide (1)..(346): Ceres Seq. ID no. 13498517
  misc_feature (34)..(191): NCBI GI NO: 15451574 NR Description: Putative GATA-1 zinc finger protein [Oryza sativa]
  misc_feature (53)..(82): NCBI GI NO: 37572451 NR Description: AG-motif binding protein-5 [Nicotiana tabacum]
  misc_feature (53)..(82): NCBI GI NO: 37572443 NR Description: AG-motif binding protein-1 [Nicotiana tabacum]
LQFLLFNYTDTYPAGAARRRLTELYCLFDRSRQMAGGGFVEDMNMMREQSLLEATCGDLFDHIDDLLDFPNEDSAAAVLLLDAPAPGSPLSARIIDVGRAGNALAPPAAPAQHDASASAFFAAAGNDVFDTKDVVGAHIGSCDDIDMDMAQLEWLSGLFDDASIPHEPVFPGATAGGAAPIMKSSALAAGSAAAAGQNGGRAAVPQLQPHLGAGARQRWQRQRQRHRLRVLVLLLGVLLLGVLLREWEWRRACLVGASVAAPGAAAGARHTGARAEQALPFVRVHRRRRARRGGDANHPRADAHVLVRVCPLGPREHRRVQPAPGAAHEEEEEGQEACAPRASCLF

SEQ ID NO: 28404 - protein, 333 aa, Zea mays subsp. mays
  peptide (1)..(333): Ceres Seq. ID no. 13498518
  misc_feature (1)..(130): Pfam Name: Pfam Description:  Equine herpesvirus glycoprotein gp2
  misc_feature (1)..(246): NCBI GI NO: 15451574 NR Description: Putative GATA-1 zinc finger protein [Oryza sativa]
  misc_feature (29)..(252): NCBI GI NO: 37572451 NR Description: AG-motif binding protein-5 [Nicotiana tabacum]
  misc_feature (29)..(252): NCBI GI NO: 37572443 NR Description: AG-motif binding protein-1 [Nicotiana tabacum]
  misc_feature (29)..(268): NCBI GI NO: 34909448 NR Description: OSJNBa0014K08.18
  misc_feature (131)..(244): NCBI GI NO: 15233101 NR Description: GATA zinc finger protein [Arabidopsis thaliana]
  misc_feature (173)..(241): NCBI GI NO: 12711287 NR Description: GATA-1 zinc finger protein [Nicotiana tabacum]
  misc_feature (170)..(247): NCBI GI NO: 37572449 NR Description: AG-motif binding protein-4 [Nicotiana tabacum]
  misc_feature (18)..(239): NCBI GI NO: 37536778 NR Description: putative transcription factor
  misc_feature (73)..(245): NCBI GI NO: 15239343 NR Description: GATA zinc finger protein [Arabidopsis thaliana]
  misc_feature (124)..(256): NCBI GI NO: 15225399 NR Description: GATA zinc finger protein [Arabidopsis thaliana]
MEDALLFRSSSPISVLEHGSGGSGSASATGSASSSSSSASSSSESFSGSGSGGGHVWSAPVSPRPAPPPVLVIPARARSKRSRSSAFTGAAARAGAETPTILVPTPMYSSGSAHSDPESIAESSPHPAPPMKKKKKAKKPAPPAPAASSDDNDGDADYEEGGEQAEPQGGAVRRCTHCQIEKTPQWRAGPLGPKTLCNACGVRYKSGRLFPEYRPAASPTFVPSIHSNSHKRVVEMRQKAVRSGDPVVRPSPFHPPPGLTSRHGVAGLSVGLVPHIAIYVCMHGCFISRRRPLWSSSPLHRSPPWIVSRPSSHALVCVSIHPIPIHRRASRRC

SEQ ID NO: 28405 - protein, 313 aa, Zea mays subsp. mays
  peptide (1)..(313): Ceres Seq. ID no. 13498519
  misc_feature (1)..(158): NCBI GI NO: 15451574 NR Description: Putative GATA-1 zinc finger protein [Oryza sativa]
  misc_feature (20)..(49): NCBI GI NO: 37572451 NR Description: AG-motif binding protein-5 [Nicotiana tabacum]
  misc_feature (20)..(49): NCBI GI NO: 37572443 NR Description: AG-motif binding protein-1 [Nicotiana tabacum]
MAGGGFVEDMNMMREQSLLEATCGDLFDHIDDLLDFPNEDSAAAVLLLDAPAPGSPLSARIIDVGRAGNALAPPAAPAQHDASASAFFAAAGNDVFDTKDVVGAHIGSCDDIDMDMAQLEWLSGLFDDASIPHEPVFPGATAGGAAPIMKSSALAAGSAAAAGQNGGRAAVPQLQPHLGAGARQRWQRQRQRHRLRVLVLLLGVLLLGVLLREWEWRRACLVGASVAAPGAAAGARHTGARAEQALPFVRVHRRRRARRGGDANHPRADAHVLVRVCPLGPREHRRVQPAPGAAHEEEEEGQEACAPRASCLF

SEQ ID NO: 28406 - DNA, 1124 bp, Zea mays subsp. mays
  misc_feature (1)..(1124): Ceres Seq. ID no. 12409031
atgagactctgaggctctgagctgagcgcgctccgtttcagtttcagagagcggttgctgtgcatgtgctggtgctgcgacttgactgttcgagcacagctgcgtctgcgtccccatggtgtagataggaggggaggaagcaggaagagggggaggcagcctgtgtgtgtgagagagaggcagaagtagtgaggaaggaagcaggaagatggcttggaatgcccgcttcggcgatgacgaggaaggcagcggccttgagctcagcctgggccttccgggctacttctccgggtcgccagaccaagccgcaggtttcgaggagaaagcgagccggggttctgctgctgctcctcctcctcctcctcccgctgctgctcgagcgaaaggaagcgacggcttcaaggcgaggccggcggcagctgctccggtcgtgggatggccgccggtgcgcgcgttccggcggaacctcgccacgtcgtcctccaagccgtcgagccacggaggcaaggagcccgccgcgagcgccgacggcggcaacaagggcctgttcgtcaaggtcaacatggacggcgtccccatcggccgtaagctcgacctggcggcgcacgccggctacgacacgctctccgccgccgttgacagcctcttccgcggcctcttcgctgctcaagcggcggggccaggcggggagcagcaggctgtcgcgggtatcctgagcggcggcggcggcggcgagcacacgctggtgtacgaggacgacgagggcgaccagatgctggtcggggacgtgccgtggccgatgttcgtcgccaccgctaggcgtctgcgcgtgctcaagagctccgacctgagcccgtcgtcgctgagggcagcgagagccgcagctgagtgctgaacgcaccctggacctggagcctgaacgttttgcggcctctccggagggcccatccgtgtaaaatcgaagcagttttcgtcgattttgcttttagcaagggattatatgtcctagtgatcaagtagggaagcaagaatctatctagaggtgatgaggggtgtcgtagaaccatgcaatcctagtgctagattttttttctgaaagtttaacaaggtttcttggcgctggc

SEQ ID NO: 28407 - protein, 228 aa, Zea mays subsp. mays
  peptide (1)..(228): Ceres Seq. ID no. 12409032
  misc_feature (17)..(214): Pfam Name: Pfam Description:  AUX/IAA family
  misc_feature (1)..(227): NCBI GI NO: 34906394 NR Description: P0710E05.9
  misc_feature (40)..(221): NCBI GI NO: 34909384 NR Description: putative phytochrome-associated protein
  misc_feature (70)..(215): NCBI GI NO: 4093155 NR Description: phytochrome-associated protein 1
  misc_feature (70)..(215): NCBI GI NO: 15228226 NR Description: phytochrome-associated protein 1
  misc_feature (70)..(215): NCBI GI NO: 21593333 NR Description: phytochrome-associated protein 1 (PAP1)
  misc_feature (4)..(215): NCBI GI NO: 15218080 NR Description: auxin regulated protein IAA18, putative
  misc_feature (4)..(215): NCBI GI NO: 25296228 NR Description: auxin-induced protein IAA18
  misc_feature (70)..(215): NCBI GI NO: 21594025 NR Description: auxin regulated protein IAA18, putative
  misc_feature (15)..(213): NCBI GI NO: 30962267 NR Description: Aux/IAA protein
  misc_feature (4)..(224): NCBI GI NO: 25989504 NR Description: Aux/IAA protein [Solanum tuberosum]
MAWNARFGDDEEGSGLELSLGLPGYFSGSPDQAAGFEEKASRGSAAAPPPPPPAAARAKGSDGFKARPAAAAPVVGWPPVRAFRRNLATSSSKPSSHGGKEPAASADGGNKGLFVKVNMDGVPIGRKLDLAAHAGYDTLSAAVDSLFRGLFAAQAAGPGGEQQAVAGILSGGGGGEHTLVYEDDEGDQMLVGDVPWPMFVATARRLRVLKSSDLSPSSLRAARAAAEC

SEQ ID NO: 28408 - protein, 165 aa, Zea mays subsp. mays
  peptide (1)..(165): Ceres Seq. ID no. 12409033
MPASAMTRKAAALSSAWAFRATSPGRQTKPQVSRRKRAGVLLLLLLLLLPLLLERKEATASRRGRRQLLRSWDGRRCARSGGTSPRRPPSRRATEARSPPRAPTAATRACSSRSTWTASPSAVSSTWRRTPATTRSPPPLTASSAASSLLKRRGQAGSSRLSRVS

SEQ ID NO: 28409 - protein, 160 aa, Zea mays subsp. mays
  peptide (1)..(160): Ceres Seq. ID no. 12409034
MTRKAAALSSAWAFRATSPGRQTKPQVSRRKRAGVLLLLLLLLLPLLLERKEATASRRGRRQLLRSWDGRRCARSGGTSPRRPPSRRATEARSPPRAPTAATRACSSRSTWTASPSAVSSTWRRTPATTRSPPPLTASSAASSLLKRRGQAGSSRLSRVS

SEQ ID NO: 28410 - DNA, 1403 bp, Zea mays subsp. mays
  misc_feature (1)..(1403): Ceres Seq. ID no. 12387046
agctgcactgcagcacacgcgccaccgaagcgctctgcccacctcgctcccctccagtggccgccagcgcggctcagcggtccatcctcctgacgccacctgcaacggcgtcaggcggtgatccattccaactcgcgctccgtcctggcaatcactttgggaaggtggtcagtggaatagctttgcttaaaaagcttgaagcagttggtagtgaaactggaaatccttcttatcaagtgaaaattgtagactgtggtgaagtttccaacacaaattctcaggatccgctaaagggagataaagtaagctcaaagacagataacagcagttcagacagtgaaaagggtggccatcgtaccaagcgttccttaccgaaaggaatgatccaggtggaagctccaggaacaatcccattcagtttgatgtaaatttaatgaaaccagtaaatgtagatggcaacattggtggtgataatgcagaggctagcatgtctagaactggtgaaggaaggcatctgccaagcaatgaacctttgtccaccaatggtaaagatttaggtgtgggttctgcagacaatgggcaacctcaacaaatcaggaaaggacgtggttttactcagaagtatgggtatgcacgccgatataggacgccatctcccgagcgtccctctgtttgaccccgctacgatggagggagagatgatagatggaacaatttcaataggtatgaaagaaatggtccttacagtagacgctcgccagtaaggagataccatggctcgccaagagccaatagcccatccagtactacccaagcctcaaccgttcaaagtgttgctcgaagaggatatgtacaggtaatgcatccatcgtactgttgatttagccatcccaacctgcaaataacctttgcatattctgtttgacatttttacatagtgttttctttaaatgaaaccgactcatactactcggcctacacagtgcccattctgcaaaacgcccaattatgctgtggagtatcgtggcatcaaaacaaaggagtaaaggagcatagagcagtttacagacaattgaaaaagagaattgatcttttttatgggcgaagtgttgaagatggctttggtgaaggaaatgtcttgttagcatcaagtaagtggcgacatcacaacccctacaagcttgtgccttaaaacaagaggatacaagaagttggagtgcttttgtgaaggcttttacgaatcacttgaagtgttagtacttttgtgaatgattttgtaaagtgtttgcaaatatgtgcaaaacataataacatgtgtaggttttgtgaatgattttgttgtggtgcttgttgatggtttatgtgatgtggatctaccattgtgcaatactaattaaatttgt

SEQ ID NO: 28411 - protein, 141 aa, Zea mays subsp. mays
  peptide (1)..(141): Ceres Seq. ID no. 12387047
  misc_feature (49)..(122): NCBI GI NO: 37788310 NR Description: cyclophilin-like protein [Triticum aestivum]
  misc_feature (49)..(125): NCBI GI NO: 15229425 NR Description: cyclophylin -like protein; protein id: At3g63400
  misc_feature (39)..(121): NCBI GI NO: 20259449 NR Description: unknown protein [Arabidopsis thaliana]
  misc_feature (39)..(121): NCBI GI NO: 22329097 NR Description: putative protein; protein id: At4g32420
  misc_feature (52)..(121): NCBI GI NO: 7486628 NR Description: hypothetical protein F8B4
LHCSTRATEALCPPRSPPVAASAAQRSILLTPPATASGGDPFQLALRPGNHFGKVVSGIALLKKLEAVGSETGNPSYQVKIVDCGEVSNTNSQDPLKGDKVSSKTDNSSSDSEKGGHRTKRSLPKGMIQVEAPGTIPFSLM

SEQ ID NO: 28412 - protein, 80 aa, Zea mays subsp. mays
  peptide (1)..(80): Ceres Seq. ID no. 12387048
  misc_feature (1)..(80): NCBI GI NO: 37788310 NR Description: cyclophilin-like protein [Triticum aestivum]
  misc_feature (43)..(80): NCBI GI NO: 34393471 NR Description: cyclophylin-like protein
  misc_feature (3)..(80): NCBI GI NO: 15229425 NR Description: cyclophylin -like protein; protein id: At3g63400
  misc_feature (26)..(80): NCBI GI NO: 20259449 NR Description: unknown protein [Arabidopsis thaliana]
  misc_feature (26)..(80): NCBI GI NO: 22329097 NR Description: putative protein; protein id: At4g32420
  misc_feature (26)..(80): NCBI GI NO: 7486628 NR Description: hypothetical protein F8B4
MKPVNVDGNIGGDNAEASMSRTGEGRHLPSNEPLSTNGKDLGVGSADNGQPQQIRKGRGFTQKYGYARRYRTPSPERPSV

SEQ ID NO: 28413 - DNA, 1254 bp, Zea mays subsp. mays
  misc_feature (1)..(1254): Ceres Seq. ID no. 13498495
gcaaatccccttccgcgtctgtctggcctctggggcttctaggttagcgcgtgccaccaccatggccgaggaggtccaggctccactttccgccaccatggccgaggaggtgcaggctccactttccgccaccatggcgaaggaggcccagtcgccgccgtccgcaaccatagcggaggcgacggcgccgccgcagctcgtattgtttaactcctttacgaagagggaggagccattccagccccgggtagaggggaaggtagggatgtacgtctgtggcgtcactccctacgactttagccacatcggccacgcgcgtgcctacgtcgccttcgacgtcctctacaggtaccttaaattcttggggtatgaagttgaatatgtccgtaatttcacggatattgatgacaagattattaagcgtgccaatgaacgcggtgaaacagtaacaagcttgagtagccagtttatcaatcaatttcttcttgacatgactgagctccagtgcttgcctcctacctgcgagccacgggtaacagaacacattgagcatattataaagttgataacacagataatggacaatggcaaagcctatgctattgaaggagatgtttacttttcagttgaaagttttcctgaatatctcagtttatctggaagaaaatttgatcaaaatcaggcaggtgcacgggttgcttttgatacaagaaagcacaatcctgcagacttcgcactctggaaagctgcaaaggagggtgaacctttttgggatagcccttggggccgtggaagaccaggctggcatattgaatgcagcgcaatgagtgctcactatttaggacatgtattcgatattcatggtggggggaaagatttgatttttcctcatcatgagaatgagcttgcacaaagccgcgcagcttatcctgagagcgaggtcaagtgctggatgcacaatggctttgttaacaaggatgataaaaaaatggcaaaatcagataataactttttcacgattagagatatcactgctctttaccatccaatggctttaagatttttcttgatgcgcacacattatagatcagatgttaaccattctgatcaagcgcttgagattgcatctgatcgtgtctactacatttatcagactttatatgactgtgaggaagtgttagctacatatcgtgaagagggtacctctctcccagtgccgtctgaggagcaaaatctgattggaaagcaccattc

SEQ ID NO: 28414 - protein, 417 aa, Zea mays subsp. mays
  peptide (1)..(417): Ceres Seq. ID no. 13498496
  misc_feature (96)..(199): Pfam Name: I, L, M and V Pfam Description: tRNA synthetases class I
  misc_feature (45)..(413): NCBI GI NO: 37535144 NR Description: putative cysteinyl-tRNA synthetase
  misc_feature (65)..(408): NCBI GI NO: 25293240 NR Description: probable cysteinyl-tRNA synthetase
  misc_feature (73)..(408): NCBI GI NO: 18402580 NR Description: cysteinyl-tRNA synthetase -related
  misc_feature (65)..(415): NCBI GI NO: 15241557 NR Description: cysteine-tRNA ligase -related protein
  misc_feature (65)..(384): NCBI GI NO: 9758060 NR Description: cysteine-tRNA ligase [Arabidopsis thaliana]
  misc_feature (66)..(402): NCBI GI NO: 23055378 NR Description: hypothetical protein [Geobacter metallireducens]
  misc_feature (66)..(408): NCBI GI NO: 23001592 NR Description: hypothetical protein [Magnetococcus sp. MC-1]
  misc_feature (64)..(380): NCBI GI NO: 15228880 NR Description: cysteine-tRNA ligase-related protein
  misc_feature (66)..(409): NCBI GI NO: 39998454 NR Description: cysteinyl-tRNA synthetase
  misc_feature (66)..(390): NCBI GI NO: 34497201 NR Description: cysteinyl-tRNA synthetase
QIPFRVCLASGASRLARATTMAEEVQAPLSATMAEEVQAPLSATMAKEAQSPPSATIAEATAPPQLVLFNSFTKREEPFQPRVEGKVGMYVCGVTPYDFSHIGHARAYVAFDVLYRYLKFLGYEVEYVRNFTDIDDKIIKRANERGETVTSLSSQFINQFLLDMTELQCLPPTCEPRVTEHIEHIIKLITQIMDNGKAYAIEGDVYFSVESFPEYLSLSGRKFDQNQAGARVAFDTRKHNPADFALWKAAKEGEPFWDSPWGRGRPGWHIECSAMSAHYLGHVFDIHGGGKDLIFPHHENELAQSRAAYPESEVKCWMHNGFVNKDDKKMAKSDNNFFTIRDITALYHPMALRFFLMRTHYRSDVNHSDQALEIASDRVYYIYQTLYDCEEVLATYREEGTSLPVPSEEQNLIGKHH

SEQ ID NO: 28415 - protein, 397 aa, Zea mays subsp. mays
  peptide (1)..(397): Ceres Seq. ID no. 13498497
  misc_feature (76)..(179): Pfam Name: I, L, M and V Pfam Description: tRNA synthetases class I
  misc_feature (25)..(393): NCBI GI NO: 37535144 NR Description: putative cysteinyl-tRNA synthetase
  misc_feature (45)..(388): NCBI GI NO: 25293240 NR Description: probable cysteinyl-tRNA synthetase
  misc_feature (53)..(388): NCBI GI NO: 18402580 NR Description: cysteinyl-tRNA synthetase -related
  misc_feature (45)..(395): NCBI GI NO: 15241557 NR Description: cysteine-tRNA ligase -related protein
  misc_feature (45)..(364): NCBI GI NO: 9758060 NR Description: cysteine-tRNA ligase [Arabidopsis thaliana]
  misc_feature (46)..(382): NCBI GI NO: 23055378 NR Description: hypothetical protein [Geobacter metallireducens]
  misc_feature (46)..(388): NCBI GI NO: 23001592 NR Description: hypothetical protein [Magnetococcus sp. MC-1]
  misc_feature (44)..(360): NCBI GI NO: 15228880 NR Description: cysteine-tRNA ligase-related protein
  misc_feature (46)..(389): NCBI GI NO: 39998454 NR Description: cysteinyl-tRNA synthetase
  misc_feature (46)..(370): NCBI GI NO: 34497201 NR Description: cysteinyl-tRNA synthetase
MAEEVQAPLSATMAEEVQAPLSATMAKEAQSPPSATIAEATAPPQLVLFNSFTKREEPFQPRVEGKVGMYVCGVTPYDFSHIGHARAYVAFDVLYRYLKFLGYEVEYVRNFTDIDDKIIKRANERGETVTSLSSQFINQFLLDMTELQCLPPTCEPRVTEHIEHIIKLITQIMDNGKAYAIEGDVYFSVESFPEYLSLSGRKFDQNQAGARVAFDTRKHNPADFALWKAAKEGEPFWDSPWGRGRPGWHIECSAMSAHYLGHVFDIHGGGKDLIFPHHENELAQSRAAYPESEVKCWMHNGFVNKDDKKMAKSDNNFFTIRDITALYHPMALRFFLMRTHYRSDVNHSDQALEIASDRVYYIYQTLYDCEEVLATYREEGTSLPVPSEEQNLIGKHH

SEQ ID NO: 28416 - protein, 385 aa, Zea mays subsp. mays
  peptide (1)..(385): Ceres Seq. ID no. 13498498
  misc_feature (64)..(167): Pfam Name: I, L, M and V Pfam Description: tRNA synthetases class I
  misc_feature (13)..(381): NCBI GI NO: 37535144 NR Description: putative cysteinyl-tRNA synthetase
  misc_feature (33)..(376): NCBI GI NO: 25293240 NR Description: probable cysteinyl-tRNA synthetase
  misc_feature (41)..(376): NCBI GI NO: 18402580 NR Description: cysteinyl-tRNA synthetase -related
  misc_feature (33)..(383): NCBI GI NO: 15241557 NR Description: cysteine-tRNA ligase -related protein
  misc_feature (33)..(352): NCBI GI NO: 9758060 NR Description: cysteine-tRNA ligase [Arabidopsis thaliana]
  misc_feature (34)..(370): NCBI GI NO: 23055378 NR Description: hypothetical protein [Geobacter metallireducens]
  misc_feature (34)..(376): NCBI GI NO: 23001592 NR Description: hypothetical protein [Magnetococcus sp. MC-1]
  misc_feature (32)..(348): NCBI GI NO: 15228880 NR Description: cysteine-tRNA ligase-related protein
  misc_feature (34)..(377): NCBI GI NO: 39998454 NR Description: cysteinyl-tRNA synthetase
  misc_feature (34)..(358): NCBI GI NO: 34497201 NR Description: cysteinyl-tRNA synthetase
MAEEVQAPLSATMAKEAQSPPSATIAEATAPPQLVLFNSFTKREEPFQPRVEGKVGMYVCGVTPYDFSHIGHARAYVAFDVLYRYLKFLGYEVEYVRNFTDIDDKIIKRANERGETVTSLSSQFINQFLLDMTELQCLPPTCEPRVTEHIEHIIKLITQIMDNGKAYAIEGDVYFSVESFPEYLSLSGRKFDQNQAGARVAFDTRKHNPADFALWKAAKEGEPFWDSPWGRGRPGWHIECSAMSAHYLGHVFDIHGGGKDLIFPHHENELAQSRAAYPESEVKCWMHNGFVNKDDKKMAKSDNNFFTIRDITALYHPMALRFFLMRTHYRSDVNHSDQALEIASDRVYYIYQTLYDCEEVLATYREEGTSLPVPSEEQNLIGKHH

SEQ ID NO: 28417 - DNA, 1442 bp, Zea mays subsp. mays
  misc_feature (1)..(1442): Ceres Seq. ID no. 13498707
  misc_feature (83)..(83): n is a, c, t, g, unknown, or other
ctgaaagaaacaaaaaaataaataaaacaaagataaatcattggggttgggggattgcaattgcaagttgccgctgtgcggtngcggtcgctcccctcccgactccggccagcagcagcgacggtgccggcagtcgattactccacgcggcggcggcggcggcggtagcccatcctttcccgttttctgatccagtcctactgataccgggcacagcacgcctgctcttgtgatatactctattaaggtacggcgtgaagatgagggttttcttggtctcgtgaaggcgacgctcttgtctgctaactacatattatagaatgttttgcttgaggggctactggtcgccttcactagctccagtgagggaagggcctgttcgacatcatataaagttcaattctatagtggtttgtggtgccaggggtccgagaccgagatatccccgtgtgtggaaaactcgtaagaaaattgggactatttccaagtcgcagaagcttgtcgaatgtattaaaggtctgtctaatgtaaaggaggaagtttatggggcacttgactcatttgttgcatgggaactggagtttcccttgatagtggtaaagaaggcactgaagaaacttgaggacgaaaaggaatggaaacgaataattcaggtcattaaatggatgttcaacaaaggtcaagggaagacaatgggaagctattacaccttgttgaatgctttgatcgaggatggacggattgaggaagcagaagagttatttggaatggtgttctcacgatatatggagggtttgcctcgtacatttttcatgagaatgatttctttctattacaacgtggaagcgtatgataatatgtttgagatttttgctgatatggaggaactaggcgtaagacctgatggttctattatcaggatgctaggtgatgtatttcagaagttagagatgatggacaaatatgaaaagttaaaaaagaaataccgaccaccgaaatgggaatatcgacacatcaaaggcaagcgcataagaatcagagtttatcctgacagtaatcctgaagtggcggcaaaaggagatcccgacactgatgagctcgaagagttagaaagcacacaccttaataacgaattggatgaagcagcaagctcaggcctcgacaggagtgtattggacgatgcagcttctggagaccttgaatatatgtagatcagagcttccatttggtacttttttgtgcctgcttaaccaaagcggtctagagcaaattgaactggtaacatactctctgttttgatttgacatcctagaacccgtgtcgtcatactgccaagacatgggcatcgctatcttctgaagtatttttactacctagaatgagtagaaactacatgccaggctttgccatcagcagtcttttcaagacatcatggtggtttc

SEQ ID NO: 28418 - protein, 296 aa, Zea mays subsp. mays
  peptide (1)..(296): Ceres Seq. ID no. 13498708
  misc_feature (126)..(160): Pfam Name: Pfam Description:  PPR repeat
  misc_feature (1)..(296): NCBI GI NO: 34909686 NR Description: B1131G08.1
  misc_feature (1)..(283): NCBI GI NO: 18415645 NR Description: pentatricopeptide (PPR) repeat-containing protein
  misc_feature (31)..(283): NCBI GI NO: 7486589 NR Description: hypothetical protein F7J7
  misc_feature (44)..(242): NCBI GI NO: 18415213 NR Description: pentatricopeptide (PPR) repeat-containing protein
  misc_feature (44)..(232): NCBI GI NO: 7485419 NR Description: hypothetical protein F13C5
  misc_feature (44)..(240): NCBI GI NO: 34393638 NR Description: pentatricopeptide
  misc_feature (42)..(277): NCBI GI NO: 18390413 NR Description: expressed protein [Arabidopsis thaliana]
  misc_feature (42)..(277): NCBI GI NO: 30678929 NR Description: expressed protein [Arabidopsis thaliana]
  misc_feature (71)..(277): NCBI GI NO: 25406795 NR Description: hypothetical protein
MFCLRGYWSPSLAPVREGPVRHHIKFNSIVVCGARGPRPRYPRVWKTRKKIGTISKSQKLVECIKGLSNVKEEVYGALDSFVAWELEFPLIVVKKALKKLEDEKEWKRIIQVIKWMFNKGQGKTMGSYYTLLNALIEDGRIEEAEELFGMVFSRYMEGLPRTFFMRMISFYYNVEAYDNMFEIFADMEELGVRPDGSIIRMLGDVFQKLEMMDKYEKLKKKYRPPKWEYRHIKGKRIRIRVYPDSNPEVAAKGDPDTDELEELESTHLNNELDEAASSGLDRSVLDDAASGDLEYM

SEQ ID NO: 28419 - protein, 181 aa, Zea mays subsp. mays
  peptide (1)..(181): Ceres Seq. ID no. 13498709
  misc_feature (11)..(45): Pfam Name: Pfam Description:  PPR repeat
  misc_feature (1)..(181): NCBI GI NO: 34909686 NR Description: B1131G08.1
  misc_feature (1)..(168): NCBI GI NO: 18415645 NR Description: pentatricopeptide (PPR) repeat-containing protein
  misc_feature (1)..(168): NCBI GI NO: 7486589 NR Description: hypothetical protein F7J7
  misc_feature (1)..(127): NCBI GI NO: 18415213 NR Description: pentatricopeptide (PPR) repeat-containing protein
  misc_feature (1)..(117): NCBI GI NO: 7485419 NR Description: hypothetical protein F13C5
  misc_feature (1)..(125): NCBI GI NO: 34393638 NR Description: pentatricopeptide
  misc_feature (1)..(162): NCBI GI NO: 18390413 NR Description: expressed protein [Arabidopsis thaliana]
  misc_feature (1)..(162): NCBI GI NO: 30678929 NR Description: expressed protein [Arabidopsis thaliana]
  misc_feature (1)..(162): NCBI GI NO: 25406795 NR Description: hypothetical protein
MFNKGQGKTMGSYYTLLNALIEDGRIEEAEELFGMVFSRYMEGLPRTFFMRMISFYYNVEAYDNMFEIFADMEELGVRPDGSIIRMLGDVFQKLEMMDKYEKLKKKYRPPKWEYRHIKGKRIRIRVYPDSNPEVAAKGDPDTDELEELESTHLNNELDEAASSGLDRSVLDDAASGDLEYM

SEQ ID NO: 28420 - protein, 172 aa, Zea mays subsp. mays
  peptide (1)..(172): Ceres Seq. ID no. 13498710
  misc_feature (2)..(36): Pfam Name: Pfam Description:  PPR repeat
  misc_feature (1)..(172): NCBI GI NO: 34909686 NR Description: B1131G08.1
  misc_feature (1)..(159): NCBI GI NO: 18415645 NR Description: pentatricopeptide (PPR) repeat-containing protein
  misc_feature (1)..(159): NCBI GI NO: 7486589 NR Description: hypothetical protein F7J7
  misc_feature (1)..(118): NCBI GI NO: 18415213 NR Description: pentatricopeptide (PPR) repeat-containing protein
  misc_feature (1)..(108): NCBI GI NO: 7485419 NR Description: hypothetical protein F13C5
  misc_feature (1)..(116): NCBI GI NO: 34393638 NR Description: pentatricopeptide
  misc_feature (1)..(153): NCBI GI NO: 18390413 NR Description: expressed protein [Arabidopsis thaliana]
  misc_feature (1)..(153): NCBI GI NO: 30678929 NR Description: expressed protein [Arabidopsis thaliana]
  misc_feature (1)..(153): NCBI GI NO: 25406795 NR Description: hypothetical protein
MGSYYTLLNALIEDGRIEEAEELFGMVFSRYMEGLPRTFFMRMISFYYNVEAYDNMFEIFADMEELGVRPDGSIIRMLGDVFQKLEMMDKYEKLKKKYRPPKWEYRHIKGKRIRIRVYPDSNPEVAAKGDPDTDELEELESTHLNNELDEAASSGLDRSVLDDAASGDLEYM

SEQ ID NO: 28421 - DNA, 1387 bp, Zea mays subsp. mays
  misc_feature (1)..(1387): Ceres Seq. ID no. 13492693
acttccaaactgcaacgaaaacccacgtctaaaacaggtggcccaccaacgattcacttccccgatcccagggggcggcgatcggaattcgcaacttctcccacgcggcgaacacggcagagatgatgagctcccgggccggatccatcctcctccgccacgccggctcccgtctcttcaccgcagcggcgatctctccggcggcggcctcgaggccactgctcgccggcggcaatggtgttccggcagtcatgctacggcttatgtccacgtcctcccccgccgctcccacggaggcgaaggacgaggcagccaaggcctccaaggtgggaggagacaagaaggcggtggtgatcaacagctactgggggatcgagcaaaacaacaagctagcgcgggacgacggcaccgagtggaagtggacttgctttaggccatgggagacgtacacggcggacacgtccattgacctcaccagacaccatgagcccaagacgctgatggataaggtcgcatactggaccgtcaagtcgctgcgcttccccacggacatcttcttccagaggcggtatggctgccgggcgatgatgctggaaaccgtggctgcggtgcctgggatggtgggcggcatgctgctccacctgcgctcactccgccgcttcgagcagagcggcggctggatccgcgctttgctggaggaggccgagaacgagcgcatgcacctcatgaccttcatggaggtggcgaagccgaggtggtacgagcgcgcgctcgttatcaccgtccagggcgtcttcttcaacgcatacttcctcggctacctcttgtccccgaagttcgcgcaccgcgtcgtcggctacctggaggaggaggccatccactcgtacaccgagtacctcaaggatctggaggccggcaagatcgagaacgtccccgccccggccatcgccatcgactactggcgcctccccgctaacgccacgctcaaggacgtagtcaccgtcgtccgcgccgacgaggctcaccaccgcgacgtcaaccactttgcatcggacatccattgccagggaatgcagctgaagcagtcccctgcgccgatcggataccactgaggatgtttgtgctcttcttaattttgcatcgctaataagcaattgtctttaagggaaggaaaggatgcttattgagttacgagtactgctacggcgattaggatattttccaaccagttgtttgagagtgaaacctattatatgtacgcatgttacatgtacatatctctaagtgcgagaggtgcttttctggcgtttatcacttcttcctggagttcctttgttcttcatgtcagctgaattgggctcgctaatatcgaatgtacaatttttgc

SEQ ID NO: 28422 - protein, 329 aa, Zea mays subsp. mays
  peptide (1)..(329): Ceres Seq. ID no. 13492694
  misc_feature (52)..(327): Pfam Name: Pfam Description:  Alternative oxidase
  misc_feature (1)..(329): NCBI GI NO: 25989199 NR Description: alternative oxidase AOX2 precursor [Zea mays]
  misc_feature (2)..(329): NCBI GI NO: 3218544 NR Description: alternative oxidase
  misc_feature (2)..(329): NCBI GI NO: 19912725 NR Description: alternative oxidase [Triticum aestivum]
  misc_feature (1)..(329): NCBI GI NO: 16902306 NR Description: alternative oxidase 1c
  misc_feature (65)..(329): NCBI GI NO: 5802557 NR Description: alternative oxidase [Triticum aestivum]
  misc_feature (23)..(329): NCBI GI NO: 25989197 NR Description: alternative oxidase AOX1 precursor [Zea mays]
  misc_feature (49)..(329): NCBI GI NO: 19912727 NR Description: alternative oxidase [Triticum aestivum]
  misc_feature (1)..(329): NCBI GI NO: 1588565 NR Description: alternative oxidase 1
  misc_feature (58)..(329): NCBI GI NO: 421824 NR Description: alternative respiratory pathway oxidase (EC 1
  misc_feature (58)..(329): NCBI GI NO: 1872517 NR Description: alternative oxidase [Arabidopsis thaliana]
MMSSRAGSILLRHAGSRLFTAAAISPAAASRPLLAGGNGVPAVMLRLMSTSSPAAPTEAKDEAAKASKVGGDKKAVVINSYWGIEQNNKLARDDGTEWKWTCFRPWETYTADTSIDLTRHHEPKTLMDKVAYWTVKSLRFPTDIFFQRRYGCRAMMLETVAAVPGMVGGMLLHLRSLRRFEQSGGWIRALLEEAENERMHLMTFMEVAKPRWYERALVITVQGVFFNAYFLGYLLSPKFAHRVVGYLEEEAIHSYTEYLKDLEAGKIENVPAPAIAIDYWRLPANATLKDVVTVVRADEAHHRDVNHFASDIHCQGMQLKQSPAPIGYH

SEQ ID NO: 28423 - protein, 328 aa, Zea mays subsp. mays
  peptide (1)..(328): Ceres Seq. ID no. 13492695
  misc_feature (51)..(326): Pfam Name: Pfam Description:  Alternative oxidase
  misc_feature (1)..(328): NCBI GI NO: 25989199 NR Description: alternative oxidase AOX2 precursor [Zea mays]
  misc_feature (1)..(328): NCBI GI NO: 3218544 NR Description: alternative oxidase
  misc_feature (1)..(328): NCBI GI NO: 19912725 NR Description: alternative oxidase [Triticum aestivum]
  misc_feature (1)..(328): NCBI GI NO: 16902306 NR Description: alternative oxidase 1c
  misc_feature (64)..(328): NCBI GI NO: 5802557 NR Description: alternative oxidase [Triticum aestivum]
  misc_feature (22)..(328): NCBI GI NO: 25989197 NR Description: alternative oxidase AOX1 precursor [Zea mays]
  misc_feature (48)..(328): NCBI GI NO: 19912727 NR Description: alternative oxidase [Triticum aestivum]
  misc_feature (1)..(328): NCBI GI NO: 1588565 NR Description: alternative oxidase 1
  misc_feature (57)..(328): NCBI GI NO: 421824 NR Description: alternative respiratory pathway oxidase (EC 1
  misc_feature (57)..(328): NCBI GI NO: 15228734 NR Description: alternative oxidase 1a, mitochondrial (AOX1A)
MSSRAGSILLRHAGSRLFTAAAISPAAASRPLLAGGNGVPAVMLRLMSTSSPAAPTEAKDEAAKASKVGGDKKAVVINSYWGIEQNNKLARDDGTEWKWTCFRPWETYTADTSIDLTRHHEPKTLMDKVAYWTVKSLRFPTDIFFQRRYGCRAMMLETVAAVPGMVGGMLLHLRSLRRFEQSGGWIRALLEEAENERMHLMTFMEVAKPRWYERALVITVQGVFFNAYFLGYLLSPKFAHRVVGYLEEEAIHSYTEYLKDLEAGKIENVPAPAIAIDYWRLPANATLKDVVTVVRADEAHHRDVNHFASDIHCQGMQLKQSPAPIGYH

SEQ ID NO: 28424 - protein, 286 aa, Zea mays subsp. mays
  peptide (1)..(286): Ceres Seq. ID no. 13492696
  misc_feature (9)..(284): Pfam Name: Pfam Description:  Alternative oxidase
  misc_feature (1)..(286): NCBI GI NO: 25989199 NR Description: alternative oxidase AOX2 precursor [Zea mays]
  misc_feature (1)..(286): NCBI GI NO: 3218544 NR Description: alternative oxidase
  misc_feature (1)..(286): NCBI GI NO: 19912725 NR Description: alternative oxidase [Triticum aestivum]
  misc_feature (1)..(286): NCBI GI NO: 16902306 NR Description: alternative oxidase 1c
  misc_feature (22)..(286): NCBI GI NO: 5802557 NR Description: alternative oxidase [Triticum aestivum]
  misc_feature (1)..(286): NCBI GI NO: 25989197 NR Description: alternative oxidase AOX1 precursor [Zea mays]
  misc_feature (6)..(286): NCBI GI NO: 19912727 NR Description: alternative oxidase [Triticum aestivum]
  misc_feature (1)..(286): NCBI GI NO: 1588565 NR Description: alternative oxidase 1
  misc_feature (15)..(286): NCBI GI NO: 421824 NR Description: alternative respiratory pathway oxidase (EC 1
  misc_feature (15)..(286): NCBI GI NO: 1872517 NR Description: alternative oxidase [Arabidopsis thaliana]
MLRLMSTSSPAAPTEAKDEAAKASKVGGDKKAVVINSYWGIEQNNKLARDDGTEWKWTCFRPWETYTADTSIDLTRHHEPKTLMDKVAYWTVKSLRFPTDIFFQRRYGCRAMMLETVAAVPGMVGGMLLHLRSLRRFEQSGGWIRALLEEAENERMHLMTFMEVAKPRWYERALVITVQGVFFNAYFLGYLLSPKFAHRVVGYLEEEAIHSYTEYLKDLEAGKIENVPAPAIAIDYWRLPANATLKDVVTVVRADEAHHRDVNHFASDIHCQGMQLKQSPAPIGYH

SEQ ID NO: 28425 - DNA, 1316 bp, Zea mays subsp. mays
  misc_feature (1)..(1316): Ceres Seq. ID no. 12347498
gagaggctcaggctgctcgtgatggcttggctcgcagacagacaggcagacagagagatatcaaaacatttgagggaaatgttatttgtgtatcactgtgcatgcagtacgcagtgagtaatgaatgaattctggtgtggccagcagatcgtgttcgagatcctggtgaggggtctgatcgggctggaggcaggcccggagatgcagcagctcaagcaccagttccaggaattcattgtcggcctcatgtccctccccatcaagctgccggggactaggctctacaggtccctccaggccaagaagaggatggccacgctgatacaggggatcatacaggagaagaggcggcggcggagggccgcccttgaggatggcggagagggcgagggcgaggccggtcccccgcgcgacgtcatcgacgtgctcataagcggcggcgacgagctcaccgacgagctcatatccgacaacatgatcgacctgatgatccccgccgaggactctgtgcccgtgctcatcacgctcgccgtcaagtatctcagcgagtgcccgcttgctctgcaacaacttgaggaggagaacatgcagctgaagaggcggaaaaccgacgtgggagagaccttgcagtggacggactacatgtcactgtcgttcacacaacatgtgataacggagacactgcggatggggaatatcatcaacgggatcatgcgcaaagcggtgcgggacgtggaggtgaaggggcacctcatccccaagggctggtgcgtgttcgtgtacttccggtcggtccacctcgacgacaagcgctacgacgagccctacaggttcaacccgtggaggtggaaggagaaggacacgagcaccatgggcttcaccccttttggcggtgggcagaggctgtgcccaggcctggatctggccaggctggaagcttccatctttctccatcacctggtgaccagcttcaggtgggtggcggaggaggaccacatcgtcaacttcccaaccgtgcggctcaagcgaggcatgcccgtcaggctcaccagcaaagactagctagctagtcactacgacctgcttgtgcatgccatgcatgcagatttcagtcacgtcatatgcaatatatattggaccctggaggttgcacgtgtacagaagagaggatgcaggagctagcagatgatcggaggtatttaggcagactgaaattgaatcgaccgcgaagagtagcacactactataccacgagtatgatctgtagtagtagtaataagaggaatataatatcattagtgtggtagtatttactg

SEQ ID NO: 28426 - protein, 313 aa, Zea mays subsp. mays
  peptide (1)..(313): Ceres Seq. ID no. 12347499
  misc_feature (8)..(313): NCBI GI NO: 34903584 NR Description: cytochrome P450-like protein
  misc_feature (10)..(307): NCBI GI NO: 18400142 NR Description: cytochrome P450, putative; protein id: At3g13730
  misc_feature (8)..(313): NCBI GI NO: 13878393 NR Description: Cytochrome P450 90C1 (ROTUNDIFOLIA3)
  misc_feature (8)..(313): NCBI GI NO: 18419825 NR Description: rotundifolia3 (rot3); protein id: At4g36380
  misc_feature (8)..(313): NCBI GI NO: 25282635 NR Description: cytochrome P450 like protein
  misc_feature (10)..(285): NCBI GI NO: 9294019 NR Description: cytochrome P450-like protein
  misc_feature (95)..(313): NCBI GI NO: 7484897 NR Description: cytochrome P450 homolog F23E13
  misc_feature (8)..(313): NCBI GI NO: 15239203 NR Description: cytochrome p450, putative; protein id: At5g05690
  misc_feature (8)..(313): NCBI GI NO: 9587211 NR Description: cytochrome P450 [Vigna radiata]
  misc_feature (16)..(309): NCBI GI NO: 27127269 NR Description: cytochrome P450
MNEFWCGQQIVFEILVRGLIGLEAGPEMQQLKHQFQEFIVGLMSLPIKLPGTRLYRSLQAKKRMATLIQGIIQEKRRRRRAALEDGGEGEGEAGPPRDVIDVLISGGDELTDELISDNMIDLMIPAEDSVPVLITLAVKYLSECPLALQQLEEENMQLKRRKTDVGETLQWTDYMSLSFTQHVITETLRMGNIINGIMRKAVRDVEVKGHLIPKGWCVFVYFRSVHLDDKRYDEPYRFNPWRWKEKDTSTMGFTPFGGGQRLCPGLDLARLEASIFLHHLVTSFRWVAEEDHIVNFPTVRLKRGMPVRLTSKD

SEQ ID NO: 28427 - protein, 286 aa, Zea mays subsp. mays
  peptide (1)..(286): Ceres Seq. ID no. 12347500
  misc_feature (1)..(286): NCBI GI NO: 34903584 NR Description: cytochrome P450-like protein
  misc_feature (1)..(280): NCBI GI NO: 18400142 NR Description: cytochrome P450, putative; protein id: At3g13730
  misc_feature (1)..(286): NCBI GI NO: 13878393 NR Description: Cytochrome P450 90C1 (ROTUNDIFOLIA3)
  misc_feature (1)..(286): NCBI GI NO: 25282635 NR Description: cytochrome P450 like protein
  misc_feature (1)..(286): NCBI GI NO: 18419825 NR Description: rotundifolia3 (rot3); protein id: At4g36380
  misc_feature (1)..(258): NCBI GI NO: 9294019 NR Description: cytochrome P450-like protein
  misc_feature (68)..(286): NCBI GI NO: 7484897 NR Description: cytochrome P450 homolog F23E13
  misc_feature (1)..(286): NCBI GI NO: 15239203 NR Description: cytochrome p450, putative; protein id: At5g05690
  misc_feature (1)..(286): NCBI GI NO: 9587211 NR Description: cytochrome P450 [Vigna radiata]
  misc_feature (1)..(282): NCBI GI NO: 27127269 NR Description: cytochrome P450
MQQLKHQFQEFIVGLMSLPIKLPGTRLYRSLQAKKRMATLIQGIIQEKRRRRRAALEDGGEGEGEAGPPRDVIDVLISGGDELTDELISDNMIDLMIPAEDSVPVLITLAVKYLSECPLALQQLEEENMQLKRRKTDVGETLQWTDYMSLSFTQHVITETLRMGNIINGIMRKAVRDVEVKGHLIPKGWCVFVYFRSVHLDDKRYDEPYRFNPWRWKEKDTSTMGFTPFGGGQRLCPGLDLARLEASIFLHHLVTSFRWVAEEDHIVNFPTVRLKRGMPVRLTSKD

SEQ ID NO: 28428 - protein, 271 aa, Zea mays subsp. mays
  peptide (1)..(271): Ceres Seq. ID no. 12347501
  misc_feature (1)..(271): NCBI GI NO: 34903584 NR Description: cytochrome P450-like protein
  misc_feature (1)..(265): NCBI GI NO: 18400142 NR Description: cytochrome P450, putative; protein id: At3g13730
  misc_feature (1)..(271): NCBI GI NO: 13878393 NR Description: Cytochrome P450 90C1 (ROTUNDIFOLIA3)
  misc_feature (1)..(271): NCBI GI NO: 25282635 NR Description: cytochrome P450 like protein
  misc_feature (1)..(271): NCBI GI NO: 18419825 NR Description: rotundifolia3 (rot3); protein id: At4g36380
  misc_feature (1)..(243): NCBI GI NO: 9294019 NR Description: cytochrome P450-like protein
  misc_feature (53)..(271): NCBI GI NO: 7484897 NR Description: cytochrome P450 homolog F23E13
  misc_feature (1)..(271): NCBI GI NO: 15239203 NR Description: cytochrome p450, putative; protein id: At5g05690
  misc_feature (1)..(271): NCBI GI NO: 9587211 NR Description: cytochrome P450 [Vigna radiata]
  misc_feature (1)..(267): NCBI GI NO: 27127269 NR Description: cytochrome P450
MSLPIKLPGTRLYRSLQAKKRMATLIQGIIQEKRRRRRAALEDGGEGEGEAGPPRDVIDVLISGGDELTDELISDNMIDLMIPAEDSVPVLITLAVKYLSECPLALQQLEEENMQLKRRKTDVGETLQWTDYMSLSFTQHVITETLRMGNIINGIMRKAVRDVEVKGHLIPKGWCVFVYFRSVHLDDKRYDEPYRFNPWRWKEKDTSTMGFTPFGGGQRLCPGLDLARLEASIFLHHLVTSFRWVAEEDHIVNFPTVRLKRGMPVRLTSKD

SEQ ID NO: 28429 - DNA, 1538 bp, Zea mays subsp. mays
  misc_feature (1)..(1538): Ceres Seq. ID no. 12346101
atcgtcaaactgcccgcggtccaaaatccaaaccctgcgagtgtatagaagaagaaccccccaccccatcgcaacccgcaatggtcgcggcggaagatccggaacacttcttcgccgcctcgccgccgctgcgcgacgctgccgttgtcgccgccagcctgcaggagttcgtcgcgcgcaattcgcacgcatcatcagacggcgtcgggcggcggcgcatcgtctgcgtcacgtcgggcgggaccacggtgccgctggagcagcgatgcgtgcgctacatcgacaacttcagctccggccaccgcggcgccgcgtccaccgagtatttcttaaaggctggctatgcggtcattttcgtccatcggcgagggagttgccagcctttctccaggttcctgcctgatgactcgtttctccacttctttgatgtcacaacatattcgaaggttcaagtggccgagtcccaggcaacggtggtaaagagagcaattggggattatcgcaaggctactgaaggaggctctctgctgaaactcccattcaccacgatatttgagtatcttcagttactgaagatggttgctacatccatgagctgtgtgggtctccacgggatgttctatctcgctgcagctgtgtctgacttctatgttccatgggatagcatggcaaaacataagatccagtcagccggaggcccactggatatgaagctcagccaggttccaaaaatgctccccgttctgcgcaaccattgggcccccttggccttctgcgtatccttcaagctggagacggatccagacattctagttcagaaagcagagacggctctgagcaagtacaggatggacgttgttgtggccaatctacttgcaacgtacaaggaggaggtcgtcatcatctcgaatggcaaaagcaacaccattcgaaggtgcagcaaaggcgaggatctggaggagcatatcatcaagctcctagagaagagccactccaagtttatttacagcagcacggaagggtgcagtaagaacgactacgaaaagcttataccgttaggcatcaaaagtctggcttaagggaaacattgatcggttctggagctcaaattaatagggaagccccatcagcactcttgtagtgtttggatggatggacgaggaaggatgaagagggatgggataggatcattctaagttgacccatgtttggtttggaggtctagagtcacggtcaaggaatatttttcaaaaatagtggatggggccatcccttaaaaaataagggatggagtcaactcagagttgatcccatcccatctctcgttgacaccgaaccaaacacatcataaagctctacatgcagtgtgtacatttgctggtaatgtatatgtaagcaggactaataggattgttctgttctcacacgcacacaaacacgccaccaaaaaagatggtccaaagttgtatgtatcgtttgctattcacctgttaattaatggctttgtaatcagaaatgattattgttcaaattgtttc

SEQ ID NO: 28430 - protein, 358 aa, Zea mays subsp. mays
  peptide (1)..(358): Ceres Seq. ID no. 12346102
  misc_feature (69)..(313): Pfam Name: Pfam Description:  DNA / pantothenate metabolism flavoprotein
  misc_feature (32)..(343): NCBI GI NO: 40253297 NR Description: putative Chain A
  misc_feature (36)..(337): NCBI GI NO: 30682728 NR Description: expressed protein [Arabidopsis thaliana]
  misc_feature (173)..(337): NCBI GI NO: 15241677 NR Description: putative protein; protein id: At5g02080.1
  misc_feature (49)..(150): NCBI GI NO: 15241677 NR Description: putative protein; protein id: At5g02080.1
  misc_feature (143)..(337): NCBI GI NO: 8778623 NR Description: F5O11.7 [Arabidopsis thaliana]
  misc_feature (36)..(124): NCBI GI NO: 8778623 NR Description: F5O11.7 [Arabidopsis thaliana]
  misc_feature (50)..(344): NCBI GI NO: 18255582 NR Description: RIKEN cDNA 6330579B17 gene [Mus musculus]
  misc_feature (50)..(334): NCBI GI NO: 34870890 NR Description: similar to RIKEN cDNA 6330579B17 gene
  misc_feature (15)..(239): NCBI GI NO: 32422077 NR Description: hypothetical protein [Neurospora crassa]
  misc_feature (234)..(310): NCBI GI NO: 32422077 NR Description: hypothetical protein [Neurospora crassa]
RQTARGPKSKPCECIEEEPPTPSQPAMVAAEDPEHFFAASPPLRDAAVVAASLQEFVARNSHASSDGVGRRRIVCVTSGGTTVPLEQRCVRYIDNFSSGHRGAASTEYFLKAGYAVIFVHRRGSCQPFSRFLPDDSFLHFFDVTTYSKVQVAESQATVVKRAIGDYRKATEGGSLLKLPFTTIFEYLQLLKMVATSMSCVGLHGMFYLAAAVSDFYVPWDSMAKHKIQSAGGPLDMKLSQVPKMLPVLRNHWAPLAFCVSFKLETDPDILVQKAETALSKYRMDVVVANLLATYKEEVVIISNGKSNTIRRCSKGEDLEEHIIKLLEKSHSKFIYSSTEGCSKNDYEKLIPLGIKSLA

SEQ ID NO: 28431 - protein, 332 aa, Zea mays subsp. mays
  peptide (1)..(332): Ceres Seq. ID no. 12346103
  misc_feature (43)..(287): Pfam Name: Pfam Description:  DNA / pantothenate metabolism flavoprotein
  misc_feature (6)..(317): NCBI GI NO: 40253297 NR Description: putative Chain A
  misc_feature (10)..(311): NCBI GI NO: 30682728 NR Description: expressed protein [Arabidopsis thaliana]
  misc_feature (147)..(311): NCBI GI NO: 15241677 NR Description: putative protein; protein id: At5g02080.1
  misc_feature (23)..(124): NCBI GI NO: 15241677 NR Description: putative protein; protein id: At5g02080.1
  misc_feature (117)..(311): NCBI GI NO: 8778623 NR Description: F5O11.7 [Arabidopsis thaliana]
  misc_feature (10)..(98): NCBI GI NO: 8778623 NR Description: F5O11.7 [Arabidopsis thaliana]
  misc_feature (24)..(318): NCBI GI NO: 18255582 NR Description: RIKEN cDNA 6330579B17 gene [Mus musculus]
  misc_feature (24)..(308): NCBI GI NO: 34870890 NR Description: similar to RIKEN cDNA 6330579B17 gene
  misc_feature (1)..(213): NCBI GI NO: 32422077 NR Description: hypothetical protein [Neurospora crassa]
  misc_feature (208)..(284): NCBI GI NO: 32422077 NR Description: hypothetical protein [Neurospora crassa]
MVAAEDPEHFFAASPPLRDAAVVAASLQEFVARNSHASSDGVGRRRIVCVTSGGTTVPLEQRCVRYIDNFSSGHRGAASTEYFLKAGYAVIFVHRRGSCQPFSRFLPDDSFLHFFDVTTYSKVQVAESQATVVKRAIGDYRKATEGGSLLKLPFTTIFEYLQLLKMVATSMSCVGLHGMFYLAAAVSDFYVPWDSMAKHKIQSAGGPLDMKLSQVPKMLPVLRNHWAPLAFCVSFKLETDPDILVQKAETALSKYRMDVVVANLLATYKEEVVIISNGKSNTIRRCSKGEDLEEHIIKLLEKSHSKFIYSSTEGCSKNDYEKLIPLGIKSLA

SEQ ID NO: 28432 - DNA, 1850 bp, Zea mays subsp. mays
  misc_feature (1)..(1850): Ceres Seq. ID no. 12349999
actttatttctcgcactgcacctgcacgcaacagagacgtactcattcaggcgatcgaatccatggagctcgtgctcactacacctgatctcccaaccccgctgctgctctccaccttaacgatagtgtccgtggtcgtatgctatgtcctcttctggaagcagcaggcggcggcgaggcgagcgccgctgccgcccgggccgaggggctggcccgtgctgggcaacctaccgcagctgggcgggaagactcaccagacgctgcacgagatgaccaaggtgtacggcccgctgctgcggctgcggttcggcagctccaccgtggtggtggccgggtcggcggccgtggcgcagcagttcctccgcgcccacgacgccaacttcagcagccgcccgcccaactccggcggcgagctcatggcgtacaactaccaggacgtggtgttcgcgccctacgggccccggtggcgcgcgatgcgcaaggtgtgcgccgtgaacctcttctccgcgcgcgcgctcgacgacgtccgcggcgtccgggagcgcgaggcggcgctcatggtgaggtcgctcgcggagcaggcccacggcggcctcgacgcgccgccggcggcggtgccggttggcaaggccatcaacgtgtgcacgacgaacgcgctctcgcgggcggccgttgggcggcgggtgttcgctgccgccggcggcgacgggggcgcgagggagttcaaggagatcgtgctcgaggtgatgcaggtgggcggggtgctcaacgtcggcgacttcgtgccggcgctccggtggctcgacccgcagggcgtggcggccaagatgaagaagctgcaccgccggttcgacgacatgatggacgagatcattgcaggttatagggaggccaggagggttgcggcagacggagaggagagcaaggatttgcttggcttgctgctgtcgatggttgacgagcggccgttcgacagcggggaagaagtcaggatcaccgaaaccgatgtcaaggcactcattttgaacctgttcgtggcagggaccgacacgacgtcgaccatagtggagtggtctctcgcagagctgatccgccacccggaaatcctgaggcaagcgcaggaggagatggacgcggtggccgggcgcgggaggctggtcacggagtcggacctccgaagcctcaccttcttcaacgcggtcatcaaggagacgttccgcctgcacccgtcgacgccgctctccctaccgcgcatggccgccgaggagtgcgaggtcgcgggctaccgcgtccccaggggctcggagctgctggtcaacgtgtggggcatcgcccgcgacccggcgctgtggcctgacccgctggagttccggccggccaggttcctgccgggcgggtcgcatgcggacgtggacgtcaaaggcgccgacttcgggctcatcccgttcggcgccggccggaggatctgcgccggcctcagctgggggctgcggatggtcacgctcaccagcgccaccctggtgcacgcgttcgactgggagttgccggcagggcagacgccggacaagctgaacatggaggaggccttcaccctcctgctgcagcgggctgttccgttagtggctcgtccagtacccaggctgctgccgtcggcgtatgagatcgcataggaaggctcgctcaagggcctcagcttggctgtatcaagcacgtacaatggcgtgaaagacgacgtgtgtatgtattgttgttcactttgttgacttttgtaaacactagtaaatgttcttgctatggctaatatctgtaacgaatttttatattttgacatgattacgcttctggcttgt

SEQ ID NO: 28433 - protein, 555 aa, Zea mays subsp. mays
  peptide (1)..(555): Ceres Seq. ID no. 12350000
  misc_feature (64)..(540): Pfam Name: Pfam Description:  Cytochrome P450
  misc_feature (29)..(555): NCBI GI NO: 37532594 NR Description: putative cytochrome 450
  misc_feature (40)..(553): NCBI GI NO: 12231880 NR Description: putative flavonoid 3'-hydroxylase
  misc_feature (38)..(552): NCBI GI NO: 27151498 NR Description: Flavonoid 3'-monooxygenase
  misc_feature (32)..(555): NCBI GI NO: 18148451 NR Description: flavonoid 3'-hydroxylase [Glycine max]
  misc_feature (32)..(554): NCBI GI NO: 12231886 NR Description: flavonoid 3'-hydroxylase [Matthiola incana]
  misc_feature (34)..(553): NCBI GI NO: 14278925 NR Description: flavonoid 3'-hydroxylase [Perilla frutescens]
  misc_feature (32)..(552): NCBI GI NO: 19910935 NR Description: flavonoid 3'-hydroxylase [Torenia hybrida]
  misc_feature (39)..(552): NCBI GI NO: 15241483 NR Description: flavonoid 3'-hydroxylase
  misc_feature (34)..(550): NCBI GI NO: 12231914 NR Description: flavonoid 3'-hydroxylase [Pelargonium x hortorum]
  misc_feature (28)..(552): NCBI GI NO: 15234517 NR Description: cytochrome p450, putative; protein id: At4g12310.1
FISRTAPARNRDVLIQAIESMELVLTTPDLPTPLLLSTLTIVSVVVCYVLFWKQQAAARRAPLPPGPRGWPVLGNLPQLGGKTHQTLHEMTKVYGPLLRLRFGSSTVVVAGSAAVAQQFLRAHDANFSSRPPNSGGELMAYNYQDVVFAPYGPRWRAMRKVCAVNLFSARALDDVRGVREREAALMVRSLAEQAHGGLDAPPAAVPVGKAINVCTTNALSRAAVGRRVFAAAGGDGGAREFKEIVLEVMQVGGVLNVGDFVPALRWLDPQGVAAKMKKLHRRFDDMMDEIIAGYREARRVAADGEESKDLLGLLLSMVDERPFDSGEEVRITETDVKALILNLFVAGTDTTSTIVEWSLAELIRHPEILRQAQEEMDAVAGRGRLVTESDLRSLTFFNAVIKETFRLHPSTPLSLPRMAAEECEVAGYRVPRGSELLVNVWGIARDPALWPDPLEFRPARFLPGGSHADVDVKGADFGLIPFGAGRRICAGLSWGLRMVTLTSATLVHAFDWELPAGQTPDKLNMEEAFTLLLQRAVPLVARPVPRLLPSAYEIA

SEQ ID NO: 28434 - protein, 535 aa, Zea mays subsp. mays
  peptide (1)..(535): Ceres Seq. ID no. 12350001
  misc_feature (44)..(520): Pfam Name: Pfam Description:  Cytochrome P450
  misc_feature (9)..(535): NCBI GI NO: 37532594 NR Description: putative cytochrome 450
  misc_feature (20)..(533): NCBI GI NO: 12231880 NR Description: putative flavonoid 3'-hydroxylase
  misc_feature (18)..(532): NCBI GI NO: 27151498 NR Description: Flavonoid 3'-monooxygenase
  misc_feature (12)..(535): NCBI GI NO: 18148451 NR Description: flavonoid 3'-hydroxylase [Glycine max]
  misc_feature (12)..(534): NCBI GI NO: 12231886 NR Description: flavonoid 3'-hydroxylase [Matthiola incana]
  misc_feature (14)..(533): NCBI GI NO: 14278925 NR Description: flavonoid 3'-hydroxylase [Perilla frutescens]
  misc_feature (12)..(532): NCBI GI NO: 19910935 NR Description: flavonoid 3'-hydroxylase [Torenia hybrida]
  misc_feature (19)..(532): NCBI GI NO: 15241483 NR Description: flavonoid 3'-hydroxylase
  misc_feature (14)..(530): NCBI GI NO: 12231914 NR Description: flavonoid 3'-hydroxylase [Pelargonium x hortorum]
  misc_feature (8)..(532): NCBI GI NO: 15234517 NR Description: cytochrome p450, putative; protein id: At4g12310.1
MELVLTTPDLPTPLLLSTLTIVSVVVCYVLFWKQQAAARRAPLPPGPRGWPVLGNLPQLGGKTHQTLHEMTKVYGPLLRLRFGSSTVVVAGSAAVAQQFLRAHDANFSSRPPNSGGELMAYNYQDVVFAPYGPRWRAMRKVCAVNLFSARALDDVRGVREREAALMVRSLAEQAHGGLDAPPAAVPVGKAINVCTTNALSRAAVGRRVFAAAGGDGGAREFKEIVLEVMQVGGVLNVGDFVPALRWLDPQGVAAKMKKLHRRFDDMMDEIIAGYREARRVAADGEESKDLLGLLLSMVDERPFDSGEEVRITETDVKALILNLFVAGTDTTSTIVEWSLAELIRHPEILRQAQEEMDAVAGRGRLVTESDLRSLTFFNAVIKETFRLHPSTPLSLPRMAAEECEVAGYRVPRGSELLVNVWGIARDPALWPDPLEFRPARFLPGGSHADVDVKGADFGLIPFGAGRRICAGLSWGLRMVTLTSATLVHAFDWELPAGQTPDKLNMEEAFTLLLQRAVPLVARPVPRLLPSAYEIA

SEQ ID NO: 28435 - protein, 466 aa, Zea mays subsp. mays
  peptide (1)..(466): Ceres Seq. ID no. 12350002
  misc_feature (1)..(451): Pfam Name: Pfam Description:  Cytochrome P450
  misc_feature (1)..(466): NCBI GI NO: 37532594 NR Description: putative cytochrome 450
  misc_feature (1)..(464): NCBI GI NO: 12231880 NR Description: putative flavonoid 3'-hydroxylase
  misc_feature (1)..(463): NCBI GI NO: 27151498 NR Description: Flavonoid 3'-monooxygenase
  misc_feature (1)..(466): NCBI GI NO: 18148451 NR Description: flavonoid 3'-hydroxylase [Glycine max]
  misc_feature (1)..(465): NCBI GI NO: 12231886 NR Description: flavonoid 3'-hydroxylase [Matthiola incana]
  misc_feature (1)..(464): NCBI GI NO: 14278925 NR Description: flavonoid 3'-hydroxylase [Perilla frutescens]
  misc_feature (1)..(463): NCBI GI NO: 19910935 NR Description: flavonoid 3'-hydroxylase [Torenia hybrida]
  misc_feature (1)..(463): NCBI GI NO: 15241483 NR Description: flavonoid 3'-hydroxylase
  misc_feature (1)..(461): NCBI GI NO: 12231914 NR Description: flavonoid 3'-hydroxylase [Pelargonium x hortorum]
  misc_feature (1)..(463): NCBI GI NO: 15234517 NR Description: cytochrome p450, putative; protein id: At4g12310.1
MTKVYGPLLRLRFGSSTVVVAGSAAVAQQFLRAHDANFSSRPPNSGGELMAYNYQDVVFAPYGPRWRAMRKVCAVNLFSARALDDVRGVREREAALMVRSLAEQAHGGLDAPPAAVPVGKAINVCTTNALSRAAVGRRVFAAAGGDGGAREFKEIVLEVMQVGGVLNVGDFVPALRWLDPQGVAAKMKKLHRRFDDMMDEIIAGYREARRVAADGEESKDLLGLLLSMVDERPFDSGEEVRITETDVKALILNLFVAGTDTTSTIVEWSLAELIRHPEILRQAQEEMDAVAGRGRLVTESDLRSLTFFNAVIKETFRLHPSTPLSLPRMAAEECEVAGYRVPRGSELLVNVWGIARDPALWPDPLEFRPARFLPGGSHADVDVKGADFGLIPFGAGRRICAGLSWGLRMVTLTSATLVHAFDWELPAGQTPDKLNMEEAFTLLLQRAVPLVARPVPRLLPSAYEIA

SEQ ID NO: 28436 - DNA, 1488 bp, Zea mays subsp. mays
  misc_feature (1)..(1488): Ceres Seq. ID no. 12373586
gcccttctcccctcccctcgtgcgttgacaaaaaagaaagtgaagtgaagaatcaaccaacaatggccggcggaatccaccgaccacaatgctgattttgtttgagccatctggactggactggaccctataaaaaacagatcagatctcccccaccctcgcttccccagcctgcaggttgtcgtcgccctcttcctcctccttcgctgttgctgttgctgttgcttccgcttccgccgccgccgccgcggaaatcaaactaatctgatcgagaccacaccgttccagagagatcccccaaacaaaaaaagagcacgggatcgaaatggagctcgacggcaagtacagcaaggaccagagcctcaaatgcgaatgcctcctcttcgacctcgatgacacactatacccgttcaactccggcattgctgccgacataaagaagaacatccaagactatatggtgcacaagctcggcgttgacgaggccataagcttggacctatgcgtcctcctctacaagcagtacggaaccaccatggctggcttgagggctgttgggtaccagtttgattacgatgactaccacagctttgttcatgggaggttgtcttatgacaaaatcaagcctgatcctgtgcttaggaacatcctcctcagcttacccattcgcaaacttgtgttcacaaacggtgacagaacacatgcttcaagggccctcaagaggcttggcattgaggattgtttcgaaggagtcgtgtgctttgagacactgaacccgacatctcctcctcctcctgtcccagctcaggaacttgaaatctttgatctaatgaagcatctggctcatccacagcccgcggtgcagctaccaaaatcacctatcctatgcaaaccgtcaagggaggccatgctgcaggctctcaaggtcgcctccattaatccacagacaactatattgttcgatgacagcttcaggaacattgaagctgcaaagcaaattggaatgtgtactgtcctggttggaacatctgagcggaaaaagggtgctgaccatgccttggaaagcctccacaacatgaaggaagcactgccggagctgtgggaggaagctgagaaggatgaagatgtgaggaattcgagcaaagccggaatcgagacatctgtgatcgcgtaatcttttttgttccttggttacaaatgtagccccttctgttttccttggaggacaacacgaggtggtggtgtatgaaaaaagaggagacctcctcaaggggtgggggggactgactgatactacgaccactgatgttacaccccgtaaactattactatccaataagaatgttttcttcttcaactatctaggatggtcattttgttggtgtttagttaaagcagctatccaatatttttttggatccaaatgtgtatgtcctcgctacttggttcttcatgcttatgaatgtggagtgatgatgtcctgttgcc

SEQ ID NO: 28437 - protein, 282 aa, Zea mays subsp. mays
  peptide (1)..(282): Ceres Seq. ID no. 12373587
  misc_feature (16)..(235): Pfam Name: Pfam Description:  haloacid dehalogenase-like hydrolase
  misc_feature (1)..(154): NCBI GI NO: 34906034 NR Description: P0518C01.30
  misc_feature (181)..(282): NCBI GI NO: 34906034 NR Description: P0518C01.30
  misc_feature (1)..(152): NCBI GI NO: 7406669 NR Description: putative ripening-related protein [Vitis vinifera]
  misc_feature (141)..(282): NCBI GI NO: 7406669 NR Description: putative ripening-related protein [Vitis vinifera]
  misc_feature (1)..(282): NCBI GI NO: 15241720 NR Description: putative protein; protein id: At5g02230
  misc_feature (1)..(282): NCBI GI NO: 21593165 NR Description: unknown [Arabidopsis thaliana]
  misc_feature (1)..(278): NCBI GI NO: 30697234 NR Description: haloacid dehalogenase-like hydrolase family
  misc_feature (1)..(278): NCBI GI NO: 30697236 NR Description: haloacid dehalogenase-like hydrolase family
  misc_feature (1)..(278): NCBI GI NO: 21618155 NR Description: putative ripening-related protein-like
  misc_feature (14)..(282): NCBI GI NO: 40714684 NR Description: expressed protein
MELDGKYSKDQSLKCECLLFDLDDTLYPFNSGIAADIKKNIQDYMVHKLGVDEAISLDLCVLLYKQYGTTMAGLRAVGYQFDYDDYHSFVHGRLSYDKIKPDPVLRNILLSLPIRKLVFTNGDRTHASRALKRLGIEDCFEGVVCFETLNPTSPPPPVPAQELEIFDLMKHLAHPQPAVQLPKSPILCKPSREAMLQALKVASINPQTTILFDDSFRNIEAAKQIGMCTVLVGTSERKKGADHALESLHNMKEALPELWEEAEKDEDVRNSSKAGIETSVIA

SEQ ID NO: 28438 - protein, 238 aa, Zea mays subsp. mays
  peptide (1)..(238): Ceres Seq. ID no. 12373588
  misc_feature (1)..(191): Pfam Name: Pfam Description:  haloacid dehalogenase-like hydrolase
  misc_feature (1)..(110): NCBI GI NO: 34906034 NR Description: P0518C01.30
  misc_feature (137)..(238): NCBI GI NO: 34906034 NR Description: P0518C01.30
  misc_feature (1)..(108): NCBI GI NO: 7406669 NR Description: putative ripening-related protein [Vitis vinifera]
  misc_feature (97)..(238): NCBI GI NO: 7406669 NR Description: putative ripening-related protein [Vitis vinifera]
  misc_feature (1)..(238): NCBI GI NO: 15241720 NR Description: putative protein; protein id: At5g02230
  misc_feature (1)..(238): NCBI GI NO: 21593165 NR Description: unknown [Arabidopsis thaliana]
  misc_feature (1)..(234): NCBI GI NO: 30697234 NR Description: haloacid dehalogenase-like hydrolase family
  misc_feature (1)..(234): NCBI GI NO: 30697236 NR Description: haloacid dehalogenase-like hydrolase family
  misc_feature (1)..(234): NCBI GI NO: 21618155 NR Description: putative ripening-related protein-like
  misc_feature (1)..(238): NCBI GI NO: 40714684 NR Description: expressed protein
MVHKLGVDEAISLDLCVLLYKQYGTTMAGLRAVGYQFDYDDYHSFVHGRLSYDKIKPDPVLRNILLSLPIRKLVFTNGDRTHASRALKRLGIEDCFEGVVCFETLNPTSPPPPVPAQELEIFDLMKHLAHPQPAVQLPKSPILCKPSREAMLQALKVASINPQTTILFDDSFRNIEAAKQIGMCTVLVGTSERKKGADHALESLHNMKEALPELWEEAEKDEDVRNSSKAGIETSVIA

SEQ ID NO: 28439 - protein, 212 aa, Zea mays subsp. mays
  peptide (1)..(212): Ceres Seq. ID no. 12373589
  misc_feature (1)..(165): Pfam Name: Pfam Description:  haloacid dehalogenase-like hydrolase
  misc_feature (1)..(84): NCBI GI NO: 34906034 NR Description: P0518C01.30
  misc_feature (111)..(212): NCBI GI NO: 34906034 NR Description: P0518C01.30
  misc_feature (1)..(82): NCBI GI NO: 7406669 NR Description: putative ripening-related protein [Vitis vinifera]
  misc_feature (71)..(212): NCBI GI NO: 7406669 NR Description: putative ripening-related protein [Vitis vinifera]
  misc_feature (1)..(212): NCBI GI NO: 15241720 NR Description: putative protein; protein id: At5g02230
  misc_feature (1)..(212): NCBI GI NO: 21593165 NR Description: unknown [Arabidopsis thaliana]
  misc_feature (1)..(208): NCBI GI NO: 30697234 NR Description: haloacid dehalogenase-like hydrolase family
  misc_feature (1)..(208): NCBI GI NO: 30697236 NR Description: haloacid dehalogenase-like hydrolase family
  misc_feature (1)..(208): NCBI GI NO: 21618155 NR Description: putative ripening-related protein-like
  misc_feature (1)..(212): NCBI GI NO: 40714684 NR Description: expressed protein
MAGLRAVGYQFDYDDYHSFVHGRLSYDKIKPDPVLRNILLSLPIRKLVFTNGDRTHASRALKRLGIEDCFEGVVCFETLNPTSPPPPVPAQELEIFDLMKHLAHPQPAVQLPKSPILCKPSREAMLQALKVASINPQTTILFDDSFRNIEAAKQIGMCTVLVGTSERKKGADHALESLHNMKEALPELWEEAEKDEDVRNSSKAGIETSVIA

SEQ ID NO: 28440 - DNA, 1301 bp, Zea mays subsp. mays
  misc_feature (1)..(1301): Ceres Seq. ID no. 12350982
ttgatggagtaccaaatttgccatacgtcgctccattttcctcctctgttcccaatgcttgtcgtattgtgcgttctttcatcgaggagttggtcagctacttgtcactcagcggtggcgtaaacgtctatgatgtggtgaaaagctacttagacaagttcttgattgagacgttgaatgatggttttctgaagctgatacatggtggatccctggaatttccacaggtggtgcagatcgcaggaaatatcgccgttctcgagcggtcctgcgacatgttcctttggcacgccgctcgactttgtggtgtccctaggtgcctcctcgagaagccccattctggattgagtgccagagctgtgctcaaagcctcccagaatgcagcatacaacggatcggttactttggtgaattccaagatcgacgagttcatgctgcagctgactagcatcaactggaccccggacgaagctccagagcacgccaacgactacatgaacgaggtgatcatctaccttcacgaggtggtctcttccgggcagcaggccgtgccaagggacgccctgttcaaggttgtatctggcgcgctgagccacatctcggactctatgacgacggtccttctcagtgaccgggtgaaaaggttcaacgcgaacgccgttgctagcatcgacgtcgatctgagggcgctggaggggttcgctgacgacacgtaccgcgtggccgggtttctggacctgagaaagggaaccagtttcagagagtgtctagccgaagtaaggcagctaacaaaccttctgctgagcaaccagcctgagagcttcgcgaaccctgcaacccgggagcagagctacggagccttagaccacaagaaggtggcgataatttgcgacaagttcaaggatgcccccgacagcctgtttgggagcctctcaggccggggcacggtgcagagcgcccggaagaagtccctggatgtgctgaagagaaggctaaaggattttagctagctggtgaactagatcatttagacaagctagtagcctagtacccctgttttagtgccagtcgtatccatttaaaatttcttttccgtctttctttattccctctttaatcgacttcccgtcccgtttcatgcgccgaagagaaggctgaaggattttagctggggttagctggtcgagctagatcgttaaataagctagtgctctgtttagggaagaagacaagtggttcggtgtgtaaagccatttcaaatttctttccatccttatttttactcccttaatctgcttcct

SEQ ID NO: 28441 - protein, 335 aa, Zea mays subsp. mays
  peptide (1)..(335): Ceres Seq. ID no. 12350983
  misc_feature (1)..(335): Pfam Name: Pfam Description:  Exocyst complex subunit Sec15-like
  misc_feature (3)..(335): NCBI GI NO: 37534338 NR Description: unknown protein
  misc_feature (1)..(335): NCBI GI NO: 34902596 NR Description: Unknown protein
  misc_feature (1)..(335): NCBI GI NO: 15228982 NR Description: putative protein; protein id: At3g56640.1
  misc_feature (3)..(335): NCBI GI NO: 18411920 NR Description: hypothetical protein; protein id: At4g02350.1
  misc_feature (1)..(335): NCBI GI NO: 34895194 NR Description: B1051E10.38
  misc_feature (7)..(288): NCBI GI NO: 40738643 NR Description: hypothetical protein AN6493.2
  misc_feature (41)..(298): NCBI GI NO: 32403180 NR Description: hypothetical protein [Neurospora crassa]
  misc_feature (1)..(55): NCBI GI NO: 34099886 NR Description: unknown protein [Glycine max]
DGVPNLPYVAPFSSSVPNACRIVRSFIEELVSYLSLSGGVNVYDVVKSYLDKFLIETLNDGFLKLIHGGSLEFPQVVQIAGNIAVLERSCDMFLWHAARLCGVPRCLLEKPHSGLSARAVLKASQNAAYNGSVTLVNSKIDEFMLQLTSINWTPDEAPEHANDYMNEVIIYLHEVVSSGQQAVPRDALFKVVSGALSHISDSMTTVLLSDRVKRFNANAVASIDVDLRALEGFADDTYRVAGFLDLRKGTSFRECLAEVRQLTNLLLSNQPESFANPATREQSYGALDHKKVAIICDKFKDAPDSLFGSLSGRGTVQSARKKSLDVLKRRLKDFS

SEQ ID NO: 28442 - protein, 244 aa, Zea mays subsp. mays
  peptide (1)..(244): Ceres Seq. ID no. 12350984
  misc_feature (1)..(244): Pfam Name: Pfam Description:  Exocyst complex subunit Sec15-like
  misc_feature (1)..(244): NCBI GI NO: 37534338 NR Description: unknown protein
  misc_feature (1)..(244): NCBI GI NO: 34902596 NR Description: Unknown protein
  misc_feature (1)..(244): NCBI GI NO: 15228982 NR Description: putative protein; protein id: At3g56640.1
  misc_feature (1)..(244): NCBI GI NO: 18411920 NR Description: hypothetical protein; protein id: At4g02350.1
  misc_feature (1)..(244): NCBI GI NO: 34895194 NR Description: B1051E10.38
  misc_feature (1)..(197): NCBI GI NO: 40738643 NR Description: hypothetical protein AN6493.2
  misc_feature (1)..(207): NCBI GI NO: 32403180 NR Description: hypothetical protein [Neurospora crassa]
MFLWHAARLCGVPRCLLEKPHSGLSARAVLKASQNAAYNGSVTLVNSKIDEFMLQLTSINWTPDEAPEHANDYMNEVIIYLHEVVSSGQQAVPRDALFKVVSGALSHISDSMTTVLLSDRVKRFNANAVASIDVDLRALEGFADDTYRVAGFLDLRKGTSFRECLAEVRQLTNLLLSNQPESFANPATREQSYGALDHKKVAIICDKFKDAPDSLFGSLSGRGTVQSARKKSLDVLKRRLKDFS

SEQ ID NO: 28443 - protein, 192 aa, Zea mays subsp. mays
  peptide (1)..(192): Ceres Seq. ID no. 12350985
  misc_feature (1)..(192): Pfam Name: Pfam Description:  Exocyst complex subunit Sec15-like
  misc_feature (1)..(192): NCBI GI NO: 37534338 NR Description: unknown protein
  misc_feature (1)..(192): NCBI GI NO: 34902596 NR Description: Unknown protein
  misc_feature (1)..(192): NCBI GI NO: 15228982 NR Description: putative protein; protein id: At3g56640.1
  misc_feature (1)..(192): NCBI GI NO: 18411920 NR Description: hypothetical protein; protein id: At4g02350.1
  misc_feature (1)..(192): NCBI GI NO: 34895194 NR Description: B1051E10.38
  misc_feature (1)..(145): NCBI GI NO: 40738643 NR Description: hypothetical protein AN6493.2
  misc_feature (1)..(155): NCBI GI NO: 32403180 NR Description: hypothetical protein [Neurospora crassa]
MLQLTSINWTPDEAPEHANDYMNEVIIYLHEVVSSGQQAVPRDALFKVVSGALSHISDSMTTVLLSDRVKRFNANAVASIDVDLRALEGFADDTYRVAGFLDLRKGTSFRECLAEVRQLTNLLLSNQPESFANPATREQSYGALDHKKVAIICDKFKDAPDSLFGSLSGRGTVQSARKKSLDVLKRRLKDFS

SEQ ID NO: 28444 - DNA, 939 bp, Zea mays subsp. mays
  misc_feature (1)..(939): Ceres Seq. ID no. 12408448
agttccatcttccgctcactcccttcatcgcgctcggcacacaggcgacggcggcggagctcatgctagggctctcagcgaaggcatcagctgcttcccctcccgcctctcgccaatcgcctcccgtcctccgcacaccggccggtgatcctgcgtcttttcattcgtaaatcatactccaggtatctgcatcgcaggggaaatggcaagcaaagcaggtggtgatggcaaagaagccataaacgagcaagtagttgccaacacttatgccaacatgcgtaccgaaatgaaccagctctataccaagatcacagagctggagatggaggtcagtgagcactccctcgtgattggtgcgatcgagccgctggacccctcaaggcgctgttacaggatgattggtggggtcctggttgaaaggaccatcaaggaagtcctgcctgctgtgaagcgcaacaaggagggccttgaagaagtgattgctcgcatgcatgaggcactggagaggaagaagaaagagatcaccgagtttgagcttaagtacaagatcaggatccggaaggctgacaatgacgcagaggacgaaggcggcaagaaggaaggcactgcacagggagtccttgttgggcctgctggacagtaaaacttaattagatggattttgtgtaaaagatgaggaccgatgtgaactgaagtagtttctttgttacctcttcgggtgctgcagcaatccaagtttctgtttgttattgatgacacatcgcaaatctcccaggactagaatctctgttcgtgattccttttactatattctcaaaataattgtggattagtcatctgcatgacttcatttcaactgatgctgaaatattgtggtgcttggtggctggtaaattcctgtaattgagctgtttcaatggcataccagcttgttgttcc

SEQ ID NO: 28445 - protein, 146 aa, Zea mays subsp. mays
  peptide (1)..(146): Ceres Seq. ID no. 12408449
  misc_feature (15)..(122): Pfam Name: Pfam Description:  KE2 family protein
  misc_feature (1)..(144): NCBI GI NO: 15228766 NR Description: prefoldin-like protein; protein id: At3g22480
  misc_feature (3)..(141): NCBI GI NO: 28189659 NR Description: similar to prefoldin subunit 2 [Bos taurus]
  misc_feature (3)..(141): NCBI GI NO: 12408675 NR Description: prefoldin 2 [Homo sapiens]
  misc_feature (15)..(141): NCBI GI NO: 5690431 NR Description: prefoldin subunit 2 [Homo sapiens]
  misc_feature (41)..(141): NCBI GI NO: 7106852 NR Description: HSPC231 [Homo sapiens]
  misc_feature (10)..(141): NCBI GI NO: 24662461 NR Description: CG6302-PA [Drosophila melanogaster]
  misc_feature (11)..(118): NCBI GI NO: 39595088 NR Description: Hypothetical protein CBG03668
MASKAGGDGKEAINEQVVANTYANMRTEMNQLYTKITELEMEVSEHSLVIGAIEPLDPSRRCYRMIGGVLVERTIKEVLPAVKRNKEGLEEVIARMHEALERKKKEITEFELKYKIRIRKADNDAEDEGGKKEGTAQGVLVGPAGQ

SEQ ID NO: 28446 - protein, 122 aa, Zea mays subsp. mays
  peptide (1)..(122): Ceres Seq. ID no. 12408450
  misc_feature (1)..(98): Pfam Name: Pfam Description:  KE2 family protein
  misc_feature (1)..(120): NCBI GI NO: 15228766 NR Description: prefoldin-like protein; protein id: At3g22480
  misc_feature (1)..(117): NCBI GI NO: 28189659 NR Description: similar to prefoldin subunit 2 [Bos taurus]
  misc_feature (1)..(117): NCBI GI NO: 12408675 NR Description: prefoldin 2 [Homo sapiens]
  misc_feature (1)..(117): NCBI GI NO: 5690431 NR Description: prefoldin subunit 2 [Homo sapiens]
  misc_feature (17)..(117): NCBI GI NO: 7106852 NR Description: HSPC231 [Homo sapiens]
  misc_feature (1)..(117): NCBI GI NO: 24662461 NR Description: CG6302-PA [Drosophila melanogaster]
  misc_feature (1)..(94): NCBI GI NO: 39595088 NR Description: Hypothetical protein CBG03668
MRTEMNQLYTKITELEMEVSEHSLVIGAIEPLDPSRRCYRMIGGVLVERTIKEVLPAVKRNKEGLEEVIARMHEALERKKKEITEFELKYKIRIRKADNDAEDEGGKKEGTAQGVLVGPAGQ

SEQ ID NO: 28447 - protein, 118 aa, Zea mays subsp. mays
  peptide (1)..(118): Ceres Seq. ID no. 12408451
  misc_feature (1)..(94): Pfam Name: Pfam Description:  KE2 family protein
  misc_feature (1)..(116): NCBI GI NO: 15228766 NR Description: prefoldin-like protein; protein id: At3g22480
  misc_feature (1)..(113): NCBI GI NO: 28189659 NR Description: similar to prefoldin subunit 2 [Bos taurus]
  misc_feature (1)..(113): NCBI GI NO: 12408675 NR Description: prefoldin 2 [Homo sapiens]
  misc_feature (1)..(113): NCBI GI NO: 5690431 NR Description: prefoldin subunit 2 [Homo sapiens]
  misc_feature (13)..(113): NCBI GI NO: 7106852 NR Description: HSPC231 [Homo sapiens]
  misc_feature (1)..(113): NCBI GI NO: 24662461 NR Description: CG6302-PA [Drosophila melanogaster]
  misc_feature (1)..(90): NCBI GI NO: 39595088 NR Description: Hypothetical protein CBG03668
MNQLYTKITELEMEVSEHSLVIGAIEPLDPSRRCYRMIGGVLVERTIKEVLPAVKRNKEGLEEVIARMHEALERKKKEITEFELKYKIRIRKADNDAEDEGGKKEGTAQGVLVGPAGQ

SEQ ID NO: 28448 - DNA, 1864 bp, Zea mays subsp. mays
  misc_feature (1)..(1864): Ceres Seq. ID no. 12407713
atcgtcattgcttgctccatgtggagtcactttattactgcattacactagctagctagctagccacagccagcttcatcttcacgtcgattcgatccatcggtgctgtgtgtaccgtacgccagcttgctgatccatcgccggccgacgatggaggtgagcacgtgggtgatgctggtggcggccgccgccgcggtacatggcgtggttctggcggctgtcgcgggggctcagcgggccgcgggtgtggccggtgctcggcagcctgccggggctggtgcagcacgccgaggacatgcacgagtggatcgtgggcaacctgcgccgcacgggaggcacctaccagacctgcatcttcgcggtgcccggggtggctcgccgcgggcgggctggtcacggtcacgtgcgaccctcgcaacctggagcacgtcctcaaggcgcgcttcgacaactaccccaagggccccttctggcacgccgtcttccgggacctgctcggcgacggcatcttcaactccgacggcgacacgtgggtggcgcagcgcaagacggccgcgctcgagttcaccacgcgcacgctacgcacggccatgtcccgctgggtgtcgcgctccatccacctcaggctgctgcccatcctggacgaggcggccaccgagaagacgcacgtcgacctccaggacctcctcctccgcctcaccttcgacaacatctgcggcctcgcgttcggcaaggaccccgagacgctcgcgccgggcctgccggagaacgcattcgccacggcgttcgaccgcgccacggaggcgacgctcaaccggttcatattccccgagtgcctgtggcggtgcaagaagtggctgggcctcggcatggagagcacgctggccccgcagcgtcgcgcacgtggaccagtacctcgccgccgtcatcaaggcgcgcaagcttgagctcgccggcaacggcaagtgcgacgcgccggcgcacgacgacctgctgtctcggttcatgcgcaagggctcctattcggacgagtcgctgcagcacgtggcgctcaacttcatcctcgccggccgcgacacctcctccgtggcgctctcctggttcttctggctcgtgtccacgcacccggacgtggagcgccagatcgtactcgagctgtgcgccgcgctcgccgcgtcccgcggctcccacgacccggcattgtggctggcgtcgccactcacgttcgaggagctggaccgcctggtctacctcaaggcggcgctctcggagaccctgcgcctgtacccgtccgttcccgaggactccaagcacgtcgtggccgacgactacctccccgacggcacgttcgtccccggcggggtcgtcggtgacctactccatctactcggccgggcgcatgaagacggtgtggggggaggactgcctcgagttccgccccgagcggtggttgtccgccgacggcacccggttcgagccgcacgactcgtaccggttcgtggcgttcaacgccgggccgaggatctgcctcggtaaggacctcgcgtacctgcagatgaagaacatcgccggcagcgtgctcctgcgccaccgcctggccgtcgcgcggggccaccgcgtggagcagaagatgtcgctgacgctgttcatgaagcacgggctccggatggaggtgcacccgcgcgacctggccccggtcatcgatgagctccgtggcgcgggcgcggcaaggccggccatggcgccatgctgcgcgtagaagatcccccctccgtgctgcgggggagacgctgggaattcaatgtgtagataagcgtacaagtacaagacaggagtaaagtaaaaattaaatgggtttggtgag

SEQ ID NO: 28449 - protein, 519 aa, Zea mays subsp. mays
  peptide (1)..(519): Ceres Seq. ID no. 12407714
  misc_feature (11)..(62): Pfam Name: Pfam Description:  Cytochrome P450
  misc_feature (364)..(519): NCBI GI NO: 10442763 NR Description: cytochrome P450 [Triticum aestivum]
  misc_feature (1)..(62): NCBI GI NO: 10442763 NR Description: cytochrome P450 [Triticum aestivum]
  misc_feature (364)..(517): NCBI GI NO: 38345840 NR Description: OSJNBa0084K11.4
  misc_feature (364)..(504): NCBI GI NO: 15236789 NR Description: cytochrome p450, putative; protein id: At4g00360
  misc_feature (1)..(61): NCBI GI NO: 15236789 NR Description: cytochrome p450, putative; protein id: At4g00360
  misc_feature (364)..(504): NCBI GI NO: 18650607 NR Description: AT4g00360/A_IG005I10_21 [Arabidopsis thaliana]
  misc_feature (1)..(61): NCBI GI NO: 18650607 NR Description: AT4g00360/A_IG005I10_21 [Arabidopsis thaliana]
  misc_feature (364)..(504): NCBI GI NO: 15223436 NR Description: cytochrome P450, putative; protein id: At1g01600.1
  misc_feature (1)..(61): NCBI GI NO: 15223436 NR Description: cytochrome P450, putative; protein id: At1g01600.1
  misc_feature (364)..(504): NCBI GI NO: 26449891 NR Description: unknown protein [Arabidopsis thaliana]
MAWFWRLSRGLSGPRVWPVLGSLPGLVQHAEDMHEWIVGNLRRTGGTYQTCIFAVPGVARRGRAGHGHVRPSQPGARPQGALRQLPQGPLLARRLPGPARRRHLQLRRRHVGGAAQDGRARVHHAHATHGHVPLGVALHPPQAAAHPGRGGHREDARRPPGPPPPPHLRQHLRPRVRQGPRDARAGPAGERIRHGVRPRHGGDAQPVHIPRVPVAVQEVAGPRHGEHAGPAASRTWTSTSPPSSRRASLSSPATASATRRRTTTCCLGSCARAPIRTSRCSTWRSTSSSPAATPPPWRSPGSSGSCPRTRTWSARSYSSCAPRSPRPAAPTTRHCGWRRHSRSRSWTAWSTSRRRSRRPCACTRPFPRTPSTSWPTTTSPTARSSPAGSSVTYSIYSAGRMKTVWGEDCLEFRPERWLSADGTRFEPHDSYRFVAFNAGPRICLGKDLAYLQMKNIAGSVLLRHRLAVARGHRVEQKMSLTLFMKHGLRMEVHPRDLAPVIDELRGAGAARPAMAPCCA

SEQ ID NO: 28450 - protein, 487 aa, Zea mays subsp. mays
  peptide (1)..(487): Ceres Seq. ID no. 12407715
  misc_feature (332)..(460): Pfam Name: Pfam Description:  Cytochrome P450
  misc_feature (332)..(487): NCBI GI NO: 10442763 NR Description: cytochrome P450 [Triticum aestivum]
  misc_feature (1)..(30): NCBI GI NO: 10442763 NR Description: cytochrome P450 [Triticum aestivum]
  misc_feature (332)..(485): NCBI GI NO: 38345840 NR Description: OSJNBa0084K11.4
  misc_feature (332)..(472): NCBI GI NO: 15236789 NR Description: cytochrome p450, putative; protein id: At4g00360
  misc_feature (1)..(29): NCBI GI NO: 15236789 NR Description: cytochrome p450, putative; protein id: At4g00360
  misc_feature (332)..(472): NCBI GI NO: 18650607 NR Description: AT4g00360/A_IG005I10_21 [Arabidopsis thaliana]
  misc_feature (1)..(29): NCBI GI NO: 18650607 NR Description: AT4g00360/A_IG005I10_21 [Arabidopsis thaliana]
  misc_feature (332)..(472): NCBI GI NO: 15223436 NR Description: cytochrome P450, putative; protein id: At1g01600.1
  misc_feature (1)..(29): NCBI GI NO: 15223436 NR Description: cytochrome P450, putative; protein id: At1g01600.1
  misc_feature (332)..(472): NCBI GI NO: 26449891 NR Description: unknown protein [Arabidopsis thaliana]
MHEWIVGNLRRTGGTYQTCIFAVPGVARRGRAGHGHVRPSQPGARPQGALRQLPQGPLLARRLPGPARRRHLQLRRRHVGGAAQDGRARVHHAHATHGHVPLGVALHPPQAAAHPGRGGHREDARRPPGPPPPPHLRQHLRPRVRQGPRDARAGPAGERIRHGVRPRHGGDAQPVHIPRVPVAVQEVAGPRHGEHAGPAASRTWTSTSPPSSRRASLSSPATASATRRRTTTCCLGSCARAPIRTSRCSTWRSTSSSPAATPPPWRSPGSSGSCPRTRTWSARSYSSCAPRSPRPAAPTTRHCGWRRHSRSRSWTAWSTSRRRSRRPCACTRPFPRTPSTSWPTTTSPTARSSPAGSSVTYSIYSAGRMKTVWGEDCLEFRPERWLSADGTRFEPHDSYRFVAFNAGPRICLGKDLAYLQMKNIAGSVLLRHRLAVARGHRVEQKMSLTLFMKHGLRMEVHPRDLAPVIDELRGAGAARPAMAPCCA

SEQ ID NO: 28451 - protein, 461 aa, Zea mays subsp. mays
  peptide (1)..(461): Ceres Seq. ID no. 12407716
  misc_feature (248)..(404): Pfam Name: Pfam Description:  Cytochrome P450
  misc_feature (248)..(404): NCBI GI NO: 10442763 NR Description: cytochrome P450 [Triticum aestivum]
  misc_feature (247)..(404): NCBI GI NO: 38345840 NR Description: OSJNBa0084K11.4
  misc_feature (247)..(404): NCBI GI NO: 15236789 NR Description: cytochrome p450, putative; protein id: At4g00360
  misc_feature (247)..(404): NCBI GI NO: 18650607 NR Description: AT4g00360/A_IG005I10_21 [Arabidopsis thaliana]
  misc_feature (247)..(404): NCBI GI NO: 15223436 NR Description: cytochrome P450, putative; protein id: At1g01600.1
  misc_feature (247)..(404): NCBI GI NO: 26449891 NR Description: unknown protein [Arabidopsis thaliana]
  misc_feature (247)..(404): NCBI GI NO: 15225914 NR Description: cytochrome P450, putative; protein id: At2g45970
  misc_feature (247)..(404): NCBI GI NO: 15222515 NR Description: cytochrome P450, putative; protein id: At1g63710
  misc_feature (247)..(404): NCBI GI NO: 21593258 NR Description: putative cytochrome P450 [Arabidopsis thaliana]
  misc_feature (247)..(415): NCBI GI NO: 15237768 NR Description: cytochrome p450 family; protein id: At5g58860
MEVSTWVMLVAAAAAVHGVVLAAVAGAQRAAGVAGARQPAGAGAARRGHARVDRGQPAPHGRHLPDLHLRGARGGSPRAGWSRSRATLATWSTSSRRASTTTPRAPSGTPSSGTCSATASSTPTATRGWRSARRPRSSSPRARYARPCPAGCRAPSTSGCCPSWTRRPPRRRTSTSRTSSSASPSTTSAASRSARTPRRSRRACRRTHSPRRSTAPRRRRSTGSYSPSACGGARSGWASAWRARWPRSVAHVDQYLAAVIKARKLELAGNGKCDAPAHDDLLSRFMRKGSYSDESLQHVALNFILAGRDTSSVALSWFFWLVSTHPDVERQIVLELCAALAASRGSHDPALWLASPLTFEELDRLVYLKAALSETLRLYPSVPEDSKHVVADDYLPDGTFVPGGVVGDLLHLLGRAHEDGVGGGLPRVPPRAVVVRRRHPVRAARLVPVRGVQRRAEDLPR

SEQ ID NO: 28452 - DNA, 1234 bp, Zea mays subsp. mays
  misc_feature (1)..(1234): Ceres Seq. ID no. 12340896
accgcttccggttccggatccgaatctcgccctcccctctctttcttgcctccaggtccggccgtccgggcggcgccgggaggagagaatggcctccacggcgtcgccgccggtgttcgagagggtggccgggatccgagccattgccgagtccggccgcttcaaggcatggttgctggaccagtttggcgttcttcatgacgggaagaagccgtaccccggcgccattctggcattggagaagctagcggagaatggggcaaagatggtgataatcagcaattcctctaggcggtcatctgtgacaatgaagaagctcaagagcctggggttcgacacgtcctgtttcctcgcgaccatcaccagtggggagctcacacatcagcaccttcagaagagagacgacccatggtttgctgctcttggaaggaagtgtatccatatcacttgggacgatcgaggggcaatttctctcgagggccttggtttgcaagttgtgaacaatgttgatgatgcagagttcatattagcccacggtactgaagctcttggctcaccttctggtgttcctcttcccaaaagtcttgaggagcttgagcaggttctaatgcttggcatagaaaagcgacttccaatggtggtagctaatccagattatgtcactgtcgaagctcgagatctccgtgtcatgcctggcactctggcagctaaatatgagagtcttggtggtgaagtgaaatggatggggaagcctgataaggtgatctatacatcagcgatgtccctagcgggcgttgatgcccgtgaatgtatcatggtgggtgattcgctgcaccacgacatcaaaggagccaatgcgtcagggatggcatccgcgttcgtcactggaggggtccatgcggacgaacttggactcggtgaatttggagaaactgctggggaggatgctgtcagttcgctgtgcagcaagcacggatcgtacccttcttatgttctgccttcattcgcgtggtagagatgcggcctagattttttttttttgttttaggtgcacgggaaagtgattttaggcagatattgttgttatggaaataagtgccacgcaatgatcaagccgctggaggtgtcattcttcttaataaataataagtgacacgcaatgctcaagccgctggaggcagatttgtatttgcatttgtagtgtgtgtgtgtctatatatgctgcctgtggtgt

SEQ ID NO: 28453 - protein, 337 aa, Zea mays subsp. mays
  peptide (1)..(337): Ceres Seq. ID no. 12340897
  misc_feature (54)..(297): Pfam Name: Pfam Description:  haloacid dehalogenase-like hydrolase
  misc_feature (44)..(337): NCBI GI NO: 19310550 NR Description: unknown protein [Arabidopsis thaliana]
  misc_feature (103)..(335): NCBI GI NO: 15238168 NR Description: putative protein; protein id: At5g10460.1
  misc_feature (41)..(337): NCBI GI NO: 23014406 NR Description: hypothetical protein
  misc_feature (30)..(337): NCBI GI NO: 22968911 NR Description: hypothetical protein [Rhodospirillum rubrum]
  misc_feature (35)..(301): NCBI GI NO: 13473111 NR Description: hypothetical protein [Mesorhizobium loti]
  misc_feature (38)..(298): NCBI GI NO: 15965982 NR Description: CONSERVED HYPOTHETICAL PROTEIN
  misc_feature (42)..(302): NCBI GI NO: 36958658 NR Description: HAD superfamily protein involved in N-acetyl-glucosamine catabolism
  misc_feature (152)..(336): NCBI GI NO: 15964548 NR Description: CONSERVED HYPOTHETICAL PROTEIN
  misc_feature (41)..(179): NCBI GI NO: 15964548 NR Description: CONSERVED HYPOTHETICAL PROTEIN
  misc_feature (58)..(307): NCBI GI NO: 27382589 NR Description: blr7478 [Bradyrhizobium japonicum]
PLPVPDPNLALPSLSCLQVRPSGRRREERMASTASPPVFERVAGIRAIAESGRFKAWLLDQFGVLHDGKKPYPGAILALEKLAENGAKMVIISNSSRRSSVTMKKLKSLGFDTSCFLATITSGELTHQHLQKRDDPWFAALGRKCIHITWDDRGAISLEGLGLQVVNNVDDAEFILAHGTEALGSPSGVPLPKSLEELEQVLMLGIEKRLPMVVANPDYVTVEARDLRVMPGTLAAKYESLGGEVKWMGKPDKVIYTSAMSLAGVDARECIMVGDSLHHDIKGANASGMASAFVTGGVHADELGLGEFGETAGEDAVSSLCSKHGSYPSYVLPSFAW

SEQ ID NO: 28454 - protein, 308 aa, Zea mays subsp. mays
  peptide (1)..(308): Ceres Seq. ID no. 12340898
  misc_feature (25)..(268): Pfam Name: Pfam Description:  haloacid dehalogenase-like hydrolase
  misc_feature (15)..(308): NCBI GI NO: 19310550 NR Description: unknown protein [Arabidopsis thaliana]
  misc_feature (74)..(306): NCBI GI NO: 15238168 NR Description: putative protein; protein id: At5g10460.1
  misc_feature (12)..(308): NCBI GI NO: 23014406 NR Description: hypothetical protein
  misc_feature (1)..(308): NCBI GI NO: 22968911 NR Description: hypothetical protein [Rhodospirillum rubrum]
  misc_feature (6)..(272): NCBI GI NO: 13473111 NR Description: hypothetical protein [Mesorhizobium loti]
  misc_feature (9)..(269): NCBI GI NO: 15965982 NR Description: CONSERVED HYPOTHETICAL PROTEIN
  misc_feature (13)..(273): NCBI GI NO: 36958658 NR Description: HAD superfamily protein involved in N-acetyl-glucosamine catabolism
  misc_feature (123)..(307): NCBI GI NO: 15964548 NR Description: CONSERVED HYPOTHETICAL PROTEIN
  misc_feature (12)..(150): NCBI GI NO: 15964548 NR Description: CONSERVED HYPOTHETICAL PROTEIN
  misc_feature (29)..(278): NCBI GI NO: 27382589 NR Description: blr7478 [Bradyrhizobium japonicum]
MASTASPPVFERVAGIRAIAESGRFKAWLLDQFGVLHDGKKPYPGAILALEKLAENGAKMVIISNSSRRSSVTMKKLKSLGFDTSCFLATITSGELTHQHLQKRDDPWFAALGRKCIHITWDDRGAISLEGLGLQVVNNVDDAEFILAHGTEALGSPSGVPLPKSLEELEQVLMLGIEKRLPMVVANPDYVTVEARDLRVMPGTLAAKYESLGGEVKWMGKPDKVIYTSAMSLAGVDARECIMVGDSLHHDIKGANASGMASAFVTGGVHADELGLGEFGETAGEDAVSSLCSKHGSYPSYVLPSFAW

SEQ ID NO: 28455 - protein, 249 aa, Zea mays subsp. mays
  peptide (1)..(249): Ceres Seq. ID no. 12340899
  misc_feature (1)..(209): Pfam Name: Pfam Description:  haloacid dehalogenase-like hydrolase
  misc_feature (1)..(249): NCBI GI NO: 19310550 NR Description: unknown protein [Arabidopsis thaliana]
  misc_feature (15)..(247): NCBI GI NO: 15238168 NR Description: putative protein; protein id: At5g10460.1
  misc_feature (1)..(249): NCBI GI NO: 23014406 NR Description: hypothetical protein
  misc_feature (1)..(249): NCBI GI NO: 22968911 NR Description: hypothetical protein [Rhodospirillum rubrum]
  misc_feature (1)..(213): NCBI GI NO: 13473111 NR Description: hypothetical protein [Mesorhizobium loti]
  misc_feature (1)..(210): NCBI GI NO: 15965982 NR Description: CONSERVED HYPOTHETICAL PROTEIN
  misc_feature (1)..(214): NCBI GI NO: 36958658 NR Description: HAD superfamily protein involved in N-acetyl-glucosamine catabolism
  misc_feature (64)..(248): NCBI GI NO: 15964548 NR Description: CONSERVED HYPOTHETICAL PROTEIN
  misc_feature (1)..(91): NCBI GI NO: 15964548 NR Description: CONSERVED HYPOTHETICAL PROTEIN
  misc_feature (1)..(219): NCBI GI NO: 27382589 NR Description: blr7478 [Bradyrhizobium japonicum]
MVIISNSSRRSSVTMKKLKSLGFDTSCFLATITSGELTHQHLQKRDDPWFAALGRKCIHITWDDRGAISLEGLGLQVVNNVDDAEFILAHGTEALGSPSGVPLPKSLEELEQVLMLGIEKRLPMVVANPDYVTVEARDLRVMPGTLAAKYESLGGEVKWMGKPDKVIYTSAMSLAGVDARECIMVGDSLHHDIKGANASGMASAFVTGGVHADELGLGEFGETAGEDAVSSLCSKHGSYPSYVLPSFAW

SEQ ID NO: 28456 - DNA, 380 bp, Zea mays subsp. mays
  misc_feature (1)..(380): Ceres Seq. ID no. 12387203
gagcttgcgaccccaccgacacacacagcagggaagcgaggggaaggagaggcaaggcggcgcggccagcggcccaggatatctgcgcgtgcgatcccgaggaggcgtcggcgaggtgggatgatatcgcagttcttcgttctgtcgcagcgcggcgaccacatcgtcttccgcgactatcgcggcgaggtgcccaagggaagcgcggagatcttcttccggaaggtcaagttctggaacgacgacgaggcagaggaggcgcccccggtcttcaatgtcgatggggttaactatattcatgtcaaagtcgctggactattttttgtggtaaccacaatggttaatgtctccccatcccttctcttggagcttcttcaaag

SEQ ID NO: 28457 - protein, 126 aa, Zea mays subsp. mays
  peptide (1)..(126): Ceres Seq. ID no. 12387204
  misc_feature (41)..(125): NCBI GI NO: 33146629 NR Description: putative clathrin-adaptor medium chain apm 4
  misc_feature (41)..(125): NCBI GI NO: 34906796 NR Description: contains EST D40457
  misc_feature (41)..(125): NCBI GI NO: 15233859 NR Description: clathrin coat assembly like protein
  misc_feature (41)..(125): NCBI GI NO: 30686572 NR Description: clathrin coat assembly like protein
  misc_feature (41)..(125): NCBI GI NO: 23508393 NR Description: clathrin coat assembly protein, putative
  misc_feature (41)..(125): NCBI GI NO: 23481746 NR Description: clathrin coat assembly like protein
  misc_feature (41)..(125): NCBI GI NO: 12000361 NR Description: clathrin-adaptor medium chain apm 4
  misc_feature (41)..(125): NCBI GI NO: 5442366 NR Description: adaptor-related protein complex AP-4 mu4 subunit
  misc_feature (41)..(125): NCBI GI NO: 13431270 NR Description: Adapter-related protein complex 4 mu 1 subunit
  misc_feature (41)..(125): NCBI GI NO: 14917111 NR Description: adaptor-related protein complex 4, mu 1 subunit
ELATPPTHTAGKRGEGEARRRGQRPRISARAIPRRRRRGGMISQFFVLSQRGDHIVFRDYRGEVPKGSAEIFFRKVKFWNDDEAEEAPPVFNVDGVNYIHVKVAGLFFVVTTMVNVSPSLLLELLQ

SEQ ID NO: 28458 - protein, 95 aa, Zea mays subsp. mays
  peptide (1)..(95): Ceres Seq. ID no. 12387205
ACDPTDTHSREARGRRGKAARPAAQDICACDPEEASARWDDIAVLRSVAARRPHRLPRLSRRGAQGKRGDLLPEGQVLERRRGRGGAPGLQCRWG

SEQ ID NO: 28459 - protein, 86 aa, Zea mays subsp. mays
  peptide (1)..(86): Ceres Seq. ID no. 12387206
  misc_feature (1)..(85): NCBI GI NO: 33146629 NR Description: putative clathrin-adaptor medium chain apm 4
  misc_feature (1)..(85): NCBI GI NO: 34906796 NR Description: contains EST D40457
  misc_feature (1)..(85): NCBI GI NO: 15233859 NR Description: clathrin coat assembly like protein
  misc_feature (1)..(85): NCBI GI NO: 30686572 NR Description: clathrin coat assembly like protein
  misc_feature (1)..(85): NCBI GI NO: 23508393 NR Description: clathrin coat assembly protein, putative
  misc_feature (1)..(85): NCBI GI NO: 23481746 NR Description: clathrin coat assembly like protein
  misc_feature (1)..(85): NCBI GI NO: 12000361 NR Description: clathrin-adaptor medium chain apm 4
  misc_feature (1)..(85): NCBI GI NO: 5442366 NR Description: adaptor-related protein complex AP-4 mu4 subunit
  misc_feature (1)..(85): NCBI GI NO: 13431270 NR Description: Adapter-related protein complex 4 mu 1 subunit
  misc_feature (1)..(85): NCBI GI NO: 14917111 NR Description: adaptor-related protein complex 4, mu 1 subunit
MISQFFVLSQRGDHIVFRDYRGEVPKGSAEIFFRKVKFWNDDEAEEAPPVFNVDGVNYIHVKVAGLFFVVTTMVNVSPSLLLELLQ

SEQ ID NO: 28460 - DNA, 1591 bp, Zea mays subsp. mays
  misc_feature (1)..(1591): Ceres Seq. ID no. 12595094
tcattcggcctatcacaaccacttactctcgtgcgctctccgtgggagcgaggactcgcggccggcggcagcggcaggttctcctagatctccggcatcatcagtaacaaatggctgacggtgaggacattcagccccttgtttgtgacaatggaactggcatggtcaaggctggttttgctggtgacgatgcgccaagggctgttttcccaagcattgtcggacgcccccgtcacactggtgtgatggttggcatggggcagaaggatgcgtatgttggtgacgaggcccagtccaagaggggtatcctgactttgaagtaccccatcgaacatggtattgttagcaattgggatgacatggagaagatctggcaccacaccttctataatgaactccgtgtggcgcctgaagagcaccctgtgctgctgacggaagccccactcaaccccaaagctaacagggagaagatgacccaaatcatgtttgagaccttcaatgttcctgccatgtatgtcgccatccaggctgtgctttccctgtacgccagtgggcgtacaactggtattgtgttggactctggtgatggtgtcagccacaccgtgccaatctacgaaggttatgcccttcctcatgccatcctgcgtcttgaccttgctgggcgtgacctgactgacagcctgatgaagatcctcaccgagagaggttactccttcaccaccacggccgaacgggaaatcgtacgggacatcaaggaaaagcttgcatacgtggctcttgactatgatcaggagctggagaacgccaagagcagctcatctgtggagaagagctacgagctgcctgatggccaggtgatcaccattggggcggagaggttccgatgccccgaggtcctcttccagccttccttcattggtatggaagctcctggcatccatgagaccacctacaactccatcatgaaatgcgacgtggatatcaggaaggacttgtatggtaacattgttctcagtggtggcacaaccatgttccctggcatcgctgaccgtatgagcaaggagatcaccgcccttgccccgagcagcatgaaaatcaaggtggtggctccacccgagaggaaatacagtgtctggataggagggtccatccttgcctccctgagcaccttccaacagatgtggatctcaaaggctgagtacgatgagtcaggaccagcgattgttcaccggaagtgcttctaagctcaagggcccccttcgtccccattctatgtattcctttccttgagtgcttttcttataagctactatgtttgagattgccggcctttgagcaggcaatgttgttggatctgtatcttgtggatcactacaatgcatgcgttgctccatcttcttttcatgccaagtttgctgtcatacttgctagtggggaaaacaacaatgacaacagtggtgagaacagcaaccacaaaaaaagagaggatggaaattattgaagttcctaggatcgtattgtaactgtacttgtgcgagtaacattattggttctctttgtatatccatctctgagacatgcaattcttttt

SEQ ID NO: 28461 - protein, 377 aa, Zea mays subsp. mays
  peptide (1)..(377): Ceres Seq. ID no. 12595095
  misc_feature (1)..(377): Pfam Name: Pfam Description:  Actin
  misc_feature (1)..(377): NCBI GI NO: 9965319 NR Description: actin [Setaria italica]
  misc_feature (1)..(377): NCBI GI NO: 15076949 NR Description: actin [Musa x paradisiaca]
  misc_feature (1)..(377): NCBI GI NO: 15242516 NR Description: ACTIN 2/7 (sp|P53492); protein id: At5g09810
  misc_feature (1)..(377): NCBI GI NO: 24496452 NR Description: actin [Hordeum vulgare]
  misc_feature (1)..(377): NCBI GI NO: 37535954 NR Description: actin [Oryza sativa (japonica cultivar-group)]
  misc_feature (1)..(377): NCBI GI NO: 11276972 NR Description: actin [imported] - rape
  misc_feature (1)..(377): NCBI GI NO: 7960247 NR Description: actin-like protein [Phalaenopsis sp. 'True Lady']
  misc_feature (1)..(377): NCBI GI NO: 28301928 NR Description: actin [Oryza sativa (japonica cultivar-group)]
  misc_feature (1)..(377): NCBI GI NO: 11276968 NR Description: actin [imported] - Picea rubens
  misc_feature (1)..(362): NCBI GI NO: 11276980 NR Description: actin (ACT3) - Arabidopsis thaliana
MADGEDIQPLVCDNGTGMVKAGFAGDDAPRAVFPSIVGRPRHTGVMVGMGQKDAYVGDEAQSKRGILTLKYPIEHGIVSNWDDMEKIWHHTFYNELRVAPEEHPVLLTEAPLNPKANREKMTQIMFETFNVPAMYVAIQAVLSLYASGRTTGIVLDSGDGVSHTVPIYEGYALPHAILRLDLAGRDLTDSLMKILTERGYSFTTTAEREIVRDIKEKLAYVALDYDQELENAKSSSSVEKSYELPDGQVITIGAERFRCPEVLFQPSFIGMEAPGIHETTYNSIMKCDVDIRKDLYGNIVLSGGTTMFPGIADRMSKEITALAPSSMKIKVVAPPERKYSVWIGGSILASLSTFQQMWISKAEYDESGPAIVHRKCF

SEQ ID NO: 28462 - protein, 360 aa, Zea mays subsp. mays
  peptide (1)..(360): Ceres Seq. ID no. 12595096
  misc_feature (1)..(360): Pfam Name: Pfam Description:  Actin
  misc_feature (1)..(360): NCBI GI NO: 9965319 NR Description: actin [Setaria italica]
  misc_feature (1)..(360): NCBI GI NO: 15076949 NR Description: actin [Musa x paradisiaca]
  misc_feature (1)..(360): NCBI GI NO: 15242516 NR Description: ACTIN 2/7 (sp|P53492); protein id: At5g09810
  misc_feature (1)..(360): NCBI GI NO: 24496452 NR Description: actin [Hordeum vulgare]
  misc_feature (1)..(360): NCBI GI NO: 37535954 NR Description: actin [Oryza sativa (japonica cultivar-group)]
  misc_feature (1)..(360): NCBI GI NO: 11276972 NR Description: actin [imported] - rape
  misc_feature (1)..(360): NCBI GI NO: 7960247 NR Description: actin-like protein [Phalaenopsis sp. 'True Lady']
  misc_feature (1)..(360): NCBI GI NO: 11276968 NR Description: actin [imported] - Picea rubens
  misc_feature (1)..(360): NCBI GI NO: 28301928 NR Description: actin [Oryza sativa (japonica cultivar-group)]
  misc_feature (1)..(345): NCBI GI NO: 11276980 NR Description: actin (ACT3) - Arabidopsis thaliana
MVKAGFAGDDAPRAVFPSIVGRPRHTGVMVGMGQKDAYVGDEAQSKRGILTLKYPIEHGIVSNWDDMEKIWHHTFYNELRVAPEEHPVLLTEAPLNPKANREKMTQIMFETFNVPAMYVAIQAVLSLYASGRTTGIVLDSGDGVSHTVPIYEGYALPHAILRLDLAGRDLTDSLMKILTERGYSFTTTAEREIVRDIKEKLAYVALDYDQELENAKSSSSVEKSYELPDGQVITIGAERFRCPEVLFQPSFIGMEAPGIHETTYNSIMKCDVDIRKDLYGNIVLSGGTTMFPGIADRMSKEITALAPSSMKIKVVAPPERKYSVWIGGSILASLSTFQQMWISKAEYDESGPAIVHRKCF

SEQ ID NO: 28463 - protein, 332 aa, Zea mays subsp. mays
  peptide (1)..(332): Ceres Seq. ID no. 12595097
  misc_feature (1)..(332): Pfam Name: Pfam Description:  Actin
  misc_feature (1)..(332): NCBI GI NO: 9965319 NR Description: actin [Setaria italica]
  misc_feature (1)..(332): NCBI GI NO: 15076949 NR Description: actin [Musa x paradisiaca]
  misc_feature (1)..(332): NCBI GI NO: 15242516 NR Description: ACTIN 2/7 (sp|P53492); protein id: At5g09810
  misc_feature (1)..(332): NCBI GI NO: 24496452 NR Description: actin [Hordeum vulgare]
  misc_feature (1)..(332): NCBI GI NO: 37535954 NR Description: actin [Oryza sativa (japonica cultivar-group)]
  misc_feature (1)..(332): NCBI GI NO: 11276972 NR Description: actin [imported] - rape
  misc_feature (1)..(332): NCBI GI NO: 7960247 NR Description: actin-like protein [Phalaenopsis sp. 'True Lady']
  misc_feature (1)..(332): NCBI GI NO: 11276968 NR Description: actin [imported] - Picea rubens
  misc_feature (1)..(332): NCBI GI NO: 28301928 NR Description: actin [Oryza sativa (japonica cultivar-group)]
  misc_feature (1)..(317): NCBI GI NO: 11276980 NR Description: actin (ACT3) - Arabidopsis thaliana
MVGMGQKDAYVGDEAQSKRGILTLKYPIEHGIVSNWDDMEKIWHHTFYNELRVAPEEHPVLLTEAPLNPKANREKMTQIMFETFNVPAMYVAIQAVLSLYASGRTTGIVLDSGDGVSHTVPIYEGYALPHAILRLDLAGRDLTDSLMKILTERGYSFTTTAEREIVRDIKEKLAYVALDYDQELENAKSSSSVEKSYELPDGQVITIGAERFRCPEVLFQPSFIGMEAPGIHETTYNSIMKCDVDIRKDLYGNIVLSGGTTMFPGIADRMSKEITALAPSSMKIKVVAPPERKYSVWIGGSILASLSTFQQMWISKAEYDESGPAIVHRKCF

SEQ ID NO: 28464 - DNA, 725 bp, Zea mays subsp. mays
  misc_feature (1)..(725): Ceres Seq. ID no. 12403489
aaaccaacatctgggcaaggaacagataaggactgcaaaccttgtcagggcttcggggacagccaaagaagacggacggacccagtgaggcgagcacgggcgctcaccggcgatggcgacgagggcatgggtggccgcggcggtggccttgaaccctcaactgctgcctctccgctcctgctcgcccacgcagtcggtctccccagcgcagcgctcgccgtcgatggggctccggctgcgcagcggccggccgtgcctggggaagttcgtgtgccgccgcgccaagaacgcgggatacgaggactacaagttcccggaccccatcccggagttcgccgagcaggagacgagcaagttcagggagcacatggcgtggcggctggagcagaagaaagaggactacttcggggaccatgtcgaggagatcgttgacgtctgcaccgagatcttggggacattcctggagaacgattaccgtggaccagggacgctcctggttcacccgttcctggacatgaagggcgagatcaaggagagggggctccccggcgcacctcaggcggcacgggcggcgatagcatgggccgaaaagaacgtggataaggactggaaggcctggactggggaatactagcactagttatgttgtttgacgttcccagcagctagctattgtgacacaaaattttgtccgcttcaaatgttcctctgtctgtcgtcatgcc

SEQ ID NO: 28465 - protein, 173 aa, Zea mays subsp. mays
  peptide (1)..(173): Ceres Seq. ID no. 12403490
  misc_feature (52)..(171): NCBI GI NO: 18391169 NR Description: Expressed protein; protein id: At1g10522
MATRAWVAAAVALNPQLLPLRSCSPTQSVSPAQRSPSMGLRLRSGRPCLGKFVCRRAKNAGYEDYKFPDPIPEFAEQETSKFREHMAWRLEQKKEDYFGDHVEEIVDVCTEILGTFLENDYRGPGTLLVHPFLDMKGEIKERGLPGAPQAARAAIAWAEKNVDKDWKAWTGEY

SEQ ID NO: 28466 - protein, 143 aa, Zea mays subsp. mays
  peptide (1)..(143): Ceres Seq. ID no. 12403491
KPTSGQGTDKDCKPCQGFGDSQRRRTDPVRRARALTGDGDEGMGGRGGGLEPSTAASPLLLAHAVGLPSAALAVDGAPAAQRPAVPGEVRVPPRQERGIRGLQVPGPHPGVRRAGDEQVQGAHGVAAGAEERGLLRGPCRGDR

SEQ ID NO: 28467 - protein, 136 aa, Zea mays subsp. mays
  peptide (1)..(136): Ceres Seq. ID no. 12403492
  misc_feature (15)..(134): NCBI GI NO: 18391169 NR Description: Expressed protein; protein id: At1g10522
MGLRLRSGRPCLGKFVCRRAKNAGYEDYKFPDPIPEFAEQETSKFREHMAWRLEQKKEDYFGDHVEEIVDVCTEILGTFLENDYRGPGTLLVHPFLDMKGEIKERGLPGAPQAARAAIAWAEKNVDKDWKAWTGEY

SEQ ID NO: 28468 - DNA, 1033 bp, Zea mays subsp. mays
  misc_feature (1)..(1033): Ceres Seq. ID no. 12401239
gaatgaaggtctgaaaaaaatcacagaactcactcgaacgacggtgccgccgcttgcctcgcctgaccatggccgctgtgccgtcgaggttcctcctcgtcactggcccgccgggcgtggggaagacgacgctggtcatgcgggtgtttgaaaccctcagaggctcccacccgaacctcaacattcgcggattctatacccgagaggtgagagagggcggagaaaggataggattcgaggttgtcacgctagacggtagaactggaccactttcctcatgcaaggtttccagcccggagtctgttagatggcctaccgtcgggaaatacaaagtagacgtagcatccttggaatcattagcagtacctgagctgcaggttaaggaagaaacagatctcttcatcattgacgaagtgggtaaaatggagctgttcagttcagcatttttccctgcggtaatgagagttattgaatccaatataccagtgttggccaccataccgattcctaggcagggccgggacattccaggagttgcgaggttgcggaatcatcctggagcagctgttttcaccttagacactggtaacagagatacgatgagagatactatctgcagtcagttaaggagtttgttgcagaagaggtgatctgctagcctcccttcgtctctgcggccgctgctttgtctgacataacacacatacgataaagagtagaagttttctctcagcatgatctcatattctgcaacagaacatgcggtcgagtcttctggtgcagtacctgaaatacctgttttaaagcttaccgagcagtgaatggcaggcagattactatgttgctgtgctcagatggttagctctggatgaacaataagcatgtcgtccagtttgttctgagttacgtatgtgtggctattcagtcatgtatttgcattcggtgggggcaaggttttattgccacaataactctcgcttgtatggatgcggttagcatgtagtgactctacaacaggtatcacatgatttgc

SEQ ID NO: 28469 - protein, 193 aa, Zea mays subsp. mays
  peptide (1)..(193): Ceres Seq. ID no. 12401240
  misc_feature (47)..(192): Pfam Name: Pfam Description:  Protein of unknown function, DUF265
  misc_feature (14)..(193): NCBI GI NO: 6063556 NR Description: similar to Aquifex aeolicus section 65 of 109 ofthe complete genome
  misc_feature (47)..(193): NCBI GI NO: 20503005 NR Description: Unknown protein
  misc_feature (6)..(188): NCBI GI NO: 14150100 NR Description: hypothetical protein MGC13186 [Homo sapiens]
  misc_feature (6)..(188): NCBI GI NO: 13385098 NR Description: RIKEN cDNA 2310079N02 [Mus musculus]
  misc_feature (6)..(188): NCBI GI NO: 12859618 NR Description: unnamed protein product [Mus musculus]
  misc_feature (6)..(188): NCBI GI NO: 34851911 NR Description: similar to RIKEN cDNA 2310079N02
  misc_feature (9)..(187): NCBI GI NO: 15642811 NR Description: conserved hypothetical protein
  misc_feature (9)..(186): NCBI GI NO: 15606506 NR Description: hypothetical protein [Aquifex aeolicus]
  misc_feature (9)..(189): NCBI GI NO: 20092214 NR Description: conserved hypothetical protein
  misc_feature (9)..(189): NCBI GI NO: 23049827 NR Description: hypothetical protein [Methanosarcina barkeri]
MAAVPSRFLLVTGPPGVGKTTLVMRVFETLRGSHPNLNIRGFYTREVREGGERIGFEVVTLDGRTGPLSSCKVSSPESVRWPTVGKYKVDVASLESLAVPELQVKEETDLFIIDEVGKMELFSSAFFPAVMRVIESNIPVLATIPIPRQGRDIPGVARLRNHPGAAVFTLDTGNRDTMRDTICSQLRSLLQKR

SEQ ID NO: 28470 - protein, 170 aa, Zea mays subsp. mays
  peptide (1)..(170): Ceres Seq. ID no. 12401241
  misc_feature (24)..(169): Pfam Name: Pfam Description:  Protein of unknown function, DUF265
  misc_feature (1)..(170): NCBI GI NO: 6063556 NR Description: similar to Aquifex aeolicus section 65 of 109 ofthe complete genome
  misc_feature (24)..(170): NCBI GI NO: 20503005 NR Description: Unknown protein
  misc_feature (1)..(165): NCBI GI NO: 14150100 NR Description: hypothetical protein MGC13186 [Homo sapiens]
  misc_feature (1)..(165): NCBI GI NO: 13385098 NR Description: RIKEN cDNA 2310079N02 [Mus musculus]
  misc_feature (1)..(165): NCBI GI NO: 12859618 NR Description: unnamed protein product [Mus musculus]
  misc_feature (1)..(165): NCBI GI NO: 34851911 NR Description: similar to RIKEN cDNA 2310079N02
  misc_feature (1)..(164): NCBI GI NO: 15642811 NR Description: conserved hypothetical protein
  misc_feature (1)..(163): NCBI GI NO: 15606506 NR Description: hypothetical protein [Aquifex aeolicus]
  misc_feature (1)..(166): NCBI GI NO: 20092214 NR Description: conserved hypothetical protein
  misc_feature (1)..(166): NCBI GI NO: 23049827 NR Description: hypothetical protein [Methanosarcina barkeri]
MRVFETLRGSHPNLNIRGFYTREVREGGERIGFEVVTLDGRTGPLSSCKVSSPESVRWPTVGKYKVDVASLESLAVPELQVKEETDLFIIDEVGKMELFSSAFFPAVMRVIESNIPVLATIPIPRQGRDIPGVARLRNHPGAAVFTLDTGNRDTMRDTICSQLRSLLQKR

SEQ ID NO: 28471 - DNA, 997 bp, Zea mays subsp. mays
  misc_feature (1)..(997): Ceres Seq. ID no. 12404376
gcacgagaccattacctagaacatcctaatcgaaaaattatttataagccatttgcattgcgctccagcttgggagcaaaggcaaagcagccaacaacaatcagaggcaacgaagctcgcgaatcgagagcgccgggaacaacaacaagaagaagatgatgataatggagcaggaggaggaggcgtgctcgacttgttgctcctctccgctgcggcagtgcaggatttgccatgacgaggaggacgagcggcgctccgccatggagtcgccctgcgcctgctccggttccctcaagtatgctcacaggggatgcgtgcagagatggtgcgacgagaagggcagcaccgtctgcgagatttgccttcagaacttcgagacgggctacaccgttcctcccaagaaaacccaaccagctgatgtcgcggtgaccatcagagacagcgtggcggtacccaggcagcagaacgagcccgaggacgaggaggagcaggtggccgcggcgctgataggagccagcgatccggagtacgccgagtgcgcccgcgccgccggcaggagcgcgtcctggtcctgctgccgctccgtggccgtcacgttcacgattgtcctgctgctgaggcacctggtcaccgtggtgacgctcggagcggccaaccagcagcagttcgccttcagcctcctcacagtgtacttgctgcgggcgagcgggatcttgcttccgttctacgttgtcatgaggctcatctgcgtgatccatcagggacagaggcagtaccggctgcatctgcttcaggagcagaggagacacgcgttgaggcggttggcctggctgcacggccagggacagcaccagcaaccgcatgccattctggttcgttgaggaacaaggcattcgtctagtgctcatacgctcgttcatccaaccatccatcacgtacaagactgtaaatttgtaaaagggacaaaataaagaagaaacggagaaagaaaggtggc

SEQ ID NO: 28472 - protein, 241 aa, Zea mays subsp. mays
  peptide (1)..(241): Ceres Seq. ID no. 12404377
  misc_feature (22)..(69): Pfam Name: RING finger Pfam Description: Zinc finger, C3HC4 type
  misc_feature (5)..(241): NCBI GI NO: 34905532 NR Description: B1146F03.23
  misc_feature (21)..(241): NCBI GI NO: 15227065 NR Description: unknown protein; protein id: At2g02960
  misc_feature (19)..(205): NCBI GI NO: 22325409 NR Description: similar to nucleoside triphosphatase, putative
  misc_feature (1)..(206): NCBI GI NO: 18424590 NR Description: expressed protein; protein id: At5g62460
  misc_feature (5)..(206): NCBI GI NO: 15223693 NR Description: nucleoside triphosphatase, putative
  misc_feature (5)..(206): NCBI GI NO: 26451292 NR Description: unknown protein [Arabidopsis thaliana]
  misc_feature (5)..(206): NCBI GI NO: 21537046 NR Description: nucleoside triphosphatase, putative
  misc_feature (13)..(178): NCBI GI NO: 25518349 NR Description: hypothetical protein T14P4
  misc_feature (21)..(209): NCBI GI NO: 30692888 NR Description: expressed protein [Arabidopsis thaliana]
  misc_feature (5)..(206): NCBI GI NO: 25365878 NR Description: F14L17.2 protein - Arabidopsis thaliana
MMIMEQEEEACSTCCSSPLRQCRICHDEEDERRSAMESPCACSGSLKYAHRGCVQRWCDEKGSTVCEICLQNFETGYTVPPKKTQPADVAVTIRDSVAVPRQQNEPEDEEEQVAAALIGASDPEYAECARAAGRSASWSCCRSVAVTFTIVLLLRHLVTVVTLGAANQQQFAFSLLTVYLLRASGILLPFYVVMRLICVIHQGQRQYRLHLLQEQRRHALRRLAWLHGQGQHQQPHAILVR

SEQ ID NO: 28473 - protein, 240 aa, Zea mays subsp. mays
  peptide (1)..(240): Ceres Seq. ID no. 12404378
  misc_feature (21)..(68): Pfam Name: RING finger Pfam Description: Zinc finger, C3HC4 type
  misc_feature (4)..(240): NCBI GI NO: 34905532 NR Description: B1146F03.23
  misc_feature (20)..(240): NCBI GI NO: 15227065 NR Description: unknown protein; protein id: At2g02960
  misc_feature (18)..(204): NCBI GI NO: 22325409 NR Description: similar to nucleoside triphosphatase, putative
  misc_feature (1)..(205): NCBI GI NO: 18424590 NR Description: expressed protein; protein id: At5g62460
  misc_feature (4)..(205): NCBI GI NO: 15223693 NR Description: nucleoside triphosphatase, putative
  misc_feature (4)..(205): NCBI GI NO: 26451292 NR Description: unknown protein [Arabidopsis thaliana]
  misc_feature (4)..(205): NCBI GI NO: 21537046 NR Description: nucleoside triphosphatase, putative
  misc_feature (12)..(177): NCBI GI NO: 25518349 NR Description: hypothetical protein T14P4
  misc_feature (20)..(208): NCBI GI NO: 30692888 NR Description: expressed protein [Arabidopsis thaliana]
  misc_feature (4)..(205): NCBI GI NO: 25365878 NR Description: F14L17.2 protein - Arabidopsis thaliana
MIMEQEEEACSTCCSSPLRQCRICHDEEDERRSAMESPCACSGSLKYAHRGCVQRWCDEKGSTVCEICLQNFETGYTVPPKKTQPADVAVTIRDSVAVPRQQNEPEDEEEQVAAALIGASDPEYAECARAAGRSASWSCCRSVAVTFTIVLLLRHLVTVVTLGAANQQQFAFSLLTVYLLRASGILLPFYVVMRLICVIHQGQRQYRLHLLQEQRRHALRRLAWLHGQGQHQQPHAILVR

SEQ ID NO: 28474 - protein, 238 aa, Zea mays subsp. mays
  peptide (1)..(238): Ceres Seq. ID no. 12404379
  misc_feature (19)..(66): Pfam Name: RING finger Pfam Description: Zinc finger, C3HC4 type
  misc_feature (2)..(238): NCBI GI NO: 34905532 NR Description: B1146F03.23
  misc_feature (18)..(238): NCBI GI NO: 15227065 NR Description: unknown protein; protein id: At2g02960
  misc_feature (16)..(202): NCBI GI NO: 22325409 NR Description: similar to nucleoside triphosphatase, putative
  misc_feature (1)..(203): NCBI GI NO: 18424590 NR Description: expressed protein; protein id: At5g62460
  misc_feature (2)..(203): NCBI GI NO: 15223693 NR Description: nucleoside triphosphatase, putative
  misc_feature (2)..(203): NCBI GI NO: 26451292 NR Description: unknown protein [Arabidopsis thaliana]
  misc_feature (2)..(203): NCBI GI NO: 21537046 NR Description: nucleoside triphosphatase, putative
  misc_feature (10)..(175): NCBI GI NO: 25518349 NR Description: hypothetical protein T14P4
  misc_feature (18)..(206): NCBI GI NO: 30692888 NR Description: expressed protein [Arabidopsis thaliana]
  misc_feature (2)..(203): NCBI GI NO: 25365878 NR Description: F14L17.2 protein - Arabidopsis thaliana
MEQEEEACSTCCSSPLRQCRICHDEEDERRSAMESPCACSGSLKYAHRGCVQRWCDEKGSTVCEICLQNFETGYTVPPKKTQPADVAVTIRDSVAVPRQQNEPEDEEEQVAAALIGASDPEYAECARAAGRSASWSCCRSVAVTFTIVLLLRHLVTVVTLGAANQQQFAFSLLTVYLLRASGILLPFYVVMRLICVIHQGQRQYRLHLLQEQRRHALRRLAWLHGQGQHQQPHAILVR

SEQ ID NO: 28475 - DNA, 974 bp, Zea mays subsp. mays
  misc_feature (1)..(974): Ceres Seq. ID no. 12402349
acggatatcttcgccaaccgctgcgtcgcgagctcgccgccatggcattggctctccccctcgcccgcctcgtccccgcctgccagtgccaggcttggccccacctgcgctttcggaagcgccacgtctccttcgccgctcacgccagttctcgcgccgccttcgctgcctgcgcggcggcccctgccctccaggtccaggcgccggaggcggaggcggaggcggagacggtcgagcaagtgggcccgaagacacgcctcgtcgcgcagaacatcccgtgggactgcacggccgacgaaatgcgcgcgctcttcgagagccacggctccgtcgtcggcgtcgagctttcaatgtacagcgccaataaaaacagaggattggcgtttgtaaccatggggttcagaagaggaggctcttgcagctctcacccatctcaattcaactattttaaatgataggaaaataaaggtggacttcgcaaggcctagaaagaagcaacctaagcaacctgctgtggtatcggatgccacggaaaagtatgttgtgtttgtcgggaatttgacatggagggtaagaaatcgtcaccttcgggaattatttgcctctgccccaggtgtggtatcagctgaagttatcttccataccaccactccgagacgatctgctggctacgcgtttgtttctttttcttcgaaagagagcgcaggggccgccatatctgctttcaacggaaagatattgatgggacggcccattaacgtgatgttcaaagatgaaaatggtgaaaagaatgaatcttcttctgtcccaaagaaggccgaggtggaaccatctgatggccagagtgataagctaagcatgaactgttaacgaaacaaataggtcatatctgtcattacacaaatatatgtatattctgacccatggtatttccttttcagaaatagttatgtcccttgttttattgatttgtc

SEQ ID NO: 28476 - protein, 150 aa, Zea mays subsp. mays
  peptide (1)..(150): Ceres Seq. ID no. 12402350
  misc_feature (33)..(131): NCBI GI NO: 22328520 NR Description: RRM-containing protein; protein id: At4g09040
  misc_feature (4)..(131): NCBI GI NO: 38346724 NR Description: OSJNBa0086O06.22
  misc_feature (49)..(150): NCBI GI NO: 15226983 NR Description: chloroplast RNA-binding protein cp33, putative
  misc_feature (69)..(132): NCBI GI NO: 681912 NR Description: cp33 [Arabidopsis thaliana]
  misc_feature (69)..(132): NCBI GI NO: 15231200 NR Description: chloroplast RNA-binding protein cp33
  misc_feature (69)..(132): NCBI GI NO: 17064758 NR Description: ubiquitin / ribosomal protein CEP52
  misc_feature (33)..(131): NCBI GI NO: 25407474 NR Description: hypothetical protein AT4g09050
GYLRQPLRRELAAMALALPLARLVPACQCQAWPHLRFRKRHVSFAAHASSRAAFAACAAAPALQVQAPEAEAEAETVEQVGPKTRLVAQNIPWDCTADEMRALFESHGSVVGVELSMYSANKNRGLAFVTMGFRRGGSCSSHPSQFNYFK

SEQ ID NO: 28477 - protein, 137 aa, Zea mays subsp. mays
  peptide (1)..(137): Ceres Seq. ID no. 12402351
  misc_feature (20)..(118): NCBI GI NO: 22328520 NR Description: RRM-containing protein; protein id: At4g09040
  misc_feature (1)..(118): NCBI GI NO: 38346724 NR Description: OSJNBa0086O06.22
  misc_feature (36)..(137): NCBI GI NO: 15226983 NR Description: chloroplast RNA-binding protein cp33, putative
  misc_feature (56)..(119): NCBI GI NO: 681912 NR Description: cp33 [Arabidopsis thaliana]
  misc_feature (56)..(119): NCBI GI NO: 15231200 NR Description: chloroplast RNA-binding protein cp33
  misc_feature (56)..(119): NCBI GI NO: 17064758 NR Description: ubiquitin / ribosomal protein CEP52
  misc_feature (20)..(118): NCBI GI NO: 25407474 NR Description: hypothetical protein AT4g09050
MALALPLARLVPACQCQAWPHLRFRKRHVSFAAHASSRAAFAACAAAPALQVQAPEAEAEAETVEQVGPKTRLVAQNIPWDCTADEMRALFESHGSVVGVELSMYSANKNRGLAFVTMGFRRGGSCSSHPSQFNYFK

SEQ ID NO: 28478 - protein, 129 aa, Zea mays subsp. mays
  peptide (1)..(129): Ceres Seq. ID no. 12402352
TDIFANRCVASSPPWHWLSPSPASSPPASARLGPTCAFGSATSPSPLTPVLAPPSLPARRPLPSRSRRRRRRRRRRRSSKWARRHASSRRTSRGTARPTKCARSSRATAPSSASSFQCTAPIKTEDWRL

SEQ ID NO: 28479 - DNA, 1075 bp, Zea mays subsp. mays
  misc_feature (1)..(1075): Ceres Seq. ID no. 12353875
attgccaacgcaacagttccgatcctccacaccagcacccgccgccgccgcctcttcccttgcgcacctgctgctgtgcggatcggtgaggcggaggagtaggatggcgagcgcggccggaggcggagcggcgggggaaggggagtggcttaaggtatcccagctcaggcccatggtggaagcgcaggaccccaacgccaaggcagtggacaacctgacgctgcgtcggttcctgcgcgcgcgcgaccacgacgtggacaaggcctccgccatgttcctcaagttcctcaagtggcggagggaggcggcgcccggcggctccgtgccggaggagcaggtgaggagggagctgtcgcaggacaagctgtgcatgggcggcgtcgacagggccggccgccccatcctcgtcgccttcgcggccaggcacttctccgccggccgtgacatggcagagttcaagagttttgttgtctacttcttcgacaagatctgtgccagaatccccagagggcaggagaaattcctctgcatcgttgatctcaagggctgggggtactcaaactgtgacgtccgggcatacattgccgctatagagatcttgcagaactactacccggagcggctcggcaaggcgctgatgatccacgtgccctacatcttcatgaaggcgtggaagatgatctaccccttcatcgacaccaacaccagggacaagttcgtgttcgtggaggacaagagcctgcaggagacgctgcggcgggagatcgacgaggggcagctcccggagttcctcggcggcaagatggacgtgatcccactcaaggactatggcgtgcagcagcagcctcaggccgtgtaatagccatgccatgcgtagcatacacgagttgtggctaggagcatagcatggcaataactgtgtagctgctgtgaaagtgaaaatgaaacgttgcgctgtttagccgggtcaattgaccagcccaactgcagatctctgggctaccactatgaacagcaagaactgtttcccttatccttttcagccaaactaatcaaaccagaaaatgtttcttgt

SEQ ID NO: 28480 - protein, 285 aa, Zea mays subsp. mays
  peptide (1)..(285): Ceres Seq. ID no. 12353876
  misc_feature (121)..(268): Pfam Name: Pfam Description:  CRAL/TRIO domain
  misc_feature (41)..(275): NCBI GI NO: 34907052 NR Description: sec14 like protein
  misc_feature (41)..(275): NCBI GI NO: 2286121 NR Description: sec14 like protein [Oryza sativa]
  misc_feature (48)..(273): NCBI GI NO: 27573358 NR Description: putative phosphatidylinositol/phosphatidylcholinetransfer protein
  misc_feature (43)..(275): NCBI GI NO: 17226662 NR Description: polyphosphoinositide binding protein
  misc_feature (46)..(275): NCBI GI NO: 15223439 NR Description: SEC14 cytosolic factor, putative
  misc_feature (31)..(275): NCBI GI NO: 7488696 NR Description: polyphosphoinositide binding protein Ssh2
  misc_feature (85)..(275): NCBI GI NO: 19347976 NR Description: putative polyphosphoinositide binding protein
  misc_feature (67)..(275): NCBI GI NO: 30684014 NR Description: SEC14 cytosolic factor, putative
  misc_feature (67)..(275): NCBI GI NO: 25402783 NR Description: protein F10B6.22 [imported] - Arabidopsis thaliana
  misc_feature (46)..(269): NCBI GI NO: 7487607 NR Description: hypothetical protein T3F12
LPTQQFRSSTPAPAAAASSLAHLLLCGSVRRRSRMASAAGGGAAGEGEWLKVSQLRPMVEAQDPNAKAVDNLTLRRFLRARDHDVDKASAMFLKFLKWRREAAPGGSVPEEQVRRELSQDKLCMGGVDRAGRPILVAFAARHFSAGRDMAEFKSFVVYFFDKICARIPRGQEKFLCIVDLKGWGYSNCDVRAYIAAIEILQNYYPERLGKALMIHVPYIFMKAWKMIYPFIDTNTRDKFVFVEDKSLQETLRREIDEGQLPEFLGGKMDVIPLKDYGVQQQPQAV

SEQ ID NO: 28481 - protein, 251 aa, Zea mays subsp. mays
  peptide (1)..(251): Ceres Seq. ID no. 12353877
  misc_feature (87)..(234): Pfam Name: Pfam Description:  CRAL/TRIO domain
  misc_feature (7)..(241): NCBI GI NO: 34907052 NR Description: sec14 like protein
  misc_feature (7)..(241): NCBI GI NO: 2286121 NR Description: sec14 like protein [Oryza sativa]
  misc_feature (14)..(239): NCBI GI NO: 27573358 NR Description: putative phosphatidylinositol/phosphatidylcholinetransfer protein
  misc_feature (9)..(241): NCBI GI NO: 17226662 NR Description: polyphosphoinositide binding protein
  misc_feature (12)..(241): NCBI GI NO: 15223439 NR Description: SEC14 cytosolic factor, putative
  misc_feature (1)..(241): NCBI GI NO: 7488696 NR Description: polyphosphoinositide binding protein Ssh2
  misc_feature (51)..(241): NCBI GI NO: 19347976 NR Description: putative polyphosphoinositide binding protein
  misc_feature (33)..(241): NCBI GI NO: 30684014 NR Description: SEC14 cytosolic factor, putative
  misc_feature (33)..(241): NCBI GI NO: 25402783 NR Description: protein F10B6.22 [imported] - Arabidopsis thaliana
  misc_feature (12)..(235): NCBI GI NO: 7487607 NR Description: hypothetical protein T3F12
MASAAGGGAAGEGEWLKVSQLRPMVEAQDPNAKAVDNLTLRRFLRARDHDVDKASAMFLKFLKWRREAAPGGSVPEEQVRRELSQDKLCMGGVDRAGRPILVAFAARHFSAGRDMAEFKSFVVYFFDKICARIPRGQEKFLCIVDLKGWGYSNCDVRAYIAAIEILQNYYPERLGKALMIHVPYIFMKAWKMIYPFIDTNTRDKFVFVEDKSLQETLRREIDEGQLPEFLGGKMDVIPLKDYGVQQQPQAV

SEQ ID NO: 28482 - protein, 228 aa, Zea mays subsp. mays
  peptide (1)..(228): Ceres Seq. ID no. 12353878
  misc_feature (64)..(211): Pfam Name: Pfam Description:  CRAL/TRIO domain
  misc_feature (1)..(218): NCBI GI NO: 34907052 NR Description: sec14 like protein
  misc_feature (1)..(218): NCBI GI NO: 2286121 NR Description: sec14 like protein [Oryza sativa]
  misc_feature (1)..(216): NCBI GI NO: 27573358 NR Description: putative phosphatidylinositol/phosphatidylcholinetransfer protein
  misc_feature (1)..(218): NCBI GI NO: 17226662 NR Description: polyphosphoinositide binding protein
  misc_feature (1)..(218): NCBI GI NO: 15223439 NR Description: SEC14 cytosolic factor, putative
  misc_feature (1)..(218): NCBI GI NO: 7488696 NR Description: polyphosphoinositide binding protein Ssh2
  misc_feature (28)..(218): NCBI GI NO: 19347976 NR Description: putative polyphosphoinositide binding protein
  misc_feature (10)..(218): NCBI GI NO: 30684014 NR Description: SEC14 cytosolic factor, putative
  misc_feature (10)..(218): NCBI GI NO: 25402783 NR Description: protein F10B6.22 [imported] - Arabidopsis thaliana
  misc_feature (1)..(212): NCBI GI NO: 7487607 NR Description: hypothetical protein T3F12
MVEAQDPNAKAVDNLTLRRFLRARDHDVDKASAMFLKFLKWRREAAPGGSVPEEQVRRELSQDKLCMGGVDRAGRPILVAFAARHFSAGRDMAEFKSFVVYFFDKICARIPRGQEKFLCIVDLKGWGYSNCDVRAYIAAIEILQNYYPERLGKALMIHVPYIFMKAWKMIYPFIDTNTRDKFVFVEDKSLQETLRREIDEGQLPEFLGGKMDVIPLKDYGVQQQPQAV

SEQ ID NO: 28483 - DNA, 478 bp, Zea mays subsp. mays
  misc_feature (1)..(478): Ceres Seq. ID no. 13564651
tatccctggtgctttgttctttgatgttgatggaatatccgacagaacatctagtttaccacacatgctgccatctgaaaaggcattttcagctgctgtatctgctcttggcatctacaacaaagacgggatagtagtttatgatggaaaggggctgttcagtgctgctcgtgtttggtggatgttccgtgtatttggacatgataaagtttgggtgttggatggaggtttgccccaatggcgcgcttctgggtatgatgttgaatcaagtccctctagtgatgccatcctaaaggccagtgcagctggtgaagcaattgagaaagtttaccagggtcaattggttggtccaaccacatttgaagcaaagttgcagcctcatcttctttggagtcttgatcaggtgaaagagaacatcaacacccagacacatcaacttatagatgctcgatcaaaacctagatttgatggtgcagtt

SEQ ID NO: 28484 - protein, 159 aa, Zea mays subsp. mays
  peptide (1)..(159): Ceres Seq. ID no. 13564652
  misc_feature (1)..(83): Pfam Name: Pfam Description:  Rhodanese-like domain
  misc_feature (1)..(158): NCBI GI NO: 4406372 NR Description: thiosulfate sulfurtransferase [Datisca glomerata]
  misc_feature (1)..(157): NCBI GI NO: 18412307 NR Description: mercaptopyruvate sulfurtransferase (Mst1/Rdh1)
  misc_feature (1)..(157): NCBI GI NO: 18394364 NR Description: mercaptopyruvate sulfurtransferase (Mst2/Rdh2)
  misc_feature (1)..(157): NCBI GI NO: 30684873 NR Description: mercaptopyruvate sulfurtransferase (Mst2/Rdh2)
  misc_feature (1)..(157): NCBI GI NO: 25456716 NR Description: thiosulfate sulfurtransferase (EC 2.8.1.1)
  misc_feature (1)..(158): NCBI GI NO: 25288797 NR Description: hypothetical protein F3O9.26
  misc_feature (1)..(157): NCBI GI NO: 25288794 NR Description: thiosulfate sulfurtransferase (EC 2
  misc_feature (1)..(158): NCBI GI NO: 14571545 NR Description: thiosulfate transferase [Triticum aestivum]
  misc_feature (1)..(101): NCBI GI NO: 22960827 NR Description: hypothetical protein [Rhodopseudomonas palustris]
  misc_feature (115)..(158): NCBI GI NO: 22960827 NR Description: hypothetical protein [Rhodopseudomonas palustris]
IPGALFFDVDGISDRTSSLPHMLPSEKAFSAAVSALGIYNKDGIVVYDGKGLFSAARVWWMFRVFGHDKVWVLDGGLPQWRASGYDVESSPSSDAILKASAAGEAIEKVYQGQLVGPTTFEAKLQPHLLWSLDQVKENINTQTHQLIDARSKPRFDGAV

SEQ ID NO: 28485 - protein, 138 aa, Zea mays subsp. mays
  peptide (1)..(138): Ceres Seq. ID no. 13564653
  misc_feature (1)..(62): Pfam Name: Pfam Description:  Rhodanese-like domain
  misc_feature (1)..(137): NCBI GI NO: 4406372 NR Description: thiosulfate sulfurtransferase [Datisca glomerata]
  misc_feature (1)..(136): NCBI GI NO: 18412307 NR Description: mercaptopyruvate sulfurtransferase (Mst1/Rdh1)
  misc_feature (1)..(136): NCBI GI NO: 18394364 NR Description: mercaptopyruvate sulfurtransferase (Mst2/Rdh2)
  misc_feature (1)..(136): NCBI GI NO: 30684873 NR Description: mercaptopyruvate sulfurtransferase (Mst2/Rdh2)
  misc_feature (1)..(136): NCBI GI NO: 25456716 NR Description: thiosulfate sulfurtransferase (EC 2.8.1.1)
  misc_feature (1)..(137): NCBI GI NO: 25288797 NR Description: hypothetical protein F3O9.26
  misc_feature (1)..(136): NCBI GI NO: 25288794 NR Description: thiosulfate sulfurtransferase (EC 2
  misc_feature (1)..(137): NCBI GI NO: 14571545 NR Description: thiosulfate transferase [Triticum aestivum]
  misc_feature (1)..(80): NCBI GI NO: 22960827 NR Description: hypothetical protein [Rhodopseudomonas palustris]
  misc_feature (94)..(137): NCBI GI NO: 22960827 NR Description: hypothetical protein [Rhodopseudomonas palustris]
MLPSEKAFSAAVSALGIYNKDGIVVYDGKGLFSAARVWWMFRVFGHDKVWVLDGGLPQWRASGYDVESSPSSDAILKASAAGEAIEKVYQGQLVGPTTFEAKLQPHLLWSLDQVKENINTQTHQLIDARSKPRFDGAV

SEQ ID NO: 28486 - protein, 99 aa, Zea mays subsp. mays
  peptide (1)..(99): Ceres Seq. ID no. 13564654
  misc_feature (1)..(98): NCBI GI NO: 4406372 NR Description: thiosulfate sulfurtransferase [Datisca glomerata]
  misc_feature (1)..(97): NCBI GI NO: 18412307 NR Description: mercaptopyruvate sulfurtransferase (Mst1/Rdh1)
  misc_feature (1)..(97): NCBI GI NO: 18394364 NR Description: mercaptopyruvate sulfurtransferase (Mst2/Rdh2)
  misc_feature (1)..(97): NCBI GI NO: 30684873 NR Description: mercaptopyruvate sulfurtransferase (Mst2/Rdh2)
  misc_feature (1)..(97): NCBI GI NO: 25456716 NR Description: thiosulfate sulfurtransferase (EC 2.8.1.1)
  misc_feature (1)..(98): NCBI GI NO: 25288797 NR Description: hypothetical protein F3O9.26
  misc_feature (1)..(97): NCBI GI NO: 25288794 NR Description: thiosulfate sulfurtransferase (EC 2
  misc_feature (1)..(98): NCBI GI NO: 14571545 NR Description: thiosulfate transferase [Triticum aestivum]
  misc_feature (1)..(41): NCBI GI NO: 22960827 NR Description: hypothetical protein [Rhodopseudomonas palustris]
  misc_feature (55)..(98): NCBI GI NO: 22960827 NR Description: hypothetical protein [Rhodopseudomonas palustris]
MFRVFGHDKVWVLDGGLPQWRASGYDVESSPSSDAILKASAAGEAIEKVYQGQLVGPTTFEAKLQPHLLWSLDQVKENINTQTHQLIDARSKPRFDGAV

SEQ ID NO: 28487 - DNA, 825 bp, Zea mays subsp. mays
  misc_feature (1)..(825): Ceres Seq. ID no. 12351160
cacacatgacacaacgacaccaactgtcctcaatccagcagccctcgagtctcgtccccgcacatcagcagagagacgccactaccaccaccgcaagcgacgacggggagatgtttctgcgacggatcctgaccggcggaggtggcctggcggcgctgagggcggcgcgcgccgtgaaggagacgacggggatcgtcggccttgaggtggcgcccaacgcgcgggaggttctcatcgggctctacacgcgtacgctcaaggagatcgaggccgtccccaaagacgagggctaccgcaaggccgttgagtccttcaccaatcaccgcctccagatctgccaggaggaggacgactggaagcgcatcgaggaccgaatcggatgcgggcaagtcgaggagctcatcgaggaggccgaggacgagctcaagctcatcgccaaaatgattgaatgggatccgtggggtgtccctgatgactacgaatgtgaggtgattgaagacgacaccccaattcctaagcatgttcctcagcaccggcccgttgctcttcctgaggagttcttcaagacactagatgccgtcaaatcagatcccgccctccaaggcgatgctcctcctcaagtgaaggcgtaaagatgagtcttcccggttatgtcttatgtcatttcacactttgctgcgctgggtagggactagtttcttgtgccatttgccagcaatgtgcttgttccgagcagaataaatttctggcgagtaccatcgaagagtgactttgaacgaagtgattcgacacagtaaatttgttgttgtccatgaatacttgctc

SEQ ID NO: 28488 - protein, 209 aa, Zea mays subsp. mays
  peptide (1)..(209): Ceres Seq. ID no. 12351161
  misc_feature (71)..(127): Pfam Name: Pfam Description:  ETC complex I subunit conserved region
  misc_feature (37)..(208): NCBI GI NO: 18423437 NR Description: expressed protein; protein id: At5g52840
  misc_feature (59)..(195): NCBI GI NO: 16930745 NR Description: NADH-ubiquinone oxidoreductase [Retama raetam]
  misc_feature (58)..(164): NCBI GI NO: 28829489 NR Description: similar to NADH-ubiquinone oxidoreductase 13 KD-B subunit
  misc_feature (55)..(153): NCBI GI NO: 233598 NR Description: 13 kDa-B polypeptide of iron-sulfur proteinfraction of NADH:ubiquinone oxidoreductase
  misc_feature (55)..(153): NCBI GI NO: 28461281 NR Description: NADH dehydrogenase
  misc_feature (58)..(154): NCBI GI NO: 37551400 NR Description: similar to NADH-ubiquinone oxidoreductase 13 kDa-B subunit
  misc_feature (109)..(208): NCBI GI NO: 22328992 NR Description: hypothetical protein; protein id: At4g28005.1
  misc_feature (55)..(153): NCBI GI NO: 31213375 NR Description: ENSANGP00000017869 [Anopheles gambiae]
  misc_feature (55)..(153): NCBI GI NO: 4826848 NR Description: NADH dehydrogenase
  misc_feature (55)..(153): NCBI GI NO: 12844779 NR Description: unnamed protein product [Mus musculus]
HMTQRHQLSSIQQPSSLVPAHQQRDATTTTASDDGEMFLRRILTGGGGLAALRAARAVKETTGIVGLEVAPNAREVLIGLYTRTLKEIEAVPKDEGYRKAVESFTNHRLQICQEEDDWKRIEDRIGCGQVEELIEEAEDELKLIAKMIEWDPWGVPDDYECEVIEDDTPIPKHVPQHRPVALPEEFFKTLDAVKSDPALQGDAPPQVKA

SEQ ID NO: 28489 - protein, 208 aa, Zea mays subsp. mays
  peptide (1)..(208): Ceres Seq. ID no. 12351162
  misc_feature (70)..(126): Pfam Name: Pfam Description:  ETC complex I subunit conserved region
  misc_feature (36)..(207): NCBI GI NO: 18423437 NR Description: expressed protein; protein id: At5g52840
  misc_feature (58)..(194): NCBI GI NO: 16930745 NR Description: NADH-ubiquinone oxidoreductase [Retama raetam]
  misc_feature (57)..(163): NCBI GI NO: 28829489 NR Description: similar to NADH-ubiquinone oxidoreductase 13 KD-B subunit
  misc_feature (54)..(152): NCBI GI NO: 233598 NR Description: 13 kDa-B polypeptide of iron-sulfur proteinfraction of NADH:ubiquinone oxidoreductase
  misc_feature (54)..(152): NCBI GI NO: 28461281 NR Description: NADH dehydrogenase
  misc_feature (57)..(153): NCBI GI NO: 37551400 NR Description: similar to NADH-ubiquinone oxidoreductase 13 kDa-B subunit
  misc_feature (108)..(207): NCBI GI NO: 22328992 NR Description: hypothetical protein; protein id: At4g28005.1
  misc_feature (54)..(152): NCBI GI NO: 31213375 NR Description: ENSANGP00000017869 [Anopheles gambiae]
  misc_feature (54)..(152): NCBI GI NO: 4826848 NR Description: NADH dehydrogenase
  misc_feature (54)..(152): NCBI GI NO: 30584885 NR Description: Homo sapiens NADH dehydrogenase
MTQRHQLSSIQQPSSLVPAHQQRDATTTTASDDGEMFLRRILTGGGGLAALRAARAVKETTGIVGLEVAPNAREVLIGLYTRTLKEIEAVPKDEGYRKAVESFTNHRLQICQEEDDWKRIEDRIGCGQVEELIEEAEDELKLIAKMIEWDPWGVPDDYECEVIEDDTPIPKHVPQHRPVALPEEFFKTLDAVKSDPALQGDAPPQVKA

SEQ ID NO: 28490 - protein, 173 aa, Zea mays subsp. mays
  peptide (1)..(173): Ceres Seq. ID no. 12351163
  misc_feature (35)..(91): Pfam Name: Pfam Description:  ETC complex I subunit conserved region
  misc_feature (1)..(172): NCBI GI NO: 18423437 NR Description: expressed protein; protein id: At5g52840
  misc_feature (23)..(159): NCBI GI NO: 16930745 NR Description: NADH-ubiquinone oxidoreductase [Retama raetam]
  misc_feature (22)..(128): NCBI GI NO: 28829489 NR Description: similar to NADH-ubiquinone oxidoreductase 13 KD-B subunit
  misc_feature (19)..(117): NCBI GI NO: 233598 NR Description: 13 kDa-B polypeptide of iron-sulfur proteinfraction of NADH:ubiquinone oxidoreductase
  misc_feature (19)..(117): NCBI GI NO: 28461281 NR Description: NADH dehydrogenase
  misc_feature (22)..(118): NCBI GI NO: 37551400 NR Description: similar to NADH-ubiquinone oxidoreductase 13 kDa-B subunit
  misc_feature (73)..(172): NCBI GI NO: 22328992 NR Description: hypothetical protein; protein id: At4g28005.1
  misc_feature (19)..(117): NCBI GI NO: 31213375 NR Description: ENSANGP00000017869 [Anopheles gambiae]
  misc_feature (19)..(117): NCBI GI NO: 4826848 NR Description: NADH dehydrogenase
  misc_feature (19)..(117): NCBI GI NO: 30584885 NR Description: Homo sapiens NADH dehydrogenase
MFLRRILTGGGGLAALRAARAVKETTGIVGLEVAPNAREVLIGLYTRTLKEIEAVPKDEGYRKAVESFTNHRLQICQEEDDWKRIEDRIGCGQVEELIEEAEDELKLIAKMIEWDPWGVPDDYECEVIEDDTPIPKHVPQHRPVALPEEFFKTLDAVKSDPALQGDAPPQVKA

SEQ ID NO: 28491 - DNA, 1034 bp, Zea mays subsp. mays
  misc_feature (1)..(1034): Ceres Seq. ID no. 12402506
atataatagggtagacgcccaactcgaacctgagtacctgagaaatggcggccgtctcctccacctcaaccgcctcctcctacttctccccgcagccgcagctgccgatctccaccgccgaccctgccgccagcaaaagtaggttgatgcggcagccacggcggagcagcagcttcgtgatggtggaggcgtcctctgccagcggcagcgacggcggggtggccaggacgaagagcctcacggaggacgacctggaggagctcaagggctgcctcgacctcggcttcggattcgcgtacagcgagatacccgagctctgcgggacgctgcccgcgctcgaactctgctactccatgacccggaggttcctcgacgagcagaaggcgccggggcaggaggaggaattggagcctgcgtcgccgccgctccccaattggaggatctctggcccgggtgacgatccagaagaagtgaaggcgaggttgaagtattgggctcaagctgttgcatgcactgtcaagctctgcagctaaactaaaggtcggatagaggctgaagaatctggttatatggttttgggatacagggagcggaaggggggggtgcttctgctctctggcatggaagcgacatgagtgatctcatctgcttctacaaaaaacttgggaagggggaggaaccatgatacggaacagggacagacctcgattcagaatttgagatccatggtctgagcttctacgagagggttcggaagccttgccattcctcagggtgggtggtctgcatagtgcagcgtttccaaatgcatgacctgctggttctttttgctgtttccttgtaatgatcaataggtgctctaattgtcgcactcttgtaataatgtactgaatcgaattttgagttttggccttttgggtactgatccaagggttgattagttccaacattggtttattttgtgctactctgatattgccatgtgcattatgctgttctacacgttcgtagaagttaatagcgcgtttggtttc

SEQ ID NO: 28492 - protein, 162 aa, Zea mays subsp. mays
  peptide (1)..(162): Ceres Seq. ID no. 12402507
  misc_feature (1)..(137): NCBI GI NO: 34907664 NR Description: P0506A10.18
  misc_feature (29)..(162): NCBI GI NO: 30684991 NR Description: expressed protein [Arabidopsis thaliana]
  misc_feature (30)..(162): NCBI GI NO: 25406874 NR Description: hypothetical protein
  misc_feature (4)..(162): NCBI GI NO: 30689349 NR Description: expressed protein [Arabidopsis thaliana]
  misc_feature (4)..(159): NCBI GI NO: 25408860 NR Description: hypothetical protein At2g43340
  misc_feature (30)..(155): NCBI GI NO: 15221309 NR Description: unknown protein; protein id: At1g05870.1
  misc_feature (29)..(138): NCBI GI NO: 25408168 NR Description: hypothetical protein At2g31560
  misc_feature (65)..(158): NCBI GI NO: 15228829 NR Description: hypothetical protein; protein id: At3g22690.1
  misc_feature (1)..(158): NCBI GI NO: 15223913 NR Description: hypothetical protein; protein id: At1g08790.1
  misc_feature (1)..(158): NCBI GI NO: 15229330 NR Description: hypothetical protein; protein id: At3g04700.1
MAAVSSTSTASSYFSPQPQLPISTADPAASKSRLMRQPRRSSSFVMVEASSASGSDGGVARTKSLTEDDLEELKGCLDLGFGFAYSEIPELCGTLPALELCYSMTRRFLDEQKAPGQEEELEPASPPLPNWRISGPGDDPEEVKARLKYWAQAVACTVKLCS

SEQ ID NO: 28493 - protein, 128 aa, Zea mays subsp. mays
  peptide (1)..(128): Ceres Seq. ID no. 12402508
  misc_feature (1)..(103): NCBI GI NO: 34907664 NR Description: P0506A10.18
  misc_feature (1)..(128): NCBI GI NO: 30684991 NR Description: expressed protein [Arabidopsis thaliana]
  misc_feature (1)..(128): NCBI GI NO: 25406874 NR Description: hypothetical protein
  misc_feature (1)..(128): NCBI GI NO: 30689349 NR Description: expressed protein [Arabidopsis thaliana]
  misc_feature (1)..(125): NCBI GI NO: 25408860 NR Description: hypothetical protein At2g43340
  misc_feature (1)..(121): NCBI GI NO: 15221309 NR Description: unknown protein; protein id: At1g05870.1
  misc_feature (1)..(104): NCBI GI NO: 25408168 NR Description: hypothetical protein At2g31560
  misc_feature (31)..(124): NCBI GI NO: 15228829 NR Description: hypothetical protein; protein id: At3g22690.1
  misc_feature (1)..(124): NCBI GI NO: 15223913 NR Description: hypothetical protein; protein id: At1g08790.1
  misc_feature (1)..(124): NCBI GI NO: 15229330 NR Description: hypothetical protein; protein id: At3g04700.1
MRQPRRSSSFVMVEASSASGSDGGVARTKSLTEDDLEELKGCLDLGFGFAYSEIPELCGTLPALELCYSMTRRFLDEQKAPGQEEELEPASPPLPNWRISGPGDDPEEVKARLKYWAQAVACTVKLCS

SEQ ID NO: 28494 - protein, 117 aa, Zea mays subsp. mays
  peptide (1)..(117): Ceres Seq. ID no. 12402509
  misc_feature (1)..(92): NCBI GI NO: 34907664 NR Description: P0506A10.18
  misc_feature (1)..(117): NCBI GI NO: 30684991 NR Description: expressed protein [Arabidopsis thaliana]
  misc_feature (1)..(117): NCBI GI NO: 25406874 NR Description: hypothetical protein
  misc_feature (1)..(117): NCBI GI NO: 30689349 NR Description: expressed protein [Arabidopsis thaliana]
  misc_feature (1)..(114): NCBI GI NO: 25408860 NR Description: hypothetical protein At2g43340
  misc_feature (1)..(110): NCBI GI NO: 15221309 NR Description: unknown protein; protein id: At1g05870.1
  misc_feature (1)..(93): NCBI GI NO: 25408168 NR Description: hypothetical protein At2g31560
  misc_feature (20)..(113): NCBI GI NO: 15228829 NR Description: hypothetical protein; protein id: At3g22690.1
  misc_feature (1)..(113): NCBI GI NO: 15223913 NR Description: hypothetical protein; protein id: At1g08790.1
  misc_feature (1)..(113): NCBI GI NO: 15229330 NR Description: hypothetical protein; protein id: At3g04700.1
MVEASSASGSDGGVARTKSLTEDDLEELKGCLDLGFGFAYSEIPELCGTLPALELCYSMTRRFLDEQKAPGQEEELEPASPPLPNWRISGPGDDPEEVKARLKYWAQAVACTVKLCS

SEQ ID NO: 28495 - DNA, 1252 bp, Zea mays subsp. mays
  misc_feature (1)..(1252): Ceres Seq. ID no. 15180749
acaacacaaccaagagccaacagagcaacgcccaggcacacacgacacgaaccaggcaaccagctgccgagggaggaaccctagcggaacactgtgcaggtgacggcggcgcgctaccggtgacgggggatacggcggcatcgtccccctcggcccctcctccatccccggcgcggcggcgccagcagccggcctgcaggttttgcaggtttcacacttcttatcatggatgataagaacaaagtcaagaaggaaatagatggcccccttggacccccacctcgcaaggggggacttaaattcgcaccaaaagtacctcagaagaaacctgccaaggttgtcccaaagaaggaaccggttgaagagagaaaggaggatgctttggataaggagttattgatgaaacttaagatgtcgcaaaacaagtatccctcaagaattaagtccgacgaaaagccaagaagtggtacacaggttgcatttggacaaggaaactcttattatgcaagaaattttcccatgcccaaaaaggattcttcagcaggtggagcttcgaagttaccaaaagaatatgcagaaccatgggactatagccatgattatcctgttactctcccactaaggaagccctactctggaaatcctgaaattctggatgaggaagaatttggagaatcttctgccagcaggacccaagatgatgaattatctgcagcagagcagcttggattaatggatatgtcgtcggaatcacagttcctcttcttccagttgccatcctctcttcctttaccgaggcagccacaatcaggtgctgaccctaacgaagtccgcgatgagaaacgtgaggacatgaggccatcatcgcacaatggctcgaaactcaaagaggttcctgaaggctatatggggaaaatgctcgtatataagagtggtaaagtgaagatgaagataggagacactctctttgatgtttcatttggctcgaattgcatgttttcccaggaggttgcagcaatcaacatcagagaaaaacattgctgtacggtgggagagatcagcaagcgtgctatcatcaccccagatattaactacatgttgggttctgttgacaagatggaagaatagtccattggtttctttcgcgcaaaccatatagaccatattatgccattacaagatagttttgctttcttatagagaacgacctgtgataccctctcagacttcttcaagaaaagatgcctcaaac

SEQ ID NO: 28496 - protein, 300 aa, Zea mays subsp. mays
  peptide (1)..(300): Ceres Seq. ID no. 15180750
  misc_feature (183)..(288): Pfam Name: Pfam Description:  RNA polymerase III RPC4
  misc_feature (42)..(299): NCBI GI NO: 21740741 NR Description: OSJNBa0072K14.6
  misc_feature (17)..(298): NCBI GI NO: 15242400 NR Description: hypothetical protein [Arabidopsis thaliana]
  misc_feature (115)..(251): NCBI GI NO: 7486060 NR Description: hypothetical protein F24A6
  misc_feature (115)..(251): NCBI GI NO: 15234965 NR Description: hypothetical protein [Arabidopsis thaliana]
  misc_feature (250)..(299): NCBI GI NO: 7486060 NR Description: hypothetical protein F24A6
  misc_feature (250)..(299): NCBI GI NO: 15234965 NR Description: hypothetical protein [Arabidopsis thaliana]
  misc_feature (144)..(292): NCBI GI NO: 34907504 NR Description: B1099D03.22
  misc_feature (13)..(292): NCBI GI NO: 34874432 NR Description: similar to DNA-directed RNA polymerase III 47 kDapolypeptide
  misc_feature (13)..(292): NCBI GI NO: 12850356 NR Description: unnamed protein product [Mus musculus]
  misc_feature (13)..(292): NCBI GI NO: 31981109 NR Description: polymerase
MDDKNKVKKEIDGPLGPPPRKGGLKFAPKVPQKKPAKVVPKKEPVEERKEDALDKELLMKLKMSQNKYPSRIKSDEKPRSGTQVAFGQGNSYYARNFPMPKKDSSAGGASKLPKEYAEPWDYSHDYPVTLPLRKPYSGNPEILDEEEFGESSASRTQDDELSAAEQLGLMDMSSESQFLFFQLPSSLPLPRQPQSGADPNEVRDEKREDMRPSSHNGSKLKEVPEGYMGKMLVYKSGKVKMKIGDTLFDVSFGSNCMFSQEVAAINIREKHCCTVGEISKRAIITPDINYMLGSVDKMEE

SEQ ID NO: 28497 - protein, 242 aa, Zea mays subsp. mays
  peptide (1)..(242): Ceres Seq. ID no. 15180751
  misc_feature (125)..(230): Pfam Name: Pfam Description:  RNA polymerase III RPC4
  misc_feature (1)..(241): NCBI GI NO: 21740741 NR Description: OSJNBa0072K14.6
  misc_feature (1)..(240): NCBI GI NO: 15242400 NR Description: hypothetical protein [Arabidopsis thaliana]
  misc_feature (57)..(193): NCBI GI NO: 7486060 NR Description: hypothetical protein F24A6
  misc_feature (57)..(193): NCBI GI NO: 15234965 NR Description: hypothetical protein [Arabidopsis thaliana]
  misc_feature (192)..(241): NCBI GI NO: 7486060 NR Description: hypothetical protein F24A6
  misc_feature (192)..(241): NCBI GI NO: 15234965 NR Description: hypothetical protein [Arabidopsis thaliana]
  misc_feature (86)..(234): NCBI GI NO: 34907504 NR Description: B1099D03.22
  misc_feature (1)..(234): NCBI GI NO: 34874432 NR Description: similar to DNA-directed RNA polymerase III 47 kDapolypeptide
  misc_feature (1)..(234): NCBI GI NO: 12850356 NR Description: unnamed protein product [Mus musculus]
  misc_feature (1)..(234): NCBI GI NO: 31981109 NR Description: polymerase
MKLKMSQNKYPSRIKSDEKPRSGTQVAFGQGNSYYARNFPMPKKDSSAGGASKLPKEYAEPWDYSHDYPVTLPLRKPYSGNPEILDEEEFGESSASRTQDDELSAAEQLGLMDMSSESQFLFFQLPSSLPLPRQPQSGADPNEVRDEKREDMRPSSHNGSKLKEVPEGYMGKMLVYKSGKVKMKIGDTLFDVSFGSNCMFSQEVAAINIREKHCCTVGEISKRAIITPDINYMLGSVDKMEE

SEQ ID NO: 28498 - protein, 238 aa, Zea mays subsp. mays
  peptide (1)..(238): Ceres Seq. ID no. 15180752
  misc_feature (121)..(226): Pfam Name: Pfam Description:  RNA polymerase III RPC4
  misc_feature (1)..(237): NCBI GI NO: 21740741 NR Description: OSJNBa0072K14.6
  misc_feature (1)..(236): NCBI GI NO: 15242400 NR Description: hypothetical protein [Arabidopsis thaliana]
  misc_feature (53)..(189): NCBI GI NO: 7486060 NR Description: hypothetical protein F24A6
  misc_feature (53)..(189): NCBI GI NO: 15234965 NR Description: hypothetical protein [Arabidopsis thaliana]
  misc_feature (188)..(237): NCBI GI NO: 7486060 NR Description: hypothetical protein F24A6
  misc_feature (188)..(237): NCBI GI NO: 15234965 NR Description: hypothetical protein [Arabidopsis thaliana]
  misc_feature (82)..(230): NCBI GI NO: 34907504 NR Description: B1099D03.22
  misc_feature (1)..(230): NCBI GI NO: 34874432 NR Description: similar to DNA-directed RNA polymerase III 47 kDapolypeptide
  misc_feature (1)..(230): NCBI GI NO: 12850356 NR Description: unnamed protein product [Mus musculus]
  misc_feature (1)..(230): NCBI GI NO: 31981109 NR Description: polymerase
MSQNKYPSRIKSDEKPRSGTQVAFGQGNSYYARNFPMPKKDSSAGGASKLPKEYAEPWDYSHDYPVTLPLRKPYSGNPEILDEEEFGESSASRTQDDELSAAEQLGLMDMSSESQFLFFQLPSSLPLPRQPQSGADPNEVRDEKREDMRPSSHNGSKLKEVPEGYMGKMLVYKSGKVKMKIGDTLFDVSFGSNCMFSQEVAAINIREKHCCTVGEISKRAIITPDINYMLGSVDKMEE

SEQ ID NO: 28499 - DNA, 1636 bp, Zea mays subsp. mays
  misc_feature (1)..(1636): Ceres Seq. ID no. 12409017
ccccaaaccctaccgccgatccggccccagatcgccatggccgcgcccaacagcaatgacgccgccagcgccagcggcaccggcccggctggcgaggaggacatctccatcgaggcgttggcgcggcgcgtgcaagagcacatgaccctcaactcgaaccccgccgctcgccgccacaagttctgggagacacagcccgtcggccagttccgcgacgccgccgacgcatcgctaccgaacggccccatcgagccgcccacgccactctccgaggtgcgcgccgacccctacccactgcccgccgccttcgagtggctcacctgcgacctcgatgacgacgcgctcctcgccgacctctactcgttgctcgcccacaactacgtcgaggatgacgagaacatgttccgcttcaactactccccggccttcctccgctgggcgctcaagccgccgtccttcttccgggcctggcacatcggcgttcgcgccaaggagtccaagaagctcgtcgccttcatctcgggcgtccccgcccgcatccgcgctcgcgacgacgtcgtccgcatggccgagatcaactttctctgcgtccacaagaagctccgatccaagcgcctggcacccgtgctcatccgggaggtcacccgccgcgtccaccaggagaacatctggcaggctgcatacaccgcggggatcgtcctcccaacccccatcaccacctgccgctactggcaccgatccctcaaccccaagaagcttatcgatgttggattctctcgccttggtccgcgcatgactatgagccgcacggtccggctatacaagctgcctgatgcgccgctcacccctgggtttcgcaggatggagctgcgggatgtcgctgcagtcacacggctgctgagggcataccttgcgaggtttgtggtggcaccggattttgatgaggtagatgtagagcactggttgctgccccaagaggatgtggtggacagctaccttgtggagagccctgagacgcatgaggtcacggatttctgcagcttttacacactgccctcatcagtgttgaacaatgctaactatgcgacgctcaaagcggcatactcatattacaacgtttcaaccaaaactccattgcagcagctgatgaatgatgctcttattgttgccaaacggaagaattatgatgtgttcaatgctctcgatgtcatggagaatgagtcattcctcaaggagctcaagtttggtcctggagatgggcagctccactattacctctacaattaccgtattcgcaatggcatcaagccctctgagcttggtcttgtgctgttatagggcagtctaatcaggacagtcctgagtttacaccttccaggtctcactgtgcaatcccagtggtttcctcattttgtctattgtggtagtggtttctttgatatgattgccatgcccattgatgggagtccaagatgatttgcaaacaaggagactggaattagaaatcctttccttaatttaaggttattattcccattagtgacattttgtgtgcgtggtccacaacttgtatgctggcattgattttactgagaaattttgatacaacttgtgttatcgaagttgtttgtgtgct

SEQ ID NO: 28500 - protein, 445 aa, Zea mays subsp. mays
  peptide (1)..(445): Ceres Seq. ID no. 12409018
  misc_feature (255)..(444): Pfam Name: Pfam Description:  Myristoyl-CoA:protein N-myristoyltransferase
  misc_feature (13)..(445): NCBI GI NO: 34910442 NR Description: putative N-myristoyl transferase
  misc_feature (29)..(445): NCBI GI NO: 18423927 NR Description: N-myristoyl transferase; protein id: At5g57020
  misc_feature (156)..(445): NCBI GI NO: 8777442 NR Description: N-myristoyl transferase [Arabidopsis thaliana]
  misc_feature (29)..(91): NCBI GI NO: 8777442 NR Description: N-myristoyl transferase [Arabidopsis thaliana]
  misc_feature (244)..(445): NCBI GI NO: 6635379 NR Description: N-myristoyl transferase [Brassica oleracea]
  misc_feature (12)..(170): NCBI GI NO: 6635379 NR Description: N-myristoyl transferase [Brassica oleracea]
  misc_feature (56)..(444): NCBI GI NO: 13924516 NR Description: N-myristoyltransferase-like protein 2
  misc_feature (57)..(444): NCBI GI NO: 27735395 NR Description: Similar to N-myristoyltransferase 1
  misc_feature (51)..(444): NCBI GI NO: 13623535 NR Description: N-myristoyltransferase 2 [Homo sapiens]
  misc_feature (57)..(444): NCBI GI NO: 6679084 NR Description: N-myristoyltransferase 2 [Mus musculus]
PQTLPPIRPQIAMAAPNSNDAASASGTGPAGEEDISIEALARRVQEHMTLNSNPAARRHKFWETQPVGQFRDAADASLPNGPIEPPTPLSEVRADPYPLPAAFEWLTCDLDDDALLADLYSLLAHNYVEDDENMFRFNYSPAFLRWALKPPSFFRAWHIGVRAKESKKLVAFISGVPARIRARDDVVRMAEINFLCVHKKLRSKRLAPVLIREVTRRVHQENIWQAAYTAGIVLPTPITTCRYWHRSLNPKKLIDVGFSRLGPRMTMSRTVRLYKLPDAPLTPGFRRMELRDVAAVTRLLRAYLARFVVAPDFDEVDVEHWLLPQEDVVDSYLVESPETHEVTDFCSFYTLPSSVLNNANYATLKAAYSYYNVSTKTPLQQLMNDALIVAKRKNYDVFNALDVMENESFLKELKFGPGDGQLHYYLYNYRIRNGIKPSELGLVLL

SEQ ID NO: 28501 - protein, 433 aa, Zea mays subsp. mays
  peptide (1)..(433): Ceres Seq. ID no. 12409019
  misc_feature (243)..(432): Pfam Name: Pfam Description:  Myristoyl-CoA:protein N-myristoyltransferase
  misc_feature (1)..(433): NCBI GI NO: 34910442 NR Description: putative N-myristoyl transferase
  misc_feature (17)..(433): NCBI GI NO: 18423927 NR Description: N-myristoyl transferase; protein id: At5g57020
  misc_feature (144)..(433): NCBI GI NO: 8777442 NR Description: N-myristoyl transferase [Arabidopsis thaliana]
  misc_feature (17)..(79): NCBI GI NO: 8777442 NR Description: N-myristoyl transferase [Arabidopsis thaliana]
  misc_feature (232)..(433): NCBI GI NO: 6635379 NR Description: N-myristoyl transferase [Brassica oleracea]
  misc_feature (1)..(158): NCBI GI NO: 6635379 NR Description: N-myristoyl transferase [Brassica oleracea]
  misc_feature (44)..(432): NCBI GI NO: 13924516 NR Description: N-myristoyltransferase-like protein 2
  misc_feature (45)..(432): NCBI GI NO: 27735395 NR Description: Similar to N-myristoyltransferase 1
  misc_feature (39)..(432): NCBI GI NO: 13623535 NR Description: N-myristoyltransferase 2 [Homo sapiens]
  misc_feature (45)..(432): NCBI GI NO: 6679084 NR Description: N-myristoyltransferase 2 [Mus musculus]
MAAPNSNDAASASGTGPAGEEDISIEALARRVQEHMTLNSNPAARRHKFWETQPVGQFRDAADASLPNGPIEPPTPLSEVRADPYPLPAAFEWLTCDLDDDALLADLYSLLAHNYVEDDENMFRFNYSPAFLRWALKPPSFFRAWHIGVRAKESKKLVAFISGVPARIRARDDVVRMAEINFLCVHKKLRSKRLAPVLIREVTRRVHQENIWQAAYTAGIVLPTPITTCRYWHRSLNPKKLIDVGFSRLGPRMTMSRTVRLYKLPDAPLTPGFRRMELRDVAAVTRLLRAYLARFVVAPDFDEVDVEHWLLPQEDVVDSYLVESPETHEVTDFCSFYTLPSSVLNNANYATLKAAYSYYNVSTKTPLQQLMNDALIVAKRKNYDVFNALDVMENESFLKELKFGPGDGQLHYYLYNYRIRNGIKPSELGLVLL

SEQ ID NO: 28502 - protein, 398 aa, Zea mays subsp. mays
  peptide (1)..(398): Ceres Seq. ID no. 12409020
  misc_feature (208)..(397): Pfam Name: Pfam Description:  Myristoyl-CoA:protein N-myristoyltransferase
  misc_feature (1)..(398): NCBI GI NO: 34910442 NR Description: putative N-myristoyl transferase
  misc_feature (1)..(398): NCBI GI NO: 18423927 NR Description: N-myristoyl transferase; protein id: At5g57020
  misc_feature (109)..(398): NCBI GI NO: 8777442 NR Description: N-myristoyl transferase [Arabidopsis thaliana]
  misc_feature (1)..(44): NCBI GI NO: 8777442 NR Description: N-myristoyl transferase [Arabidopsis thaliana]
  misc_feature (197)..(398): NCBI GI NO: 6635379 NR Description: N-myristoyl transferase [Brassica oleracea]
  misc_feature (1)..(123): NCBI GI NO: 6635379 NR Description: N-myristoyl transferase [Brassica oleracea]
  misc_feature (9)..(397): NCBI GI NO: 13924516 NR Description: N-myristoyltransferase-like protein 2
  misc_feature (10)..(397): NCBI GI NO: 27735395 NR Description: Similar to N-myristoyltransferase 1
  misc_feature (4)..(397): NCBI GI NO: 13623535 NR Description: N-myristoyltransferase 2 [Homo sapiens]
  misc_feature (10)..(397): NCBI GI NO: 6679084 NR Description: N-myristoyltransferase 2 [Mus musculus]
MTLNSNPAARRHKFWETQPVGQFRDAADASLPNGPIEPPTPLSEVRADPYPLPAAFEWLTCDLDDDALLADLYSLLAHNYVEDDENMFRFNYSPAFLRWALKPPSFFRAWHIGVRAKESKKLVAFISGVPARIRARDDVVRMAEINFLCVHKKLRSKRLAPVLIREVTRRVHQENIWQAAYTAGIVLPTPITTCRYWHRSLNPKKLIDVGFSRLGPRMTMSRTVRLYKLPDAPLTPGFRRMELRDVAAVTRLLRAYLARFVVAPDFDEVDVEHWLLPQEDVVDSYLVESPETHEVTDFCSFYTLPSSVLNNANYATLKAAYSYYNVSTKTPLQQLMNDALIVAKRKNYDVFNALDVMENESFLKELKFGPGDGQLHYYLYNYRIRNGIKPSELGLVLL

SEQ ID NO: 28503 - DNA, 1052 bp, Zea mays subsp. mays
  misc_feature (1)..(1052): Ceres Seq. ID no. 12363055
gcacgagaccattacctagaacatcctaatcgaaaaaagtaccatctccaaagtgtccccagcggctaatgggtagatcatgtccataccgacgtttgcggcatttggccgttgtcaacgtctccaaagtgtcaaagtcgttccctacgtcatttcgtcaaaatcgagcactgtcgtgttcttatccggtcccgaacaaacaaccccgcttctgccggccgttttgcaggaggcgttgcggccatggcggcttcgaagcccatcttgtatagcgcgtggatcagctcctgctccttccgagtccggatcgccctcaacctcaaaggtgtggattatgagtacagggctgtgacaaggaacgatctagattacgaaaagatcaatccaatcaagtatgttccagcattggttgatggggattttgttgtttctgactccctggcaatcatattgtatcttgaagataaatatcctcaacaccctcttttgcctcaagatctcaaaaagaaagctataaatctgcagattgcaaatatagtttgttcaagcattcaacctcttcaatgttatgctgtaattggtctgcttgatggcaccttaggctctaaccagagccttcagattgttcggaattacaccgacaagggatttaaagcaatcgaaaaacttctggaaggttgtgacagtaaatatgctactggagacgaagtccaactgatgtgtttcttgcgccccagatgtatgcaggcgtgacgcgcttcggaattgatatgtcaaagtaccctcttctggagaggttctacaaagcctatatggagatcccagcatttcaagtcgcggttcctgaaaaacagccggatgcgcctgcgtccccatactgaaacggaggcagcaaccatattgatattcaaattgatttggttatcttggaatcatgttgtatgtagcatgacatagaaggccacgatgtatgcctatttgtttcgtacacattctggtttgtccgaagaatttcacagtaaataaggcccgatgatttgtgtagtagtgtt

SEQ ID NO: 28504 - protein, 169 aa, Zea mays subsp. mays
  peptide (1)..(169): Ceres Seq. ID no. 12363056
  misc_feature (1)..(165): NCBI GI NO: 11177839 NR Description: putative glutathione S-transferase OsGSTZ1
  misc_feature (1)..(165): NCBI GI NO: 11385487 NR Description: glutathione S-transferase GST 18 [Zea mays]
  misc_feature (1)..(165): NCBI GI NO: 15430707 NR Description: putative glutathione S-transferase OsGSTZ2
  misc_feature (1)..(165): NCBI GI NO: 11132027 NR Description: Glutathione S-transferase (GST class-zeta)
  misc_feature (8)..(165): NCBI GI NO: 29420155 NR Description: glutathione S-transferase Z1 [Malva pusilla]
  misc_feature (7)..(169): NCBI GI NO: 11385485 NR Description: glutathione S-transferase GST 17 [Zea mays]
  misc_feature (3)..(169): NCBI GI NO: 24061762 NR Description: glutathione S-transferase [Capsicum annuum]
  misc_feature (8)..(165): NCBI GI NO: 11132235 NR Description: Glutathione S-transferase zeta class
  misc_feature (8)..(165): NCBI GI NO: 28932694 NR Description: glutathione S-transferase zeta [Brassica napus]
  misc_feature (8)..(165): NCBI GI NO: 15226949 NR Description: glutathione transferase, putative
MAASKPILYSAWISSCSFRVRIALNLKGVDYEYRAVTRNDLDYEKINPIKYVPALVDGDFVVSDSLAIILYLEDKYPQHPLLPQDLKKKAINLQIANIVCSSIQPLQCYAVIGLLDGTLGSNQSLQIVRNYTDKGFKAIEKLLEGCDSKYATGDEVQLMCFLRPRCMQA

SEQ ID NO: 28505 - protein, 90 aa, Zea mays subsp. mays
  peptide (1)..(90): Ceres Seq. ID no. 12363057
MSIPTFAAFGRCQRLQSVKVVPYVISSKSSTVVFLSGPEQTTPLLPAVLQEALRPWRLRSPSCIARGSAPAPSESGSPSTSKVWIMSTGL

SEQ ID NO: 28506 - DNA, 872 bp, Zea mays subsp. mays
  misc_feature (1)..(872): Ceres Seq. ID no. 12372380
aaaccgtccacgcctcgtcccaaccctagccccgtcgatctcgcatggccaccggcccgcgatctctccacgccctcctcggcggcggcgcagtcgccgacttgctgctgtgtaggcggaggaacgcctcggcggcggccgtggtgggcgccaccgcggtctggttcgtcttcgagcgcgcgggctacagcttcccttccgtcctgtccaacgccctgctcctcctcgtcgccatcctcttcttctgggccaagtccgcgttgctgcttaacaggcctcttccacctcttcctaaccttgaggtttcagatgcagttgttgaaaaggctgcagattatgctcttgtatggatcaataggctgctggctgtcggtcatgacatcgccatcaagagaaataggaaagtttttataaaggtgatattgattttgtggctggtttcatttgttggaatgctcttcaactttcttacactcatttacattggtgtaatgctttctctgttggttccaccactctatgagaagtatcaggatcaggttgatgaaaaggttggcgtagcgcacagtataatatcgaggcacataaataccattgttaccagggctgggcaatcagccaaggagaagaagactgaataaaagaattgttttgatgtattgtggaacatctctggttgtcaggtggagttgatagtgggcttttcatctttggactctccatatgaacctccacttacattagttctcgatatgctgatctgaggttttgatgtgcgctgttgatttcaggaaatgagacggtttgtgtattttttctttttgaacatgaggtttactatgggcgcatatcttactcgaaatgatattttg

SEQ ID NO: 28507 - protein, 198 aa, Zea mays subsp. mays
  peptide (1)..(198): Ceres Seq. ID no. 12372381
  misc_feature (3)..(198): NCBI GI NO: 38345298 NR Description: OSJNBa0043A12.26
  misc_feature (7)..(182): NCBI GI NO: 18402246 NR Description: expressed protein; protein id: At3g19460
  misc_feature (7)..(182): NCBI GI NO: 21593206 NR Description: unknown [Arabidopsis thaliana]
  misc_feature (7)..(197): NCBI GI NO: 30679374 NR Description: expressed protein [Arabidopsis thaliana]
  misc_feature (33)..(197): NCBI GI NO: 25411624 NR Description: hypothetical protein At2g15280
  misc_feature (6)..(166): NCBI GI NO: 15232423 NR Description: putative protein; protein id: At3g54120.1
  misc_feature (7)..(184): NCBI GI NO: 26450318 NR Description: unknown protein [Arabidopsis thaliana]
  misc_feature (16)..(184): NCBI GI NO: 30681541 NR Description: reticulon family [Arabidopsis thaliana]
  misc_feature (8)..(167): NCBI GI NO: 34904202 NR Description: P0492F05.25
  misc_feature (8)..(167): NCBI GI NO: 15236556 NR Description: putative protein; protein id: At4g23630
MATGPRSLHALLGGGAVADLLLCRRRNASAAAVVGATAVWFVFERAGYSFPSVLSNALLLLVAILFFWAKSALLLNRPLPPLPNLEVSDAVVEKAADYALVWINRLLAVGHDIAIKRNRKVFIKVILILWLVSFVGMLFNFLTLIYIGVMLSLLVPPLYEKYQDQVDEKVGVAHSIISRHINTIVTRAGQSAKEKKTE

SEQ ID NO: 28508 - protein, 137 aa, Zea mays subsp. mays
  peptide (1)..(137): Ceres Seq. ID no. 12372382
KPSTPRPNPSPVDLAWPPARDLSTPSSAAAQSPTCCCVGGGTPRRRPWWAPPRSGSSSSARATASLPSCPTPCSSSSPSSSSGPSPRCCLTGLFHLFLTLRFQMQLLKRLQIMLLYGSIGCWLSVMTSPSREIGKFL

SEQ ID NO: 28509 - DNA, 1127 bp, Zea mays subsp. mays
  misc_feature (1)..(1127): Ceres Seq. ID no. 12391329
gcacgagaccattacctagaacatcctaatcgaaaaaataaacaaaaaagattgactaaactgcaccaatgtaaagctggttcactcgtgtaactgatgcaatgcagtatgcaaagctcctgcctttggccttgatccacatgcttggaaatgttttcaccaatatgagtttgggtaaggtgtctgtctccttcacccacaccatcaaggccatggagcccttcttctcggtcctcctctctatcctattcctaggagagacaccttctctaccagtgttgggttcacttgtccctattgttggcggagttgtattggcgtcgatgactgaagtttcattcaactggattggattctggagtgccatgacttcgaatcttatgaatcaatcgcggaacgtttacagcaagaaaattctcgctgataaagaggacagtttggatgacataaatctcttctcaataataactgtcatggcattcttgttatctgctccactgatgctatgtgtagaaggaatcaagtttagcccatcatatctacagaatgctggagttaatgtaaaagaattatttataagagcggcacttgctgggacatctttctatttttaccaacaggtttcgtacagtttattggctagagtatctcccgtgacccattcggttgccaactctcttaaacgtgtggtggtcattgtgtcatccgttctcttctttagaactttaatttcacctataaatgccttaggaaccggtgttgctcttgctggagtgttcctgtactcgcagttcaaaaagtcaaaaccaaaggctacggctgcatgaagagactatagaatgatggaggatttggaactatcagtcgacgtggtgaagcagactggccttcacggtagcaaacacatatagtttccccatgttgcatcttaaaaaaaatgtgttctcttgtcaggttctttggatgtgagaagcttgtacgtaagtttcatccacaaggtgtggtggaacacgtgaacaacggagatatagcattcttagatttcaagagaatacaaattttggaatatacttccatgtcattgaaactgacagaatgctctcactattatatatattctttacgcc

SEQ ID NO: 28510 - protein, 241 aa, Zea mays subsp. mays
  peptide (1)..(241): Ceres Seq. ID no. 12391330
  misc_feature (1)..(75): Pfam Name: Pfam Description:  Integral membrane protein DUF6
  misc_feature (1)..(241): NCBI GI NO: 1706110 NR Description: Triose phosphate/phosphate translocator
  misc_feature (2)..(238): NCBI GI NO: 7489171 NR Description: phosphate/ phosphoenolpyruvate translocator TABPPT10precursor
  misc_feature (1)..(241): NCBI GI NO: 7489743 NR Description: glucose-6-phosphate/ phosphate-translocatorprecursor homolog
  misc_feature (2)..(241): NCBI GI NO: 7546829 NR Description: phosphate/phosphoenolpyruvate translocator
  misc_feature (2)..(241): NCBI GI NO: 15242801 NR Description: phosphate/ phosphoenolpyruvate translocatorprecursor
  misc_feature (2)..(241): NCBI GI NO: 1778141 NR Description: phosphate/ phosphoenolpyruvate translocatorprecursor
  misc_feature (1)..(241): NCBI GI NO: 7489742 NR Description: glucose-6-phosphate/ phosphate-translocatorprecursor homolog
  misc_feature (2)..(241): NCBI GI NO: 13991929 NR Description: phosphoenolpyruvate/phosphate translocator
  misc_feature (2)..(241): NCBI GI NO: 21554233 NR Description: phosphate/ phosphoenolpyruvate translocatorprecursor
  misc_feature (1)..(241): NCBI GI NO: 29647427 NR Description: putative phosphoenolpyruvate/phosphate translocator
MQYAKLLPLALIHMLGNVFTNMSLGKVSVSFTHTIKAMEPFFSVLLSILFLGETPSLPVLGSLVPIVGGVVLASMTEVSFNWIGFWSAMTSNLMNQSRNVYSKKILADKEDSLDDINLFSIITVMAFLLSAPLMLCVEGIKFSPSYLQNAGVNVKELFIRAALAGTSFYFYQQVSYSLLARVSPVTHSVANSLKRVVVIVSSVLFFRTLISPINALGTGVALAGVFLYSQFKKSKPKATAA

SEQ ID NO: 28511 - protein, 228 aa, Zea mays subsp. mays
  peptide (1)..(228): Ceres Seq. ID no. 12391331
  misc_feature (1)..(62): Pfam Name: Pfam Description:  Integral membrane protein DUF6
  misc_feature (1)..(228): NCBI GI NO: 1706110 NR Description: Triose phosphate/phosphate translocator
  misc_feature (1)..(225): NCBI GI NO: 7489171 NR Description: phosphate/ phosphoenolpyruvate translocator TABPPT10precursor
  misc_feature (1)..(228): NCBI GI NO: 7489743 NR Description: glucose-6-phosphate/ phosphate-translocatorprecursor homolog
  misc_feature (1)..(228): NCBI GI NO: 7546829 NR Description: phosphate/phosphoenolpyruvate translocator
  misc_feature (1)..(228): NCBI GI NO: 15242801 NR Description: phosphate/ phosphoenolpyruvate translocatorprecursor
  misc_feature (1)..(228): NCBI GI NO: 1778141 NR Description: phosphate/ phosphoenolpyruvate translocatorprecursor
  misc_feature (1)..(228): NCBI GI NO: 7489742 NR Description: glucose-6-phosphate/ phosphate-translocatorprecursor homolog
  misc_feature (1)..(228): NCBI GI NO: 13991929 NR Description: phosphoenolpyruvate/phosphate translocator
  misc_feature (1)..(228): NCBI GI NO: 21554233 NR Description: phosphate/ phosphoenolpyruvate translocatorprecursor
  misc_feature (1)..(228): NCBI GI NO: 29647427 NR Description: putative phosphoenolpyruvate/phosphate translocator
MLGNVFTNMSLGKVSVSFTHTIKAMEPFFSVLLSILFLGETPSLPVLGSLVPIVGGVVLASMTEVSFNWIGFWSAMTSNLMNQSRNVYSKKILADKEDSLDDINLFSIITVMAFLLSAPLMLCVEGIKFSPSYLQNAGVNVKELFIRAALAGTSFYFYQQVSYSLLARVSPVTHSVANSLKRVVVIVSSVLFFRTLISPINALGTGVALAGVFLYSQFKKSKPKATAA

SEQ ID NO: 28512 - protein, 220 aa, Zea mays subsp. mays
  peptide (1)..(220): Ceres Seq. ID no. 12391332
  misc_feature (1)..(54): Pfam Name: Pfam Description:  Integral membrane protein DUF6
  misc_feature (1)..(220): NCBI GI NO: 1706110 NR Description: Triose phosphate/phosphate translocator
  misc_feature (1)..(217): NCBI GI NO: 7489171 NR Description: phosphate/ phosphoenolpyruvate translocator TABPPT10precursor
  misc_feature (1)..(220): NCBI GI NO: 7489743 NR Description: glucose-6-phosphate/ phosphate-translocatorprecursor homolog
  misc_feature (1)..(220): NCBI GI NO: 7546829 NR Description: phosphate/phosphoenolpyruvate translocator
  misc_feature (1)..(220): NCBI GI NO: 15242801 NR Description: phosphate/ phosphoenolpyruvate translocatorprecursor
  misc_feature (1)..(220): NCBI GI NO: 1778141 NR Description: phosphate/ phosphoenolpyruvate translocatorprecursor
  misc_feature (1)..(220): NCBI GI NO: 7489742 NR Description: glucose-6-phosphate/ phosphate-translocatorprecursor homolog
  misc_feature (1)..(220): NCBI GI NO: 13991929 NR Description: phosphoenolpyruvate/phosphate translocator
  misc_feature (1)..(220): NCBI GI NO: 21554233 NR Description: phosphate/ phosphoenolpyruvate translocatorprecursor
  misc_feature (1)..(220): NCBI GI NO: 29647427 NR Description: putative phosphoenolpyruvate/phosphate translocator
MSLGKVSVSFTHTIKAMEPFFSVLLSILFLGETPSLPVLGSLVPIVGGVVLASMTEVSFNWIGFWSAMTSNLMNQSRNVYSKKILADKEDSLDDINLFSIITVMAFLLSAPLMLCVEGIKFSPSYLQNAGVNVKELFIRAALAGTSFYFYQQVSYSLLARVSPVTHSVANSLKRVVVIVSSVLFFRTLISPINALGTGVALAGVFLYSQFKKSKPKATAA

SEQ ID NO: 28513 - DNA, 958 bp, Zea mays subsp. mays
  misc_feature (1)..(958): Ceres Seq. ID no. 12379360
gtatctctctcctccctggctctcgtcccccccaccgagtcgtcgccccctcgctttcaccccacgcggaagcaagaattcgtcgtcaaattcccagcttgcgcgtgtttctgtggatttcttcccgcttccctgctcctgcctcctatgggcctttgatccggggcttcgtggatcttgggaagaggaggtgtggtgggcgcctcggcggcgatctggcggggaggatatggccagcgggaaggagccgatcgaggtcaggtttcgtctcttcgacggcacggatatcgggcctacgaagtacgatccctccaccacggtctcctcgctcaaggagttcatcctcgctcggtggccgcaagataaggatatagctccaaaaactgttaatgacttgaagcttatcaatggtggaaggatattggagaataaccggacacttgcagagtcccgtgttccagtaggagagatcccaggtggtgtaattacaatgcatgtggtagtgcgacctccacaagctgacaaaaacaagaagcagcttgccaattcccccaagcagaacagatgtggatgcaccattctctgataaggcgtctgcttggtgctgtacaatctgtgtgtacacataagattttgtatgtgctttgctgtgttcacacaagcatggattcgttttgatatccaattcttgaagccatacaaattccagaagtaagatcccacggaatacgaagatttctggatcgttttgttctagagtgtaggattggatgcttcctgctgtataaattgtgttgtcaaaactgaaaaaaaaatctctttcttttctgctatattgacttattatcgattctttctagctcggttgcttttgattcgtgtaacagaaatattgtactcatgtatatgtaacttgcaaaaggagtaatgtatggtgttatggtaattggtaaagggg

SEQ ID NO: 28514 - protein, 194 aa, Zea mays subsp. mays
  peptide (1)..(194): Ceres Seq. ID no. 12379361
  misc_feature (84)..(171): Pfam Name: Pfam Description:  Ubiquitin family
  misc_feature (81)..(194): NCBI GI NO: 4097587 NR Description: NTGP5 [Nicotiana tabacum]
  misc_feature (77)..(194): NCBI GI NO: 15219188 NR Description: expressed protein; protein id: At1g22050.1
  misc_feature (84)..(194): NCBI GI NO: 21592966 NR Description: ubiquitin-fusion protein, putative
  misc_feature (84)..(194): NCBI GI NO: 15218145 NR Description: expressed protein; protein id: At1g77870
  misc_feature (77)..(175): NCBI GI NO: 25402954 NR Description: protein F2E2.12 [imported] - Arabidopsis thaliana
  misc_feature (73)..(194): NCBI GI NO: 38347220 NR Description: OSJNBa0055C08.14
  misc_feature (77)..(191): NCBI GI NO: 18417680 NR Description: expressed protein; protein id: At5g15460
  misc_feature (84)..(194): NCBI GI NO: 22331362 NR Description: expressed protein; protein id: At3g26980
  misc_feature (81)..(194): NCBI GI NO: 15234839 NR Description: expressed protein; protein id: At4g24990
  misc_feature (81)..(194): NCBI GI NO: 4097567 NR Description: ATGP4 [Arabidopsis thaliana]
YLSPPWLSSPPPSRRPLAFTPRGSKNSSSNSQLARVSVDFFPLPCSCLLWAFDPGLRGSWEEEVWWAPRRRSGGEDMASGKEPIEVRFRLFDGTDIGPTKYDPSTTVSSLKEFILARWPQDKDIAPKTVNDLKLINGGRILENNRTLAESRVPVGEIPGGVITMHVVVRPPQADKNKKQLANSPKQNRCGCTIL

SEQ ID NO: 28515 - protein, 123 aa, Zea mays subsp. mays
  peptide (1)..(123): Ceres Seq. ID no. 12379362
ISLLPGSRPPHRVVAPSLSPHAEARIRRQIPSLRVFLWISSRFPAPASYGPLIRGFVDLGKRRCGGRLGGDLAGRIWPAGRSRSRSGFVSSTARISGLRSTIPPPRSPRSRSSSSLGGRKIRI

SEQ ID NO: 28516 - protein, 118 aa, Zea mays subsp. mays
  peptide (1)..(118): Ceres Seq. ID no. 12379363
  misc_feature (8)..(95): Pfam Name: Pfam Description:  Ubiquitin family
  misc_feature (5)..(118): NCBI GI NO: 4097587 NR Description: NTGP5 [Nicotiana tabacum]
  misc_feature (1)..(118): NCBI GI NO: 15219188 NR Description: expressed protein; protein id: At1g22050.1
  misc_feature (8)..(118): NCBI GI NO: 21592966 NR Description: ubiquitin-fusion protein, putative
  misc_feature (8)..(118): NCBI GI NO: 15218145 NR Description: expressed protein; protein id: At1g77870
  misc_feature (1)..(99): NCBI GI NO: 25402954 NR Description: protein F2E2.12 [imported] - Arabidopsis thaliana
  misc_feature (1)..(118): NCBI GI NO: 38347220 NR Description: OSJNBa0055C08.14
  misc_feature (1)..(115): NCBI GI NO: 18417680 NR Description: expressed protein; protein id: At5g15460
  misc_feature (8)..(118): NCBI GI NO: 22331362 NR Description: expressed protein; protein id: At3g26980
  misc_feature (5)..(118): NCBI GI NO: 15234839 NR Description: expressed protein; protein id: At4g24990
  misc_feature (5)..(118): NCBI GI NO: 4097567 NR Description: ATGP4 [Arabidopsis thaliana]
MASGKEPIEVRFRLFDGTDIGPTKYDPSTTVSSLKEFILARWPQDKDIAPKTVNDLKLINGGRILENNRTLAESRVPVGEIPGGVITMHVVVRPPQADKNKKQLANSPKQNRCGCTIL

SEQ ID NO: 28517 - DNA, 1099 bp, Zea mays subsp. mays
  misc_feature (1)..(1099): Ceres Seq. ID no. 12381037
acccagacctagccactccccagcaggcaagcaacctcgccaaaaccctacgccgctcaactatgctcatccggcgaccgctccaaaccctcaccctccccctcctccgccgccacttctccgccgccaccgtcgaggcctttgtgtctcccgaccaagccaccgacccgctctccccgccgtacgactacctcccgggccacccgagccagacgctaagcacaatgaggtgatcctcgccgtcccgcgcgcctcttcggggcgccacgtagccgccaaggagcgcaaggccgggcgggtccccgccatcgtgttcgagcaggagaacggacaggagggcggcaacaagcgcctcatctccgttcgggccaatcagatccgcaagctcgtcgaccacctcggccggtccttcttcctctccaggctgttcagtctccaggtctggtcagaacatgccgggcagggcgaactcatcgaaagcgtccgcgtcctacccagaaaggtacacctgcatgcaggcactgatgaaccgctgaatatcacatttatgagagcaccttcttctgcacttctcaaaatagatgttcctctgatgttcattggagaggatgcctcacctggtctcaggaaaggagcttacttcaacaccataaaacgaacagccaagtatctgtgccctgctgacatagtaccaccatacattaaagtggatctaagtgagttggatgtaggacagaaattgctgatgcgtgatctgaaagttcatcctgcgttgaagctgcttcattcgccagatcagcccatctgtaactttaccggatcaaggtctccagaatagaagaagggaaaataacttgcttctttgtatgagctgttttgagcacaataaggttttgtttcgtacttgagtgattcaggtgttacttgtcctactgttaggatgaattgtagccagagacacctatttttacctcaggaagggatcttttgagcaggtagatgctactacagctagacgcacttgcaaagtttcctaaatatggtcatctagtgttaacagaaacttatggtgctgtgagcaatattgaaaattgtttgc

SEQ ID NO: 28518 - protein, 278 aa, Zea mays subsp. mays
  peptide (1)..(278): Ceres Seq. ID no. 12381038
  misc_feature (65)..(238): NCBI GI NO: 34912284 NR Description: P0451D05.2
  misc_feature (65)..(278): NCBI GI NO: 15236554 NR Description: putative protein; protein id: At4g23620
  misc_feature (76)..(277): NCBI GI NO: 15240108 NR Description: putative protein; protein id: At5g66860
  misc_feature (89)..(259): NCBI GI NO: 23106991 NR Description: hypothetical protein
  misc_feature (78)..(262): NCBI GI NO: 23015980 NR Description: hypothetical protein
  misc_feature (113)..(278): NCBI GI NO: 16124740 NR Description: ribosomal 5S rRNA E-loop binding proteinCtc/L25/TL5
  misc_feature (83)..(278): NCBI GI NO: 22965584 NR Description: hypothetical protein [Rhodospirillum rubrum]
  misc_feature (162)..(265): NCBI GI NO: 27382552 NR Description: 50S ribosomal protein L25
  misc_feature (162)..(265): NCBI GI NO: 22961530 NR Description: hypothetical protein [Rhodopseudomonas palustris]
  misc_feature (159)..(278): NCBI GI NO: 13472406 NR Description: 50S ribosomal protein L25 [Mesorhizobium loti]
PRPSHSPAGKQPRQNPTPLNYAHPATAPNPHPPPPPPPLLRRHRRGLCVSRPSHRPALPAVRLPPGPPEPDAKHNEVILAVPRASSGRHVAAKERKAGRVPAIVFEQENGQEGGNKRLISVRANQIRKLVDHLGRSFFLSRLFSLQVWSEHAGQGELIESVRVLPRKVHLHAGTDEPLNITFMRAPSSALLKIDVPLMFIGEDASPGLRKGAYFNTIKRTAKYLCPADIVPPYIKVDLSELDVGQKLLMRDLKVHPALKLLHSPDQPICNFTGSRSPE

SEQ ID NO: 28519 - DNA, 1130 bp, Zea mays subsp. mays
  misc_feature (1)..(1130): Ceres Seq. ID no. 12386565
cccgaaagccaaagaggaaaaaggaattgcgcctcccgctacgctattaccgccggcggccgctgccatggacgttggcgcgaaggaggaggagatgggtcaagtgtggtggggccaccgcgcgtggtccctcctctccgctgttcgtgcacgggcgccgctagtgcagtgcatcaccaacctcgtctcaatggacatcgccgccaacgtgctcctcgccgcgggcgcctccccggctatggtccactccctccgcgaggtgcccgactttaccccgcgctgcgacgccgtgtatgtcaacgtcggcacgctctcggaggactggctcccctccatgcgcgccgccgcctccgccggccgcccctgggtgctcgaccccgtcgccgccgccgcctccgggttccggatgaaagcctgcctcgagcttctgtcgctctgcccagcagtcgtcagggggaacgcctctgaaattctcgcgctcgcttcccgctcaaccgccgcctcttccaatttcaagggtgtggacagttcacattgctctgttgatgctattgaagctgcaaaagcgttggcactgtccagcagtgctgttgtcgcggtatctggagctgttgatttcgtcactgatgggaagcaggttatcagcgtgagcaacggtgtgcccatgatgcagaagatcaccgcaacagggtgcgctgtgactgctcttattgctgcatttgttgccatggaaccttctgatgccatagttgcagcggcatgcgctcttgccatctttggtctggtgggagagattgggatggagtcagccaaggggcctgcctctcttaggatgcacctcatcgacgctctctactgcctcaatgaagaaacagtcacttctcgggttaggatttccttgcgaccatgatgcgcggacgcatgccatggctactgttttttcaggtaaatatggagtttcgaataataggaaggctgagttcattttctgaaatgtcttgataaccatgaaaatcatagacactcctttaaccttcacgactgtacgaaatacctagatgtgatgcccaagttgtgcctgaattgtcagctgtacatatttaatacagtaaaatggggaaccttgtttc

SEQ ID NO: 28520 - protein, 302 aa, Zea mays subsp. mays
  peptide (1)..(302): Ceres Seq. ID no. 12386566
  misc_feature (45)..(288): Pfam Name: Pfam Description:  Hydroxyethylthiazole kinase family
  misc_feature (29)..(300): NCBI GI NO: 34915114 NR Description: putative hydoxyethylthiazole kinase
  misc_feature (29)..(299): NCBI GI NO: 15229565 NR Description: hydoxyethylthiazole kinase, putative
  misc_feature (34)..(290): NCBI GI NO: 24216064 NR Description: hydroxyethylthiazole kinase
  misc_feature (52)..(290): NCBI GI NO: 15802579 NR Description: hydoxyethylthiazole kinase
  misc_feature (45)..(301): NCBI GI NO: 28899986 NR Description: putative hydroxyethylthiazole kinase
  misc_feature (52)..(290): NCBI GI NO: 15832161 NR Description: hydoxyethylthiazole kinase
  misc_feature (45)..(294): NCBI GI NO: 16761089 NR Description: hydroxyethylthiazole kinase
  misc_feature (52)..(290): NCBI GI NO: 16130042 NR Description: hydoxyethylthiazole kinase [Escherichia coli K12]
  misc_feature (45)..(294): NCBI GI NO: 16765476 NR Description: hydoxyethylthiazole kinase (THZ kinase)
  misc_feature (52)..(290): NCBI GI NO: 24113480 NR Description: hydoxyethylthiazole kinase
PKAKEEKGIAPPATLLPPAAAAMDVGAKEEEMGQVWWGHRAWSLLSAVRARAPLVQCITNLVSMDIAANVLLAAGASPAMVHSLREVPDFTPRCDAVYVNVGTLSEDWLPSMRAAASAGRPWVLDPVAAAASGFRMKACLELLSLCPAVVRGNASEILALASRSTAASSNFKGVDSSHCSVDAIEAAKALALSSSAVVAVSGAVDFVTDGKQVISVSNGVPMMQKITATGCAVTALIAAFVAMEPSDAIVAAACALAIFGLVGEIGMESAKGPASLRMHLIDALYCLNEETVTSRVRISLRP

SEQ ID NO: 28521 - protein, 280 aa, Zea mays subsp. mays
  peptide (1)..(280): Ceres Seq. ID no. 12386567
  misc_feature (23)..(266): Pfam Name: Pfam Description:  Hydroxyethylthiazole kinase family
  misc_feature (7)..(278): NCBI GI NO: 34915114 NR Description: putative hydoxyethylthiazole kinase
  misc_feature (7)..(277): NCBI GI NO: 15229565 NR Description: hydoxyethylthiazole kinase, putative
  misc_feature (12)..(268): NCBI GI NO: 24216064 NR Description: hydroxyethylthiazole kinase
  misc_feature (30)..(268): NCBI GI NO: 15802579 NR Description: hydoxyethylthiazole kinase
  misc_feature (23)..(279): NCBI GI NO: 28899986 NR Description: putative hydroxyethylthiazole kinase
  misc_feature (30)..(268): NCBI GI NO: 15832161 NR Description: hydoxyethylthiazole kinase
  misc_feature (23)..(272): NCBI GI NO: 16761089 NR Description: hydroxyethylthiazole kinase
  misc_feature (30)..(268): NCBI GI NO: 16130042 NR Description: hydoxyethylthiazole kinase [Escherichia coli K12]
  misc_feature (23)..(272): NCBI GI NO: 16765476 NR Description: hydoxyethylthiazole kinase (THZ kinase)
  misc_feature (30)..(268): NCBI GI NO: 24113480 NR Description: hydoxyethylthiazole kinase
MDVGAKEEEMGQVWWGHRAWSLLSAVRARAPLVQCITNLVSMDIAANVLLAAGASPAMVHSLREVPDFTPRCDAVYVNVGTLSEDWLPSMRAAASAGRPWVLDPVAAAASGFRMKACLELLSLCPAVVRGNASEILALASRSTAASSNFKGVDSSHCSVDAIEAAKALALSSSAVVAVSGAVDFVTDGKQVISVSNGVPMMQKITATGCAVTALIAAFVAMEPSDAIVAAACALAIFGLVGEIGMESAKGPASLRMHLIDALYCLNEETVTSRVRISLRP

SEQ ID NO: 28522 - protein, 271 aa, Zea mays subsp. mays
  peptide (1)..(271): Ceres Seq. ID no. 12386568
  misc_feature (14)..(257): Pfam Name: Pfam Description:  Hydroxyethylthiazole kinase family
  misc_feature (1)..(269): NCBI GI NO: 34915114 NR Description: putative hydoxyethylthiazole kinase
  misc_feature (1)..(268): NCBI GI NO: 15229565 NR Description: hydoxyethylthiazole kinase, putative
  misc_feature (3)..(259): NCBI GI NO: 24216064 NR Description: hydroxyethylthiazole kinase
  misc_feature (21)..(259): NCBI GI NO: 15802579 NR Description: hydoxyethylthiazole kinase
  misc_feature (14)..(270): NCBI GI NO: 28899986 NR Description: putative hydroxyethylthiazole kinase
  misc_feature (21)..(259): NCBI GI NO: 15832161 NR Description: hydoxyethylthiazole kinase
  misc_feature (14)..(263): NCBI GI NO: 16761089 NR Description: hydroxyethylthiazole kinase
  misc_feature (21)..(259): NCBI GI NO: 16130042 NR Description: hydoxyethylthiazole kinase [Escherichia coli K12]
  misc_feature (14)..(263): NCBI GI NO: 16765476 NR Description: hydoxyethylthiazole kinase (THZ kinase)
  misc_feature (21)..(259): NCBI GI NO: 24113480 NR Description: hydoxyethylthiazole kinase
MGQVWWGHRAWSLLSAVRARAPLVQCITNLVSMDIAANVLLAAGASPAMVHSLREVPDFTPRCDAVYVNVGTLSEDWLPSMRAAASAGRPWVLDPVAAAASGFRMKACLELLSLCPAVVRGNASEILALASRSTAASSNFKGVDSSHCSVDAIEAAKALALSSSAVVAVSGAVDFVTDGKQVISVSNGVPMMQKITATGCAVTALIAAFVAMEPSDAIVAAACALAIFGLVGEIGMESAKGPASLRMHLIDALYCLNEETVTSRVRISLRP

SEQ ID NO: 28523 - DNA, 853 bp, Zea mays subsp. mays
  misc_feature (1)..(853): Ceres Seq. ID no. 12402503
ctatatatccacacggacggagcccgcgtcattgtgcggtgccctccggagcgcacggcggcggcctcctgccgaccttcgcggtagcaagctagcagctagctagccgcagttagcgtctctttcgtccgtcctcctgcgccggccgtcatgaccttcccgctggtttgctactgcaacgcggtgccgcgccccgtggccgcgctgttcaagaccatccacgccgcggcgctggtggtcgtgctggtcctctgcttcctgggcctctacgagttcccctacgaccccgaggaccacgcgccggtgatcaacgggcgggcccgcggcgggcgggacgcccctgggccggaggcggtgaagcggcacctcccgctcgtcgagttcctggagctgatggtggtggctccgtcgtcgccgtcgggggcggaggcggctccgacgtgccgggtgtgcctggagaggctggaggcggcggacggggtgcggcggctgggcaactgcgcccacgcgttccacgcgcgctgcatcgaccgctggatcgacctgggcgaggtgacgtgcccgctgtgccgctcccacctgctgccgcgccggcgcgccggcctgcttgccatggcacggcttggcgacggctagtagtcgcccgtccgtccgtccgtacctggttgtttccttgccacgtgacgtgcgtgcccgtgcccgtgtccgtatatatgcttggctttcaggcggcgctggtgccggatgggggcggaccaaccgcgaactgatcgcgattagcaggacgatggactaaccaccaacctgatgttattaatgaatgggcgcaagttaaattaaccggaggaggttg

SEQ ID NO: 28524 - protein, 161 aa, Zea mays subsp. mays
  peptide (1)..(161): Ceres Seq. ID no. 12402504
  misc_feature (98)..(140): Pfam Name: RING finger Pfam Description: Zinc finger, C3HC4 type
  misc_feature (1)..(159): NCBI GI NO: 38345870 NR Description: OSJNBa0064M23.12
  misc_feature (1)..(146): NCBI GI NO: 15233117 NR Description: RING finger protein; protein id: At3g61460
  misc_feature (30)..(149): NCBI GI NO: 15233352 NR Description: RING-H2 finger protein RHA1a -like protein
  misc_feature (73)..(142): NCBI GI NO: 21554155 NR Description: RING zinc finger protein-like
  misc_feature (73)..(142): NCBI GI NO: 15238072 NR Description: RING zinc finger protein-like
  misc_feature (62)..(149): NCBI GI NO: 11358776 NR Description: RING-H2 finger protein RHA1a
  misc_feature (80)..(150): NCBI GI NO: 11358777 NR Description: RING-H2 finger protein RHA1b
  misc_feature (80)..(150): NCBI GI NO: 15233350 NR Description: RING-H2 finger protein RHA1b; protein id:At4g11360
  misc_feature (57)..(152): NCBI GI NO: 34894518 NR Description: P0551A11.23
  misc_feature (97)..(146): NCBI GI NO: 18411282 NR Description: similar to RING finger protein
MTFPLVCYCNAVPRPVAALFKTIHAAALVVVLVLCFLGLYEFPYDPEDHAPVINGRARGGRDAPGPEAVKRHLPLVEFLELMVVAPSSPSGAEAAPTCRVCLERLEAADGVRRLGNCAHAFHARCIDRWIDLGEVTCPLCRSHLLPRRRAGLLAMARLGDG

SEQ ID NO: 28525 - protein, 80 aa, Zea mays subsp. mays
  peptide (1)..(80): Ceres Seq. ID no. 12402505
  misc_feature (17)..(59): Pfam Name: RING finger Pfam Description: Zinc finger, C3HC4 type
  misc_feature (1)..(78): NCBI GI NO: 38345870 NR Description: OSJNBa0064M23.12
  misc_feature (1)..(65): NCBI GI NO: 15233117 NR Description: RING finger protein; protein id: At3g61460
  misc_feature (1)..(68): NCBI GI NO: 15233352 NR Description: RING-H2 finger protein RHA1a -like protein
  misc_feature (1)..(61): NCBI GI NO: 21554155 NR Description: RING zinc finger protein-like
  misc_feature (1)..(61): NCBI GI NO: 15238072 NR Description: RING zinc finger protein-like
  misc_feature (1)..(68): NCBI GI NO: 11358776 NR Description: RING-H2 finger protein RHA1a
  misc_feature (1)..(69): NCBI GI NO: 11358777 NR Description: RING-H2 finger protein RHA1b
  misc_feature (1)..(69): NCBI GI NO: 15233350 NR Description: RING-H2 finger protein RHA1b; protein id:At4g11360
  misc_feature (1)..(71): NCBI GI NO: 34894518 NR Description: P0551A11.23
  misc_feature (16)..(65): NCBI GI NO: 18411282 NR Description: similar to RING finger protein
MVVAPSSPSGAEAAPTCRVCLERLEAADGVRRLGNCAHAFHARCIDRWIDLGEVTCPLCRSHLLPRRRAGLLAMARLGDG

SEQ ID NO: 28526 - DNA, 1619 bp, Zea mays subsp. mays
  misc_feature (1)..(1619): Ceres Seq. ID no. 12350003
agggacaaagaaaggaaagggacgcccgtctcgtcacgtcctccacccccgccgccatggctgccctgggcctgctcctcctcgccgtcgtcggtgccaccaacgccgcggcgccgggcggtagaatgtccatcatctcctacaacgaggagcacgccgcgcgcgggctggagcggacggagccggaggcccggacgctgtacgagctctggctcgccgagcacggccgcgcctacaacgcgctcggcgagcgcgaccgccgcttccgcgtgttctgggacaacctacgcttcgtcgacgcgcacaacgagcgcgccgcggagcacggcttccgcctcggcatgaaccagttcgccgacctcaccaacgacgagttccgcgccgcgtacctcggcgccaggatccccgccgcccggagaaggggaaccgccgtgggggagaggtaccgccacggcggtggcgccgaggagctgccggagagcgtcgactggagggagaagggcgccgttgcgcccgtcaagaaccaggggcagtgcggaagttgctgggctttctctgcagtaagctcagtagaaagcgttaaccaaattgttactggtgagatggtgaccttgtccgagcaggagcttgtagagtgctcgactgatggagggaacagcggctgcaatggtgggcttatggatgccgcatttgattttatcataaagaacgggggcattgatactgaaggagactacccttacaaagctgtggatgggaagtgtgacatcaacagggaaaatgccaaggttgtgagcatcgatggctttgaagatgtgcctgaaaacgacgagaaatcattgcagaaggcagttgctcaccagcccgtcagcgttgccattgaggctggtggccgggagttccagctgtacaaagcgggtgtctttagtggaacttgcaccacaaatcttgaccacggtgtcgtcgctgtcggctacggcaccgaaaatgggaaggactactggattgtccgcaactcttggggtgcaaagtggggcgaggatggttacatccgtatggagaggaacgtcaatgccaccactgggaagtgcgggattgctatgatggcatcctaccctaccaagaagggcgcaaaccctcccaagccgtctccaacccctccaacgccgccgcctcccccggttgcccctgacaatgtctgcgatgagaacttctcttgcgcagcgggcagcacctgctgctgtgcgtttggtttcaggaacgtctgcttggtctggggttgctgtccgatggaaggtgccacctgctgcaaggaccacgccagctgctgcccgccgggttaccctgtgtgcaacgtcagagccggaacttgctcagtgagcaagaacagcccgctgagcgtgaaggccttgaagcgcaccctcgccaagctgaacagcgcatgagctcgtccagacatcatggatctggagaggaatgggaccgccccggagcttttcagactctgcgtcctgatacaagctttcatagataacattatattgtatatctaagtattacttggcgtcccataaatccgttgtaaatatcaagctataatttctactatcttcgttctc

SEQ ID NO: 28527 - protein, 480 aa, Zea mays subsp. mays
  peptide (1)..(480): Ceres Seq. ID no. 12350004
  misc_feature (157)..(373): Pfam Name: Pfam Description:  Papain family cysteine protease
  misc_feature (18)..(479): NCBI GI NO: 129232 NR Description: Oryzain beta chain precursor
  misc_feature (11)..(476): NCBI GI NO: 6682829 NR Description: cysteine protease component of protease-inhibitorcomplex
  misc_feature (10)..(476): NCBI GI NO: 7435806 NR Description: cysteine proteinase mir3 (EC 3.4.22.-) - maize
  misc_feature (18)..(478): NCBI GI NO: 129231 NR Description: Oryzain alpha chain precursor
  misc_feature (24)..(480): NCBI GI NO: 7435791 NR Description: cysteine proteinase (EC 3
  misc_feature (19)..(476): NCBI GI NO: 13897890 NR Description: putative cysteine protease [Ipomoea batatas]
  misc_feature (24)..(475): NCBI GI NO: 18422289 NR Description: cysteine proteinase RD21A; protein id: At5g43060
  misc_feature (22)..(476): NCBI GI NO: 7435801 NR Description: cysteine proteinase (EC 3
  misc_feature (22)..(472): NCBI GI NO: 18401614 NR Description: cysteine proteinase RD21A; protein id: At1g47128
  misc_feature (22)..(472): NCBI GI NO: 14517542 NR Description: F2G19.31/F2G19.31 [Arabidopsis thaliana]
GQRKERDARLVTSSTPAAMAALGLLLLAVVGATNAAAPGGRMSIISYNEEHAARGLERTEPEARTLYELWLAEHGRAYNALGERDRRFRVFWDNLRFVDAHNERAAEHGFRLGMNQFADLTNDEFRAAYLGARIPAARRRGTAVGERYRHGGGAEELPESVDWREKGAVAPVKNQGQCGSCWAFSAVSSVESVNQIVTGEMVTLSEQELVECSTDGGNSGCNGGLMDAAFDFIIKNGGIDTEGDYPYKAVDGKCDINRENAKVVSIDGFEDVPENDEKSLQKAVAHQPVSVAIEAGGREFQLYKAGVFSGTCTTNLDHGVVAVGYGTENGKDYWIVRNSWGAKWGEDGYIRMERNVNATTGKCGIAMMASYPTKKGANPPKPSPTPPTPPPPPVAPDNVCDENFSCAAGSTCCCAFGFRNVCLVWGCCPMEGATCCKDHASCCPPGYPVCNVRAGTCSVSKNSPLSVKALKRTLAKLNSA

SEQ ID NO: 28528 - protein, 462 aa, Zea mays subsp. mays
  peptide (1)..(462): Ceres Seq. ID no. 12350005
  misc_feature (139)..(355): Pfam Name: Pfam Description:  Papain family cysteine protease
  misc_feature (1)..(461): NCBI GI NO: 129232 NR Description: Oryzain beta chain precursor
  misc_feature (1)..(458): NCBI GI NO: 6682829 NR Description: cysteine protease component of protease-inhibitorcomplex
  misc_feature (1)..(458): NCBI GI NO: 7435806 NR Description: cysteine proteinase mir3 (EC 3.4.22.-) - maize
  misc_feature (1)..(460): NCBI GI NO: 129231 NR Description: Oryzain alpha chain precursor
  misc_feature (6)..(462): NCBI GI NO: 7435791 NR Description: cysteine proteinase (EC 3
  misc_feature (1)..(458): NCBI GI NO: 13897890 NR Description: putative cysteine protease [Ipomoea batatas]
  misc_feature (6)..(457): NCBI GI NO: 18422289 NR Description: cysteine proteinase RD21A; protein id: At5g43060
  misc_feature (4)..(458): NCBI GI NO: 7435801 NR Description: cysteine proteinase (EC 3
  misc_feature (4)..(454): NCBI GI NO: 18401614 NR Description: cysteine proteinase RD21A; protein id: At1g47128
  misc_feature (4)..(454): NCBI GI NO: 14517542 NR Description: F2G19.31/F2G19.31 [Arabidopsis thaliana]
MAALGLLLLAVVGATNAAAPGGRMSIISYNEEHAARGLERTEPEARTLYELWLAEHGRAYNALGERDRRFRVFWDNLRFVDAHNERAAEHGFRLGMNQFADLTNDEFRAAYLGARIPAARRRGTAVGERYRHGGGAEELPESVDWREKGAVAPVKNQGQCGSCWAFSAVSSVESVNQIVTGEMVTLSEQELVECSTDGGNSGCNGGLMDAAFDFIIKNGGIDTEGDYPYKAVDGKCDINRENAKVVSIDGFEDVPENDEKSLQKAVAHQPVSVAIEAGGREFQLYKAGVFSGTCTTNLDHGVVAVGYGTENGKDYWIVRNSWGAKWGEDGYIRMERNVNATTGKCGIAMMASYPTKKGANPPKPSPTPPTPPPPPVAPDNVCDENFSCAAGSTCCCAFGFRNVCLVWGCCPMEGATCCKDHASCCPPGYPVCNVRAGTCSVSKNSPLSVKALKRTLAKLNSA

SEQ ID NO: 28529 - protein, 439 aa, Zea mays subsp. mays
  peptide (1)..(439): Ceres Seq. ID no. 12350006
  misc_feature (116)..(332): Pfam Name: Pfam Description:  Papain family cysteine protease
  misc_feature (1)..(438): NCBI GI NO: 129232 NR Description: Oryzain beta chain precursor
  misc_feature (1)..(435): NCBI GI NO: 6682829 NR Description: cysteine protease component of protease-inhibitorcomplex
  misc_feature (1)..(435): NCBI GI NO: 7435806 NR Description: cysteine proteinase mir3 (EC 3.4.22.-) - maize
  misc_feature (1)..(437): NCBI GI NO: 129231 NR Description: Oryzain alpha chain precursor
  misc_feature (1)..(439): NCBI GI NO: 7435791 NR Description: cysteine proteinase (EC 3
  misc_feature (1)..(435): NCBI GI NO: 13897890 NR Description: putative cysteine protease [Ipomoea batatas]
  misc_feature (1)..(434): NCBI GI NO: 18422289 NR Description: cysteine proteinase RD21A; protein id: At5g43060
  misc_feature (1)..(435): NCBI GI NO: 7435801 NR Description: cysteine proteinase (EC 3
  misc_feature (1)..(431): NCBI GI NO: 18401614 NR Description: cysteine proteinase RD21A; protein id: At1g47128
  misc_feature (1)..(431): NCBI GI NO: 14517542 NR Description: F2G19.31/F2G19.31 [Arabidopsis thaliana]
MSIISYNEEHAARGLERTEPEARTLYELWLAEHGRAYNALGERDRRFRVFWDNLRFVDAHNERAAEHGFRLGMNQFADLTNDEFRAAYLGARIPAARRRGTAVGERYRHGGGAEELPESVDWREKGAVAPVKNQGQCGSCWAFSAVSSVESVNQIVTGEMVTLSEQELVECSTDGGNSGCNGGLMDAAFDFIIKNGGIDTEGDYPYKAVDGKCDINRENAKVVSIDGFEDVPENDEKSLQKAVAHQPVSVAIEAGGREFQLYKAGVFSGTCTTNLDHGVVAVGYGTENGKDYWIVRNSWGAKWGEDGYIRMERNVNATTGKCGIAMMASYPTKKGANPPKPSPTPPTPPPPPVAPDNVCDENFSCAAGSTCCCAFGFRNVCLVWGCCPMEGATCCKDHASCCPPGYPVCNVRAGTCSVSKNSPLSVKALKRTLAKLNSA

SEQ ID NO: 28530 - DNA, 1904 bp, Zea mays subsp. mays
  misc_feature (1)..(1904): Ceres Seq. ID no. 12406864
agtctagctagaatacactcgcgttcaaaacaaacacacagcgtcgtgctgcgtgatctctgaccgcgtcgacaactaccgcagcaccaagcagctgatggcggccaccgtatcttcctgcctgagcctcgtccccaccgtgcaccaccgggccggcgggttccccagcagtgtggcactgacgaacacgcttcagcgccgtcgtcgttctcgccgctatcttgtcgtcgcctcggcgacgagagccgaacaggaggccgcccctgtgacgatcgaggacgtggacctcagctctcatcaggcccgcggccgacgacgggggagctcgccgcgcggtggcgggaggtccacggcagcaacaactgggagggtctgctggaccccatcgacggcgtgctcctccaggagctcatccgctacggcgagttcgcccaggccacctacgacagcttcgactacgaccgcttctccccctactgcggcagctgcaagtacccggcgaagaccttcttccacgacgtcggcctcggcggcatcggctacgaggtcacccgctacctctacgccacctgcaacgacctcaagttccccaacttcggcatcaagacggccgccaacgccaagatgtggagcgagtccggcacgttcatcgggtacgtggccgtgtccaccgacgaggagacggcgcggctcggccgccgggacatcgccgtggcgtggcgcggcaccatcacccgcctcgagtgggtggccgatctgacggccaaccagatccccctgcgcgagacgggcgtcccctgcccggaccccgacgtgaaggtggagcgagggttcgcggcgctgtacacggacaagggcgccggctgccgcttctgccggtactcggcgcgggagcaggtgctggccgaggtgcgcaagctggtggatctgtaccacgggcggggcgagcaggtgagcgtgacggtcacgggccacagcctgggcagcgcgctggcgatgctgtgcgccttcgacatcgcggagacgcgcgcgaacgtgtcgccgggcgacagggtggcgccggtgtgcgtgttctccttcgccggcccgcgcgtcgggaacgtcgccttccggaggcggttcgagcgggagctgggcgtgcgggcgctgcgcgtcgtgaacgtgcacgacagcgtgcccaaggtgcccggcgtgttcttcaacgagtcggcgttcccggagctcgtcctgcgggcggcggacaggctgggcctcggcggcgtgtacacgcacctgggcgtgctgctgcagctggaccacaaggtgtcgccgttcctcaaggagaccctggacctctcgtgctaccacgacctggaggcgcacctgcacctgctggacggcttccgcggctccggcgcggggttcgagccccgcgggagggaccccgcgctggtgaacaagtccaccgacttcctccgggaggaccacatggtgccgcccgtgtggtaccaggcggagaacaagggcatggtgaggacggaggacggccggtgggtgctgccgccgcggcagagggtgctcgacgaccacccggaggacactgaccatcacctccagcggctcggtctcaccgcgtgaagctcagcaatactctgatagtagcgttaattagtgcgtgtggcgttcgcgtacgtgcgcggggcagtcggttactctgttgccgcgcgcggcagctcagtggcgcgttcatggcgtgcatgatgcgggtgacgtgcgggatgggcacgtcgctgcctgagaagctcgcgccgttggcgttcgtgtggctgcagaaaggtcgtcttggattgtaattctctctacttatttttgtaaattgacccagaaaagctgctgcttgcagcgccaaaaaaaaaacgattttc

SEQ ID NO: 28531 - protein, 330 aa, Zea mays subsp. mays
  peptide (1)..(330): Ceres Seq. ID no. 12406865
  misc_feature (1)..(326): NCBI GI NO: 30679836 NR Description: lipase (class 3) family [Arabidopsis thaliana]
  misc_feature (1)..(328): NCBI GI NO: 18402385 NR Description: putative lipase; protein id: At2g30550
  misc_feature (1)..(328): NCBI GI NO: 25408087 NR Description: probable lipase [imported] - Arabidopsis thaliana
  misc_feature (1)..(326): NCBI GI NO: 18403524 NR Description: expressed protein; protein id: At1g51440
  misc_feature (1)..(252): NCBI GI NO: 18390691 NR Description: lipase, putative; protein id: At1g06800
  misc_feature (1)..(253): NCBI GI NO: 30684625 NR Description: lipase (class 3) family [Arabidopsis thaliana]
  misc_feature (1)..(308): NCBI GI NO: 15220732 NR Description: lipase, putative; protein id: At1g30370.1
  misc_feature (1)..(190): NCBI GI NO: 34911832 NR Description: lipase-like protein
  misc_feature (214)..(320): NCBI GI NO: 34911832 NR Description: lipase-like protein
  misc_feature (1)..(277): NCBI GI NO: 18390571 NR Description: hypothetical protein; protein id: At1g05800.1
MWSESGTFIGYVAVSTDEETARLGRRDIAVAWRGTITRLEWVADLTANQIPLRETGVPCPDPDVKVERGFAALYTDKGAGCRFCRYSAREQVLAEVRKLVDLYHGRGEQVSVTVTGHSLGSALAMLCAFDIAETRANVSPGDRVAPVCVFSFAGPRVGNVAFRRRFERELGVRALRVVNVHDSVPKVPGVFFNESAFPELVLRAADRLGLGGVYTHLGVLLQLDHKVSPFLKETLDLSCYHDLEAHLHLLDGFRGSGAGFEPRGRDPALVNKSTDFLREDHMVPPVWYQAENKGMVRTEDGRWVLPPRQRVLDDHPEDTDHHLQRLGLTA

SEQ ID NO: 28532 - protein, 220 aa, Zea mays subsp. mays
  peptide (1)..(220): Ceres Seq. ID no. 12406866
  misc_feature (56)..(220): Pfam Name: Pfam Description:  Equine herpesvirus glycoprotein gp2
  misc_feature (47)..(220): NCBI GI NO: 28574039 NR Description: Salivary gland secretion 1 CG3047-PA
  misc_feature (81)..(220): NCBI GI NO: 17221106 NR Description: glycoprotein gp2 [Equine herpesvirus 1]
  misc_feature (15)..(220): NCBI GI NO: 13592175 NR Description: ppg3 [Leishmania major]
  misc_feature (81)..(220): NCBI GI NO: 28574039 NR Description: Salivary gland secretion 1 CG3047-PA
  misc_feature (95)..(220): NCBI GI NO: 28574039 NR Description: Salivary gland secretion 1 CG3047-PA
  misc_feature (1)..(220): NCBI GI NO: 28574039 NR Description: Salivary gland secretion 1 CG3047-PA
  misc_feature (56)..(220): NCBI GI NO: 11278205 NR Description: membrane glycoprotein
  misc_feature (45)..(220): NCBI GI NO: 13592175 NR Description: ppg3 [Leishmania major]
  misc_feature (45)..(220): NCBI GI NO: 13592175 NR Description: ppg3 [Leishmania major]
  misc_feature (81)..(220): NCBI GI NO: 17221116 NR Description: glycoprotein gp2 [Equine herpesvirus 1]
MAATVSSCLSLVPTVHHRAGGFPSSVALTNTLQRRRRSRRYLVVASATRAEQEAAPVTIEDVDLSSHQARGRRRGSSPRGGGRSTAATTGRVCWTPSTACSSRSSSATASSPRPPTTASTTTASPPTAAAASTRRRPSSTTSASAASATRSPATSTPPATTSSSPTSASRRPPTPRCGASPARSSGTWPCPPTRRRRGSAAGTSPWRGAAPSPASSGWPI

SEQ ID NO: 28533 - protein, 206 aa, Zea mays subsp. mays
  peptide (1)..(206): Ceres Seq. ID no. 12406867
  misc_feature (1)..(202): NCBI GI NO: 30679836 NR Description: lipase (class 3) family [Arabidopsis thaliana]
  misc_feature (1)..(204): NCBI GI NO: 18402385 NR Description: putative lipase; protein id: At2g30550
  misc_feature (1)..(204): NCBI GI NO: 25408087 NR Description: probable lipase [imported] - Arabidopsis thaliana
  misc_feature (1)..(202): NCBI GI NO: 18403524 NR Description: expressed protein; protein id: At1g51440
  misc_feature (1)..(128): NCBI GI NO: 18390691 NR Description: lipase, putative; protein id: At1g06800
  misc_feature (1)..(129): NCBI GI NO: 30684625 NR Description: lipase (class 3) family [Arabidopsis thaliana]
  misc_feature (1)..(184): NCBI GI NO: 15220732 NR Description: lipase, putative; protein id: At1g30370.1
  misc_feature (1)..(66): NCBI GI NO: 34911832 NR Description: lipase-like protein
  misc_feature (90)..(196): NCBI GI NO: 34911832 NR Description: lipase-like protein
  misc_feature (1)..(153): NCBI GI NO: 18390571 NR Description: hypothetical protein; protein id: At1g05800.1
MLCAFDIAETRANVSPGDRVAPVCVFSFAGPRVGNVAFRRRFERELGVRALRVVNVHDSVPKVPGVFFNESAFPELVLRAADRLGLGGVYTHLGVLLQLDHKVSPFLKETLDLSCYHDLEAHLHLLDGFRGSGAGFEPRGRDPALVNKSTDFLREDHMVPPVWYQAENKGMVRTEDGRWVLPPRQRVLDDHPEDTDHHLQRLGLTA

SEQ ID NO: 28534 - DNA, 1192 bp, Zea mays subsp. mays
  misc_feature (1)..(1192): Ceres Seq. ID no. 12386906
gcacgagaccattacctagaacatcctaatcgaaaaacactcgaacacttccaaagttctagcccctctcgtgagtcctgtccaaataatggcccacgcgcagcagtgtcctcctgcttctgacggcgctcgccgcagccacgcctgtgccgtcagcggcgaccaggaagctcatgttcctcgtccagccacagccgaacctcctcacgtaccacaacggcgccgtgctgagcggcgacatccccgtctccatcctctggtatggccgcttcacgccggcgcagaaggctgtggtctccgacttcctcctcgccctctccggcgccgcgccgccgcaggggtcgccgtccgttgcccagtggtggagcagcgtcaaccagctctacctctccaaggcggcggcggcggccgtcagcaagaacggcgcgcacggcggcggcgccaagagcgcgcgggtggtgctgtccgggcacggcctccgacgagggctgctcgctggggaagagcctgaagctgtcgcagcttccggcgctggcggccgcggcacgccccgcgaccgcggccgcgaggggcggcgtcgcgctggtgctcacggcgcgggacgtggccgtggagggcttctgcacgagccggtgcgggcaccacgggtcgtacggcggcggcgggcgcgcggcgtacgcgtgggtgggcgacgccgccgaccagtgcccgggccagtgcgcgtggccgttccaccagccggcgtacggcccgcaggcgccgccgctggtgccgcccagcggggacgcgggcacggacggcgtggtgatcaacgtggccagcatggtcgccggcgcggtcaccaacccgttcggcgacggcttctaccagggcgaccgcggctcgccgctggaggccgccacggcgtgcgcgggcgtgtacggcagcggcgcgtaccccgggtacgccgggcagctgctcgtggaccgggccacgggcgccagctacaacgcgcacggtgcgcgcgggaggaagtacctgctcccggcgctgttcgaccccgacacgtcggcgtgctccacgctggtgtagtgtagccgatctcacaggctaataaatgttggtatatgtaaatactgaacagtacacagtatgtatcatcgttcgtgacgggcagggcagtgctaaataaacgacctgtgcttgaagctgc

SEQ ID NO: 28535 - protein, 300 aa, Zea mays subsp. mays
  peptide (1)..(300): Ceres Seq. ID no. 12386907
  misc_feature (11)..(71): Pfam Name: Pfam Description:  Phosphate-induced protein 1 conserved region
  misc_feature (1)..(71): NCBI GI NO: 3759184 NR Description: phi-1 [Nicotiana tabacum]
  misc_feature (3)..(82): NCBI GI NO: 15237656 NR Description: phi-1-like protein; protein id: At5g64260
  misc_feature (19)..(82): NCBI GI NO: 15242420 NR Description: putative protein; protein id: At5g09440
  misc_feature (11)..(104): NCBI GI NO: 21592873 NR Description: unknown [Arabidopsis thaliana]
  misc_feature (11)..(104): NCBI GI NO: 15242118 NR Description: putative protein; protein id: At5g51550
  misc_feature (11)..(71): NCBI GI NO: 25408357 NR Description: hypothetical protein At2g35150
  misc_feature (1)..(151): NCBI GI NO: 37533672 NR Description: putative phosphate-induced protein
  misc_feature (1)..(146): NCBI GI NO: 31074969 NR Description: erg-1 [Solanum tuberosum]
  misc_feature (3)..(147): NCBI GI NO: 15236667 NR Description: putative phi-1-like phosphate-induced protein
  misc_feature (3)..(147): NCBI GI NO: 21593043 NR Description: putative phi-1-like phosphate-induced protein
MFLVQPQPNLLTYHNGAVLSGDIPVSILWYGRFTPAQKAVVSDFLLALSGAAPPQGSPSVAQWWSSVNQLYLSKAAAAAVSKNGAHGGGAKSARVVLSGHGLRRGLLAGEEPEAVAASGAGGRGTPRDRGREGRRRAGAHGAGRGRGGLLHEPVRAPRVVRRRRARGVRVGGRRRRPVPGPVRVAVPPAGVRPAGAAAGAAQRGRGHGRRGDQRGQHGRRRGHQPVRRRLLPGRPRLAAGGRHGVRGRVRQRRVPRVRRAAARGPGHGRQLQRARCAREEVPAPGAVRPRHVGVLHAGVV

SEQ ID NO: 28536 - protein, 269 aa, Zea mays subsp. mays
  peptide (1)..(269): Ceres Seq. ID no. 12386908
  misc_feature (75)..(269): Pfam Name: Pfam Description:  Phosphate-induced protein 1 conserved region
  misc_feature (75)..(269): NCBI GI NO: 3759184 NR Description: phi-1 [Nicotiana tabacum]
  misc_feature (75)..(269): NCBI GI NO: 15237656 NR Description: phi-1-like protein; protein id: At5g64260
  misc_feature (75)..(269): NCBI GI NO: 15242420 NR Description: putative protein; protein id: At5g09440
  misc_feature (32)..(268): NCBI GI NO: 13194680 NR Description: phosphate-induced protein 1-like protein
  misc_feature (74)..(269): NCBI GI NO: 31074969 NR Description: erg-1 [Solanum tuberosum]
  misc_feature (74)..(269): NCBI GI NO: 15236667 NR Description: putative phi-1-like phosphate-induced protein
  misc_feature (74)..(269): NCBI GI NO: 21593043 NR Description: putative phi-1-like phosphate-induced protein
  misc_feature (74)..(268): NCBI GI NO: 15219504 NR Description: phosphate-induced
  misc_feature (74)..(265): NCBI GI NO: 37533672 NR Description: putative phosphate-induced protein
  misc_feature (73)..(266): NCBI GI NO: 21592873 NR Description: unknown [Arabidopsis thaliana]
MAASRRRRRLWSPTSSSPSPAPRRRRGRRPLPSGGAASTSSTSPRRRRRPSARTARTAAAPRARGWCCPGTASDEGCSLGKSLKLSQLPALAAAARPATAAARGGVALVLTARDVAVEGFCTSRCGHHGSYGGGGRAAYAWVGDAADQCPGQCAWPFHQPAYGPQAPPLVPPSGDAGTDGVVINVASMVAGAVTNPFGDGFYQGDRGSPLEAATACAGVYGSGAYPGYAGQLLVDRATGASYNAHGARGRKYLLPALFDPDTSACSTLV

SEQ ID NO: 28537 - DNA, 1752 bp, Zea mays subsp. mays
  misc_feature (1)..(1752): Ceres Seq. ID no. 12356447
aggatcggagaacatccgccgcgactccatgctccaggagatcaagtctgcctaccagattcttgcccacaagtaccatcctgatatgaataagagtcccgaagcagaagaaaagttcaaggagatcagtgctgcatatgagccaagcttggatctgaccgctgtactttgtgtcgccgcttgaatctacggttctcttcttccttgttcatcccgtggatctgtcccgtggtggtccaagcattcgatttctgctattataacatccaacgttggcggtgaagagcaaggggacagataagcccaaaggcagcaaggggaacgtcgacaaggaccccaacaagcctgactcccaacattttttgtccgccggtgctgtagcggaagcccaaaggcagcaaggggaacgtcgacaaggaccccaacaaggctgactcccaacattttttgtccgccggtgctgtagcggcggcgctgggtgagctcccccatgctgggctctgggatgctcccaggcgccggggttcggcgagacggggactgatctggtgctgggctctgggatgctcccaggcgccgctgccttgcagttcctcggtcgattcaagggaatattatcagtggaagagactggtgaatcaaaggccgtcaacgctagatggaggcaaagtgcctgctgcattgggccaccatgtttttggtgcgggctgttcctcacggaaccaacatatctacatatatttttcatcttctcatcaagggagtatatgggtcgggagcaaggttctacatgacctactagggtatgtaaaaattatggaagtagggccacgagatggtctacagaatgagaaggacatcgtgccaacacctgtaaaggttgagcttatacgaagattggccacatccggattacctgttgtggaggcaacgagttttgtatctccaaaacgggtacctcaggcaggactgaggctgtttcatcctcctctgctgcggggtgggctaggtcgtcaccatggcgtcactcgtggcgtcttgtgcagtagggacgacagcagggagctgtcaagatgggttacctcaagatggacgaggagttcctcaagaggggcgagagcgggggcacgtgctgcgtcatagcccttctccgaaagggtagactagtcgtctccaatattggagactgtcatgtggtgctcagccgagcagggaaggcaaaggtgctcacctctgaccatcgggcctcccaggaggatgagaagcaaagaattgagaatttgggtggatttgtggtgaattaccatgggacatggagagtccagggctccctggcagtgtctaggggcaatggggatggacacctaaagcagtgggttgtggctgaccgagagactagaacgctcctcatcgaccaccagtgcgagttcttgatacttgcttctgatggcctatggggtaagattgataatcaggatgcagttgaccaaaactctaggcattagcactaacagagaccggtggaaggcaggactttgctgcctaaagtttccatgagtcagcgctatttttgggtgtttaacattcattctttgtcatagaaccatttgttatattattagatgtaattagatctatttgattcattcttcggaaatatttattgagataatgcggggtgatctctcgcttcatgatccattgactgtaaaaggcgatttgcctatgttaatacaatgatatattctattc

SEQ ID NO: 28538 - protein, 143 aa, Zea mays subsp. mays
  peptide (1)..(143): Ceres Seq. ID no. 12356448
  misc_feature (1)..(138): Pfam Name: Pfam Description:  Protein phosphatase 2C
  misc_feature (1)..(138): NCBI GI NO: 6478146 NR Description: putative serine/threonine phosphatase type 2c
  misc_feature (1)..(138): NCBI GI NO: 23506609 NR Description: putative serine/threonine phosphatase
  misc_feature (1)..(138): NCBI GI NO: 23506607 NR Description: putative serine/threonine phosphatase
  misc_feature (1)..(138): NCBI GI NO: 7488754 NR Description: protein phosphatase 2C - alfalfa
  misc_feature (1)..(138): NCBI GI NO: 15225656 NR Description: protein phosphatase 2C
  misc_feature (1)..(138): NCBI GI NO: 28393269 NR Description: putative protein phosphatase 2C (PP2C)
  misc_feature (1)..(138): NCBI GI NO: 15227687 NR Description: protein phosphatase 2C
  misc_feature (1)..(138): NCBI GI NO: 15222312 NR Description: protein phosphatase 2C
  misc_feature (1)..(138): NCBI GI NO: 30013681 NR Description: Avr9/Cf-9 rapidly elicited protein 284
  misc_feature (1)..(69): NCBI GI NO: 25352225 NR Description: hypothetical protein
MGYLKMDEEFLKRGESGGTCCVIALLRKGRLVVSNIGDCHVVLSRAGKAKVLTSDHRASQEDEKQRIENLGGFVVNYHGTWRVQGSLAVSRGNGDGHLKQWVVADRETRTLLIDHQCEFLILASDGLWGKIDNQDAVDQNSRH

SEQ ID NO: 28539 - protein, 138 aa, Zea mays subsp. mays
  peptide (1)..(138): Ceres Seq. ID no. 12356449
  misc_feature (1)..(133): Pfam Name: Pfam Description:  Protein phosphatase 2C
  misc_feature (1)..(133): NCBI GI NO: 6478146 NR Description: putative serine/threonine phosphatase type 2c
  misc_feature (1)..(133): NCBI GI NO: 23506609 NR Description: putative serine/threonine phosphatase
  misc_feature (1)..(133): NCBI GI NO: 23506607 NR Description: putative serine/threonine phosphatase
  misc_feature (1)..(133): NCBI GI NO: 7488754 NR Description: protein phosphatase 2C - alfalfa
  misc_feature (1)..(133): NCBI GI NO: 15225656 NR Description: protein phosphatase 2C
  misc_feature (1)..(133): NCBI GI NO: 28393269 NR Description: putative protein phosphatase 2C (PP2C)
  misc_feature (1)..(133): NCBI GI NO: 15227687 NR Description: protein phosphatase 2C
  misc_feature (1)..(133): NCBI GI NO: 15222312 NR Description: protein phosphatase 2C
  misc_feature (1)..(133): NCBI GI NO: 30013681 NR Description: Avr9/Cf-9 rapidly elicited protein 284
  misc_feature (1)..(64): NCBI GI NO: 25352225 NR Description: hypothetical protein
MDEEFLKRGESGGTCCVIALLRKGRLVVSNIGDCHVVLSRAGKAKVLTSDHRASQEDEKQRIENLGGFVVNYHGTWRVQGSLAVSRGNGDGHLKQWVVADRETRTLLIDHQCEFLILASDGLWGKIDNQDAVDQNSRH

SEQ ID NO: 28540 - protein, 108 aa, Zea mays subsp. mays
  peptide (1)..(108): Ceres Seq. ID no. 12356450
  misc_feature (1)..(49): NCBI GI NO: 34903154 NR Description: unnamed protein product
  misc_feature (1)..(75): NCBI GI NO: 19343556 NR Description: Hmgcl protein [Mus musculus]
  misc_feature (1)..(75): NCBI GI NO: 33239379 NR Description: 3-hydroxymethyl-3-methylglutaryl-Coenzyme A lyase-like 1
MEVGPRDGLQNEKDIVPTPVKVELIRRLATSGLPVVEATSFVSPKRVPQAGLRLFHPPLLRGGLGRHHGVTRGVLCSRDDSRELSRWVTSRWTRSSSRGARAGARAAS

SEQ ID NO: 28541 - DNA, 2067 bp, Zea mays subsp. mays
  misc_feature (1)..(2067): Ceres Seq. ID no. 12409009
ccatccagtcctggagcctgcgcggctgcgccttgcatcgcatctccgtcgtcgtcctcgcccacggaatccgtccaattccccacgccgcccgtcgtccttttctataaaattcactccgccaccaaatctcgaatccccatcgcgctgcttttccaccgaccccgacgccgacgccgacgccaccgccgctccctccccagtccccactccccttcccgggccgcggagcagagatccggggcgccgcgcgatggcgaacatcgacatggcgaagatcctggcggacctggaccgcggcgccagcggcggcgacgcgcgggtgcccaagaccaagctcgtatgcacgctcggcccggcctcccgcaccgtgcccatgctcgagaagctgctccgcgccggcatgaacgtcgcgcgcttcaacttctcccacggcacccacgagtaccaccaggagacgctcgacaacctccgccaggccatgcacaacaccggcatcctctgcgccgtcatgctcgacaccaagggtcctgagatccgtacagggtttttgaaggatggtaaaccgattaagctaaccaagggtcaagaaatcactgtcaccactgattatgatatcaagggtgacgaaaatacgattgctatgagttacaagaaactgcctgttgacgtgaagcctggaaatgtcatactctgcgcagatggtactatctctctggccgttctatcttgtgatcctgatgctggaactgtgaggtgtagatgcgagaacactgcaatgcttggtgagagaaagaactgcaatctgccaggaattgttgtggatcttcctacattgactgagaaagataaagaagacattttgggctggggtgttccaaatgatattgacatgattgctctatcctttgtccgtaaaggatcagatttggtgactgtgagacaggttcttgggcagcatgccaagcgcattaagttgatgtcaaaggttgaaaaccaagagggtgttgtaaactttgatgagatcttgagggagactgatgcttttatggttgctagaggtgatcttggaatggagattcctgttgagaagattttccttgcgcagaagatgatgatctacaagtgcaacattgctggcaaacctgttgttaccgctacccagatgctcgagtcgatgatcaaatcccctaggcccacccgcgcagaggccactgacgttgcaaatgctgttcttgatggaactgactgtgtcatgctcagtggtgagagtgctgctggagcctaccccgaggtggctgtgaagatcatggctcgtatctgcatcgaggcagagtcttccctggaccacgaggcagttttcaaggccatgatcaggtccgcgcctcttccaatgagccctctggagtctcttgcgtcatctgctgtgcgaactgccaacaaggccaaggccgcactgatcgtcgtcttgactcgcggtggcaccacggccaaactggtcgccaagtacccccagggttcccatcctctctgttgtggtacccgtgctaacgacggattctttcgactggaccatcagctccgagggcccagctaggcacagcctgatctatagaggcctcattcccctcctcgctgagggctccgcgaaggctacggattcagagtcaaccgaggtgatcctggaggctgcgctcaagtcggccgtgcagaagcaactttgcaagcctggtgatgccattgtggctctccatcgtatcggcgtcgcctccgtcatcaagatctgcatcgtgaagtgatcaccgtgacttgactcctaagtcccaggggggtggttctcaccgctgggacctatgaaacaacttttctgcctcctttttaactgcatttttcggagacagataattactgtatgttgtaagcccgcttctgttgtttgcagctgcaagatgtctttttttttgtttacatagtttttgagctggtaaatgaggagggagaggactccattgatgttagtggtaataagatttgtatctacggagttcagttaaaaggcttttctac

SEQ ID NO: 28542 - protein, 531 aa, Zea mays subsp. mays
  peptide (1)..(531): Ceres Seq. ID no. 12409010
  misc_feature (85)..(503): NCBI GI NO: 38344200 NR Description: OSJNBa0064G10.16
  misc_feature (85)..(503): NCBI GI NO: 22296818 NR Description: pyruvate kinase [Glycine max]
  misc_feature (85)..(503): NCBI GI NO: 2497538 NR Description: Pyruvate kinase, cytosolic isozyme
  misc_feature (85)..(503): NCBI GI NO: 7271955 NR Description: cytosolic pyruvate kinase [Lilium longiflorum]
  misc_feature (85)..(503): NCBI GI NO: 22296820 NR Description: pyruvate kinase [Glycine max]
  misc_feature (85)..(503): NCBI GI NO: 15242313 NR Description: pyruvate kinase; protein id: At5g08570.1
  misc_feature (85)..(503): NCBI GI NO: 322787 NR Description: pyruvate kinase (EC 2.7.1.40), cytosolic - potato
  misc_feature (85)..(503): NCBI GI NO: 125606 NR Description: Pyruvate kinase, cytosolic isozyme
  misc_feature (85)..(503): NCBI GI NO: 15242863 NR Description: pyruvate kinase; protein id: At5g63680.1
  misc_feature (109)..(506): NCBI GI NO: 15241190 NR Description: pyruvate kinase; protein id: At5g56350
HPVLEPARLRLASHLRRRPRPRNPSNSPRRPSSFSIKFTPPPNLESPSRCFSTDPDADADATAAPSPVPTPLPGPRSRDPGRRAMANIDMAKILADLDRGASGGDARVPKTKLVCTLGPASRTVPMLEKLLRAGMNVARFNFSHGTHEYHQETLDNLRQAMHNTGILCAVMLDTKGPEIRTGFLKDGKPIKLTKGQEITVTTDYDIKGDENTIAMSYKKLPVDVKPGNVILCADGTISLAVLSCDPDAGTVRCRCENTAMLGERKNCNLPGIVVDLPTLTEKDKEDILGWGVPNDIDMIALSFVRKGSDLVTVRQVLGQHAKRIKLMSKVENQEGVVNFDEILRETDAFMVARGDLGMEIPVEKIFLAQKMMIYKCNIAGKPVVTATQMLESMIKSPRPTRAEATDVANAVLDGTDCVMLSGESAAGAYPEVAVKIMARICIEAESSLDHEAVFKAMIRSAPLPMSPLESLASSAVRTANKAKAALIVVLTRGGTTAKLVAKYPQGSHPLCCGTRANDGFFRLDHQLRGPS

SEQ ID NO: 28543 - protein, 447 aa, Zea mays subsp. mays
  peptide (1)..(447): Ceres Seq. ID no. 12409011
  misc_feature (1)..(419): NCBI GI NO: 38344200 NR Description: OSJNBa0064G10.16
  misc_feature (1)..(419): NCBI GI NO: 22296818 NR Description: pyruvate kinase [Glycine max]
  misc_feature (1)..(419): NCBI GI NO: 2497538 NR Description: Pyruvate kinase, cytosolic isozyme
  misc_feature (1)..(419): NCBI GI NO: 7271955 NR Description: cytosolic pyruvate kinase [Lilium longiflorum]
  misc_feature (1)..(419): NCBI GI NO: 22296820 NR Description: pyruvate kinase [Glycine max]
  misc_feature (1)..(419): NCBI GI NO: 15242313 NR Description: pyruvate kinase; protein id: At5g08570.1
  misc_feature (1)..(419): NCBI GI NO: 322787 NR Description: pyruvate kinase (EC 2.7.1.40), cytosolic - potato
  misc_feature (1)..(419): NCBI GI NO: 125606 NR Description: Pyruvate kinase, cytosolic isozyme
  misc_feature (1)..(419): NCBI GI NO: 15242863 NR Description: pyruvate kinase; protein id: At5g63680.1
  misc_feature (25)..(422): NCBI GI NO: 15241190 NR Description: pyruvate kinase; protein id: At5g56350
MANIDMAKILADLDRGASGGDARVPKTKLVCTLGPASRTVPMLEKLLRAGMNVARFNFSHGTHEYHQETLDNLRQAMHNTGILCAVMLDTKGPEIRTGFLKDGKPIKLTKGQEITVTTDYDIKGDENTIAMSYKKLPVDVKPGNVILCADGTISLAVLSCDPDAGTVRCRCENTAMLGERKNCNLPGIVVDLPTLTEKDKEDILGWGVPNDIDMIALSFVRKGSDLVTVRQVLGQHAKRIKLMSKVENQEGVVNFDEILRETDAFMVARGDLGMEIPVEKIFLAQKMMIYKCNIAGKPVVTATQMLESMIKSPRPTRAEATDVANAVLDGTDCVMLSGESAAGAYPEVAVKIMARICIEAESSLDHEAVFKAMIRSAPLPMSPLESLASSAVRTANKAKAALIVVLTRGGTTAKLVAKYPQGSHPLCCGTRANDGFFRLDHQLRGPS

SEQ ID NO: 28544 - protein, 442 aa, Zea mays subsp. mays
  peptide (1)..(442): Ceres Seq. ID no. 12409012
  misc_feature (1)..(414): NCBI GI NO: 38344200 NR Description: OSJNBa0064G10.16
  misc_feature (1)..(414): NCBI GI NO: 22296818 NR Description: pyruvate kinase [Glycine max]
  misc_feature (1)..(414): NCBI GI NO: 2497538 NR Description: Pyruvate kinase, cytosolic isozyme
  misc_feature (1)..(414): NCBI GI NO: 7271955 NR Description: cytosolic pyruvate kinase [Lilium longiflorum]
  misc_feature (1)..(414): NCBI GI NO: 22296820 NR Description: pyruvate kinase [Glycine max]
  misc_feature (1)..(414): NCBI GI NO: 15242313 NR Description: pyruvate kinase; protein id: At5g08570.1
  misc_feature (1)..(414): NCBI GI NO: 322787 NR Description: pyruvate kinase (EC 2.7.1.40), cytosolic - potato
  misc_feature (1)..(414): NCBI GI NO: 125606 NR Description: Pyruvate kinase, cytosolic isozyme
  misc_feature (1)..(414): NCBI GI NO: 15242863 NR Description: pyruvate kinase; protein id: At5g63680.1
  misc_feature (20)..(417): NCBI GI NO: 15241190 NR Description: pyruvate kinase; protein id: At5g56350
MAKILADLDRGASGGDARVPKTKLVCTLGPASRTVPMLEKLLRAGMNVARFNFSHGTHEYHQETLDNLRQAMHNTGILCAVMLDTKGPEIRTGFLKDGKPIKLTKGQEITVTTDYDIKGDENTIAMSYKKLPVDVKPGNVILCADGTISLAVLSCDPDAGTVRCRCENTAMLGERKNCNLPGIVVDLPTLTEKDKEDILGWGVPNDIDMIALSFVRKGSDLVTVRQVLGQHAKRIKLMSKVENQEGVVNFDEILRETDAFMVARGDLGMEIPVEKIFLAQKMMIYKCNIAGKPVVTATQMLESMIKSPRPTRAEATDVANAVLDGTDCVMLSGESAAGAYPEVAVKIMARICIEAESSLDHEAVFKAMIRSAPLPMSPLESLASSAVRTANKAKAALIVVLTRGGTTAKLVAKYPQGSHPLCCGTRANDGFFRLDHQLRGPS

SEQ ID NO: 28545 - DNA, 1386 bp, Zea mays subsp. mays
  misc_feature (1)..(1386): Ceres Seq. ID no. 13492826
actgagcaactcaaaaaggccaaaacccttccccaggggccgtctcgctagtcgctactcactgtaccgcaccgccgccgccgtctcgcacacggggcacaggacgcgcgcgatccccttgagtccggattgccatggccaccacggcgttcgccgccgccaggttcttccccgcccacctcgactcctccccacgcatcgcgccccaccgcgtcgggcccaccgcgaatctctccttctcaccgctttccgccaactcctcgtccctgcgccgcctccattccccctgcccatccggccccgggggtaggctgcccccgccgccgcgatcgtacggcggcgccggcggatctggcgacgccgcgaactccggtggcggcgaaggccgccgcggaggcatcctcgggctcctcctcgccgggtgggccgcccgcgtcgctgcggacccgcagttccctttcaaggtgctcatggaggagctcgtcggcgtcaccgcttgcgtgcttggcgacatggcctcccgccctaacttcggcctcaacgagttggacttcgtcttctccacgctcgtcgtcggatccatcctcaacttcgtcctcatgtacctcctcgcccccaccgccggcgtcgccgccgccgcgtcgtccgccgcgtccgcgctccccagccacatgttcgagcccggcgcgtactccctcggctcccgcgtcgccacgatcatgtccaagggcgccaccttcgcggtggtcgggttcgcggccgggctcaccggaaccgcgatctccaacgggctgatcgcgatgcggaagcgcatggacccggcgttcgagacgcccaacaagccgccgcccacgctgctcaacgcggccacctgggcgctccacatgggtgtcagcagcaacctgcggtaccagacgctgaatgggatcgagtacctgctcggcaaggtcgcaccggcgccggtgttcaaggtgtccgttgttgctctccgctgcatgaacaacgtgctgggtgggatgtccttcgtgctgcttgccaggctgaccggggcgcagaaatcagacaagccagcgacggtcgcggaagagaaggagaggttgatagctgtgggcaatgccgcagcagatgccatcaacgaggcgaggcatggagagggtaagtaggtggtagaggagagagacgagtaagttgatggtgcatcatctcagactcgtttgctggttcttggacatagaccaagaaactcacctagtcacctgtagagttggttggaataaggagtggagtgaggttcagaacttcttttttaaaaaactctgtttgtggtttatcggtgttgatgatgacatgcttagtgatggtagaataaagtttttttttcctccc

SEQ ID NO: 28546 - protein, 342 aa, Zea mays subsp. mays
  peptide (1)..(342): Ceres Seq. ID no. 13492827
  misc_feature (1)..(342): NCBI GI NO: 34909204 NR Description: P0425G02.25
  misc_feature (20)..(320): NCBI GI NO: 15231951 NR Description: glycine-rich protein [Arabidopsis thaliana]
  misc_feature (20)..(321): NCBI GI NO: 15231950 NR Description: expressed protein [Arabidopsis thaliana]
  misc_feature (100)..(307): NCBI GI NO: 6934300 NR Description: unknown [Euphorbia esula]
  misc_feature (88)..(307): NCBI GI NO: 30687286 NR Description: expressed protein [Arabidopsis thaliana]
  misc_feature (90)..(307): NCBI GI NO: 15242979 NR Description: expressed protein [Arabidopsis thaliana]
  misc_feature (100)..(307): NCBI GI NO: 34395170 NR Description: chloroplast lumen common protein family-likeprotein
  misc_feature (100)..(307): NCBI GI NO: 34900644 NR Description: hypothetical protein~similar to Arabidopsisthaliana chromosome5
  misc_feature (96)..(309): NCBI GI NO: 18416870 NR Description: expressed protein [Arabidopsis thaliana]
MATTAFAAARFFPAHLDSSPRIAPHRVGPTANLSFSPLSANSSSLRRLHSPCPSGPGGRLPPPPRSYGGAGGSGDAANSGGGEGRRGGILGLLLAGWAARVAADPQFPFKVLMEELVGVTACVLGDMASRPNFGLNELDFVFSTLVVGSILNFVLMYLLAPTAGVAAAASSAASALPSHMFEPGAYSLGSRVATIMSKGATFAVVGFAAGLTGTAISNGLIAMRKRMDPAFETPNKPPPTLLNAATWALHMGVSSNLRYQTLNGIEYLLGKVAPAPVFKVSVVALRCMNNVLGGMSFVLLARLTGAQKSDKPATVAEEKERLIAVGNAAADAINEARHGEGK

SEQ ID NO: 28547 - protein, 230 aa, Zea mays subsp. mays
  peptide (1)..(230): Ceres Seq. ID no. 13492828
  misc_feature (1)..(230): NCBI GI NO: 34909204 NR Description: P0425G02.25
  misc_feature (1)..(208): NCBI GI NO: 15231951 NR Description: glycine-rich protein [Arabidopsis thaliana]
  misc_feature (1)..(209): NCBI GI NO: 15231950 NR Description: expressed protein [Arabidopsis thaliana]
  misc_feature (1)..(195): NCBI GI NO: 6934300 NR Description: unknown [Euphorbia esula]
  misc_feature (1)..(195): NCBI GI NO: 30687286 NR Description: expressed protein [Arabidopsis thaliana]
  misc_feature (1)..(195): NCBI GI NO: 15242979 NR Description: expressed protein [Arabidopsis thaliana]
  misc_feature (1)..(195): NCBI GI NO: 34395170 NR Description: chloroplast lumen common protein family-likeprotein
  misc_feature (1)..(195): NCBI GI NO: 34900644 NR Description: hypothetical protein~similar to Arabidopsisthaliana chromosome5
  misc_feature (1)..(197): NCBI GI NO: 18416870 NR Description: expressed protein [Arabidopsis thaliana]
MEELVGVTACVLGDMASRPNFGLNELDFVFSTLVVGSILNFVLMYLLAPTAGVAAAASSAASALPSHMFEPGAYSLGSRVATIMSKGATFAVVGFAAGLTGTAISNGLIAMRKRMDPAFETPNKPPPTLLNAATWALHMGVSSNLRYQTLNGIEYLLGKVAPAPVFKVSVVALRCMNNVLGGMSFVLLARLTGAQKSDKPATVAEEKERLIAVGNAAADAINEARHGEGK

SEQ ID NO: 28548 - protein, 216 aa, Zea mays subsp. mays
  peptide (1)..(216): Ceres Seq. ID no. 13492829
  misc_feature (1)..(216): NCBI GI NO: 34909204 NR Description: P0425G02.25
  misc_feature (1)..(194): NCBI GI NO: 15231951 NR Description: glycine-rich protein [Arabidopsis thaliana]
  misc_feature (1)..(195): NCBI GI NO: 15231950 NR Description: expressed protein [Arabidopsis thaliana]
  misc_feature (1)..(181): NCBI GI NO: 6934300 NR Description: unknown [Euphorbia esula]
  misc_feature (1)..(181): NCBI GI NO: 30687286 NR Description: expressed protein [Arabidopsis thaliana]
  misc_feature (1)..(181): NCBI GI NO: 15242979 NR Description: expressed protein [Arabidopsis thaliana]
  misc_feature (1)..(181): NCBI GI NO: 34395170 NR Description: chloroplast lumen common protein family-likeprotein
  misc_feature (1)..(181): NCBI GI NO: 34900644 NR Description: hypothetical protein~similar to Arabidopsisthaliana chromosome5
  misc_feature (1)..(183): NCBI GI NO: 18416870 NR Description: expressed protein [Arabidopsis thaliana]
MASRPNFGLNELDFVFSTLVVGSILNFVLMYLLAPTAGVAAAASSAASALPSHMFEPGAYSLGSRVATIMSKGATFAVVGFAAGLTGTAISNGLIAMRKRMDPAFETPNKPPPTLLNAATWALHMGVSSNLRYQTLNGIEYLLGKVAPAPVFKVSVVALRCMNNVLGGMSFVLLARLTGAQKSDKPATVAEEKERLIAVGNAAADAINEARHGEGK

SEQ ID NO: 28549 - DNA, 1216 bp, Zea mays subsp. mays
  misc_feature (1)..(1216): Ceres Seq. ID no. 12350011
cccctggcattgcttgccacccctgcaactgcaactgcaacacagagaaagatagcgctatccagaggatcagctccggtcatccagtgaagctcaggctactctacctcgctctcggccatggcgtcaggggaagcagcagagccactgcagtacacggtgagcgagagcttcttctgcacgcacgcgctacatttccctgtcatatcgcctggcgtcttactctctgcagaccaccgcgctgcgggtgtccatccactgcgagggctgcaagaagaaggtcaagaaggtgctccacagcatcgaaggcgtgtacaaggtgacggtggacgcggcgcagcacaaggtgacggtcaccggcagcgtggaagccgacgcgctcgtccggcgcctgcacaaggccggcaagcaggcggcgctctggcccagctcgccggcacccgtcgaggccaagatgaagcccgaggaggtcgcgcctgccgcgttgcctgcggcagccgccaacaaggacgctagggcccaggagaagaagccggccaaggacaagaaggccgactacgccgaggccgcggcgaaaccgagcaaggacaagacggtcgacataggcgaggccgcggcgaagcccagcaaggacgagaaggccgacaaaggcgaggccgcggcgaaacccagccaggacgagaaggctggcaaaggcgagccggccccggagacgaagaagggctcccctgcgccggggaagcaggacgccgcggaggaggctggcgcggacaagcccggcggcggcggcggcggcaagaagggcaagaagaacaagaatcccaacaaaccgctggactgcggcggcgaggccccggccgagaagcaggcgtcgccggggcccgagagcccgcacgtgcacggcggcgccttcccgtactacgcggcgcacccggtgctgagctgctacaacgtggcgcacccgagctcgagcgtgtcgtactacgcgcccgccgccgtggtgccgtacggcgggttcccgcccatggtgccggcggagttcatgtacggcccgccgggcatgcaggagtctagcatgctcacgaggacaacgccaactcgtgcagcctcatgtgatgtctgtcacgcacgcgccgccgctatacctacctacattgtcaaattaggcggtcaaagctcttgcttgttgaccagagattagttctttgaattgctc

SEQ ID NO: 28550 - protein, 248 aa, Zea mays subsp. mays
  peptide (1)..(248): Ceres Seq. ID no. 12350012
  misc_feature (1)..(201): NCBI GI NO: 27754505 NR Description: putative copper chaperone (CCH) protein
  misc_feature (1)..(201): NCBI GI NO: 18405728 NR Description: copper chaperone
  misc_feature (1)..(201): NCBI GI NO: 21536659 NR Description: unknown [Arabidopsis thaliana]
  misc_feature (1)..(202): NCBI GI NO: 12083536 NR Description: hypothetical protein [Oryza sativa]
  misc_feature (1)..(222): NCBI GI NO: 33146848 NR Description: copper chaperone
MKPEEVAPAALPAAAANKDARAQEKKPAKDKKADYAEAAAKPSKDKTVDIGEAAAKPSKDEKADKGEAAAKPSQDEKAGKGEPAPETKKGSPAPGKQDAAEEAGADKPGGGGGGKKGKKNKNPNKPLDCGGEAPAEKQASPGPESPHVHGGAFPYYAAHPVLSCYNVAHPSSSVSYYAPAAVVPYGGFPPMVPAEFMYGPPGMQESSMLTRTTPTRAASCDVCHARAAAIPTYIVKLGGQSSCLLTRD

SEQ ID NO: 28551 - protein, 131 aa, Zea mays subsp. mays
  peptide (1)..(131): Ceres Seq. ID no. 12350013
  misc_feature (31)..(131): Pfam Name: Pfam Description:  High molecular weight glutenin subunit
  misc_feature (48)..(131): NCBI GI NO: 23480318 NR Description: Drosop hila melanogaster CG8797 gene product-related
  misc_feature (43)..(131): NCBI GI NO: 24664664 NR Description: Argonaute 2 CG7439-PB
  misc_feature (43)..(131): NCBI GI NO: 28317062 NR Description: RE04347p [Drosophila melanogaster]
  misc_feature (40)..(131): NCBI GI NO: 23480318 NR Description: Drosop hila melanogaster CG8797 gene product-related
  misc_feature (53)..(131): NCBI GI NO: 24664664 NR Description: Argonaute 2 CG7439-PB
  misc_feature (51)..(131): NCBI GI NO: 23480318 NR Description: Drosop hila melanogaster CG8797 gene product-related
  misc_feature (53)..(131): NCBI GI NO: 24664664 NR Description: Argonaute 2 CG7439-PB
  misc_feature (53)..(131): NCBI GI NO: 28317062 NR Description: RE04347p [Drosophila melanogaster]
  misc_feature (53)..(131): NCBI GI NO: 28317062 NR Description: RE04347p [Drosophila melanogaster]
  misc_feature (49)..(131): NCBI GI NO: 28317062 NR Description: RE04347p [Drosophila melanogaster]
MASGEAAEPLQYTVSESFFCTHALHFPVISPGVLLSADHRAAGVHPLRGLQEEGQEGAPQHRRRVQGDGGRGAAQGDGHRQRGSRRARPAPAQGRQAGGALAQLAGTRRGQDEARGGRACRVACGSRQQGR

SEQ ID NO: 28552 - DNA, 1561 bp, Zea mays subsp. mays
  misc_feature (1)..(1561): Ceres Seq. ID no. 12344531
acaacaagcagaagcagaagcagaagctagcagctagtagacgagcgacgagtagctagctagctagctatctagagagctcatcatatcgctgctcgctctcatccaccattatagagaagagcagatcgagctgcagctggcagaggccgagttgttgctagctagctcctgcttgctaaatttgcatcgtatccgatccattccatgaagaagtcgtcgatgatggcgcccatgacgatcatggcgagagttgccgctgtgctcgtcctctcgtcggctgccatggcttccgccgcaggagcagctgggctggacatgaatttctacggcagcacgtgcccgcgcgtggaggccatcgtcaaggaggagatggtggcgatcctcaaggcggcgccgacgctggccggcccgctgctccgcctccatttccacgactgcttcgtcaggggctgcgacgcctccgtgctcctggactcgactcccaccagcacggcggagaaggacgccaccccgaacctcaccctccggggcttcggctccgtgcagcgcgtcaaggaccggctggaggaggcgtgcccgggcaccgtctcctgctccgacgtcctggcgctcatggcgcgcgacgccgtcgtgctggccaacggcccctcctggcccgtcgcgctgggccgccgcgacggccgcgtctccctcgccaacgagaccaaccagctgcccccgcccaccgccaacttcacccgcctcgtcagcatgttcgccgccaagggcctctccgtcagggacctcgtcgtgctctccggcggccacaccctcggcaccgcgcactgcaacctcttcagcgaccgcctctacaacttcaccggcgccaacagcctcgccgacgtcgacccggcgctcgacgccgcctacctcgcccgcctcaggtccaggtgccggagcctcgccgacaacaccacgctcaacgagatggaccccggcagcttcctcagcttcgactccagctactacagcctggtggccaggcgccgggggctcttccactccgacgccgcgctgctcaccgacccggccaccagggcgtacgtccagcgccaggccacggggctcttcaccgccgagttcttccgcgacttcgccgactccatggtcaagatgtccaccatcgacgtgctcaccggccagcagcagggcgagatcagaaagaaatgcaacctcgtcaactgacaaataatacgtacattaattgctgctggttttgacgatgcctttcacttacgttcatccacttaattcatgcatccatgttggttgggttcattcaattattatattcgttgcttacctttacttttgcttggttaatcttaattaaatcgtgtgagttttcttttcttttcttgagtatatatatgtatgtacgtagagcgtgatgagtgtcttttcaagtttattgtttttttttactttttcctctcgtgcatatggttcaaatccatgatgatgatgtaatgcatgtaattaataatgacaatcaagtcaataaacacacatgcaattt

SEQ ID NO: 28553 - protein, 339 aa, Zea mays subsp. mays
  peptide (1)..(339): Ceres Seq. ID no. 12344532
  misc_feature (2)..(339): NCBI GI NO: 34915480 NR Description: putative peroxidase
  misc_feature (13)..(339): NCBI GI NO: 585661 NR Description: Peroxidase 1 precursor
  misc_feature (9)..(339): NCBI GI NO: 39546236 NR Description: OSJNBa0089N06.6
  misc_feature (12)..(339): NCBI GI NO: 34915484 NR Description: putative peroxidase
  misc_feature (13)..(339): NCBI GI NO: 27261038 NR Description: putative peroxidase
  misc_feature (31)..(339): NCBI GI NO: 15232058 NR Description: peroxidase, putative; protein id: At3g01190
  misc_feature (7)..(339): NCBI GI NO: 1086111 NR Description: peroxidase (EC 1
  misc_feature (34)..(339): NCBI GI NO: 15220463 NR Description: peroxidase, putative; protein id: At1g05260
  misc_feature (34)..(339): NCBI GI NO: 21536908 NR Description: putative peroxidase [Arabidopsis thaliana]
  misc_feature (7)..(337): NCBI GI NO: 1402920 NR Description: peroxidase [Arabidopsis thaliana]
MKKSSMMAPMTIMARVAAVLVLSSAAMASAAGAAGLDMNFYGSTCPRVEAIVKEEMVAILKAAPTLAGPLLRLHFHDCFVRGCDASVLLDSTPTSTAEKDATPNLTLRGFGSVQRVKDRLEEACPGTVSCSDVLALMARDAVVLANGPSWPVALGRRDGRVSLANETNQLPPPTANFTRLVSMFAAKGLSVRDLVVLSGGHTLGTAHCNLFSDRLYNFTGANSLADVDPALDAAYLARLRSRCRSLADNTTLNEMDPGSFLSFDSSYYSLVARRRGLFHSDAALLTDPATRAYVQRQATGLFTAEFFRDFADSMVKMSTIDVLTGQQQGEIRKKCNLVN

SEQ ID NO: 28554 - protein, 334 aa, Zea mays subsp. mays
  peptide (1)..(334): Ceres Seq. ID no. 12344533
  misc_feature (1)..(334): NCBI GI NO: 34915480 NR Description: putative peroxidase
  misc_feature (8)..(334): NCBI GI NO: 585661 NR Description: Peroxidase 1 precursor
  misc_feature (4)..(334): NCBI GI NO: 39546236 NR Description: OSJNBa0089N06.6
  misc_feature (7)..(334): NCBI GI NO: 34915484 NR Description: putative peroxidase
  misc_feature (8)..(334): NCBI GI NO: 27261038 NR Description: putative peroxidase
  misc_feature (26)..(334): NCBI GI NO: 15232058 NR Description: peroxidase, putative; protein id: At3g01190
  misc_feature (2)..(334): NCBI GI NO: 1086111 NR Description: peroxidase (EC 1
  misc_feature (29)..(334): NCBI GI NO: 15220463 NR Description: peroxidase, putative; protein id: At1g05260
  misc_feature (29)..(334): NCBI GI NO: 21536908 NR Description: putative peroxidase [Arabidopsis thaliana]
  misc_feature (2)..(332): NCBI GI NO: 1402920 NR Description: peroxidase [Arabidopsis thaliana]
MMAPMTIMARVAAVLVLSSAAMASAAGAAGLDMNFYGSTCPRVEAIVKEEMVAILKAAPTLAGPLLRLHFHDCFVRGCDASVLLDSTPTSTAEKDATPNLTLRGFGSVQRVKDRLEEACPGTVSCSDVLALMARDAVVLANGPSWPVALGRRDGRVSLANETNQLPPPTANFTRLVSMFAAKGLSVRDLVVLSGGHTLGTAHCNLFSDRLYNFTGANSLADVDPALDAAYLARLRSRCRSLADNTTLNEMDPGSFLSFDSSYYSLVARRRGLFHSDAALLTDPATRAYVQRQATGLFTAEFFRDFADSMVKMSTIDVLTGQQQGEIRKKCNLVN

SEQ ID NO: 28555 - protein, 333 aa, Zea mays subsp. mays
  peptide (1)..(333): Ceres Seq. ID no. 12344534
  misc_feature (1)..(333): NCBI GI NO: 34915480 NR Description: putative peroxidase
  misc_feature (7)..(333): NCBI GI NO: 585661 NR Description: Peroxidase 1 precursor
  misc_feature (3)..(333): NCBI GI NO: 39546236 NR Description: OSJNBa0089N06.6
  misc_feature (6)..(333): NCBI GI NO: 34915484 NR Description: putative peroxidase
  misc_feature (7)..(333): NCBI GI NO: 27261038 NR Description: putative peroxidase
  misc_feature (25)..(333): NCBI GI NO: 15232058 NR Description: peroxidase, putative; protein id: At3g01190
  misc_feature (1)..(333): NCBI GI NO: 1086111 NR Description: peroxidase (EC 1
  misc_feature (28)..(333): NCBI GI NO: 15220463 NR Description: peroxidase, putative; protein id: At1g05260
  misc_feature (28)..(333): NCBI GI NO: 21536908 NR Description: putative peroxidase [Arabidopsis thaliana]
  misc_feature (1)..(331): NCBI GI NO: 1402920 NR Description: peroxidase [Arabidopsis thaliana]
MAPMTIMARVAAVLVLSSAAMASAAGAAGLDMNFYGSTCPRVEAIVKEEMVAILKAAPTLAGPLLRLHFHDCFVRGCDASVLLDSTPTSTAEKDATPNLTLRGFGSVQRVKDRLEEACPGTVSCSDVLALMARDAVVLANGPSWPVALGRRDGRVSLANETNQLPPPTANFTRLVSMFAAKGLSVRDLVVLSGGHTLGTAHCNLFSDRLYNFTGANSLADVDPALDAAYLARLRSRCRSLADNTTLNEMDPGSFLSFDSSYYSLVARRRGLFHSDAALLTDPATRAYVQRQATGLFTAEFFRDFADSMVKMSTIDVLTGQQQGEIRKKCNLVN

SEQ ID NO: 28556 - DNA, 1220 bp, Zea mays subsp. mays
  misc_feature (1)..(1220): Ceres Seq. ID no. 13492573
agccgctttacaactccccaccccatcccatccacacacacttcacccagcgcggcggccgccggccgccggcaatggaggccgtggcgcacagcggcgactacctttggcggttcgtggcggagacagagtggtacaacgaggttgtcctcagcgccgtggcgccaggcgactggtggcgcggcctgccgcacccggtgcagtcatggatgcgcaactgcgtcggcggttacctcctctatttcatctctggtttcctctggtgcttcgtcatctactactggaagcgccacgcctacatccccaaagatgccatccccacaaatgacgctatgaagaagcaaatagttgtagcatcgaaggctatgcctttttactgcgctcttccaactttatctgaatatatgattgagagcggatggactcagtgctacttcaatatcagcgaaattggtttttctatgtacctctgttatatggctatgtatctcatctttgtggagtttggaatttactggatgcacagggagttgcatgacataaaaccattatacaaatatctgcatgcaacccaccatatttacaacaaggagaataccttgtctccatttgctggacttgcatttcatccactggatggtattctgcaagcaataccacatgtgttcgcgctcttcctctttccaacgcacttcaggacacatattgcactcttgttcctagaggctgtgtggacaacaaacatccacgactgcattcatggcaagatatggccagtcatgggtgctggatatcacaccattcaccatacgacttaccgtcacaactatggccactacaccatctggatggactggatgtttggtacgctcaatgagccagaagatatcctcaagaaggcttgagtttctcggagctgtggtattcctatggtgctgctgctggaactgctcgatctgttcccagtgtttctaatccgttgagcctgttcagcactgtctgtttatgtaggcatcagtgtgttaattactttgctaggttcatatggctttgtgcttattctgtaatttagcgatgtttgtctcatgacgcaacggagttcaggacgaataaaactttgctagacacattctggattccagttgcttgtacaatgttggaactcaactgtcaatataggatgtaaaacggattccttctagtcttgtacctggtgagtt

SEQ ID NO: 28557 - protein, 300 aa, Zea mays subsp. mays
  peptide (1)..(300): Ceres Seq. ID no. 13492574
  misc_feature (32)..(204): NCBI GI NO: 34895618 NR Description: putative sterol-C5(6)-desaturase
  misc_feature (239)..(299): NCBI GI NO: 34895618 NR Description: putative sterol-C5(6)-desaturase
  misc_feature (33)..(299): NCBI GI NO: 4426627 NR Description: sterol-C5(6)-desaturase homolog
  misc_feature (33)..(299): NCBI GI NO: 33301670 NR Description: Delta-7-sterol-C5
  misc_feature (28)..(293): NCBI GI NO: 5031219 NR Description: delta7 sterol C-5 desaturase
  misc_feature (28)..(293): NCBI GI NO: 15232935 NR Description: delta 7-sterol-C5-desaturase (STE1)
  misc_feature (28)..(293): NCBI GI NO: 21594971 NR Description: sterol-C5-desaturase [Arabidopsis thaliana]
  misc_feature (28)..(293): NCBI GI NO: 2129741 NR Description: C-5 sterol desaturase (EC 1
  misc_feature (29)..(293): NCBI GI NO: 15232937 NR Description: delta 7-sterol-C5-desaturase, putative
  misc_feature (74)..(293): NCBI GI NO: 25742651 NR Description: sterol-C5-desaturase
PLYNSPPHPIHTHFTQRGGRRPPAMEAVAHSGDYLWRFVAETEWYNEVVLSAVAPGDWWRGLPHPVQSWMRNCVGGYLLYFISGFLWCFVIYYWKRHAYIPKDAIPTNDAMKKQIVVASKAMPFYCALPTLSEYMIESGWTQCYFNISEIGFSMYLCYMAMYLIFVEFGIYWMHRELHDIKPLYKYLHATHHIYNKENTLSPFAGLAFHPLDGILQAIPHVFALFLFPTHFRTHIALLFLEAVWTTNIHDCIHGKIWPVMGAGYHTIHHTTYRHNYGHYTIWMDWMFGTLNEPEDILKKA

SEQ ID NO: 28558 - protein, 276 aa, Zea mays subsp. mays
  peptide (1)..(276): Ceres Seq. ID no. 13492575
  misc_feature (8)..(180): NCBI GI NO: 34895618 NR Description: putative sterol-C5(6)-desaturase
  misc_feature (215)..(275): NCBI GI NO: 34895618 NR Description: putative sterol-C5(6)-desaturase
  misc_feature (9)..(275): NCBI GI NO: 4426627 NR Description: sterol-C5(6)-desaturase homolog
  misc_feature (9)..(275): NCBI GI NO: 33301670 NR Description: Delta-7-sterol-C5
  misc_feature (4)..(269): NCBI GI NO: 5031219 NR Description: delta7 sterol C-5 desaturase
  misc_feature (4)..(269): NCBI GI NO: 15232935 NR Description: delta 7-sterol-C5-desaturase (STE1)
  misc_feature (4)..(269): NCBI GI NO: 21594971 NR Description: sterol-C5-desaturase [Arabidopsis thaliana]
  misc_feature (4)..(269): NCBI GI NO: 2129741 NR Description: C-5 sterol desaturase (EC 1
  misc_feature (5)..(269): NCBI GI NO: 15232937 NR Description: delta 7-sterol-C5-desaturase, putative
  misc_feature (50)..(269): NCBI GI NO: 25742651 NR Description: sterol-C5-desaturase
MEAVAHSGDYLWRFVAETEWYNEVVLSAVAPGDWWRGLPHPVQSWMRNCVGGYLLYFISGFLWCFVIYYWKRHAYIPKDAIPTNDAMKKQIVVASKAMPFYCALPTLSEYMIESGWTQCYFNISEIGFSMYLCYMAMYLIFVEFGIYWMHRELHDIKPLYKYLHATHHIYNKENTLSPFAGLAFHPLDGILQAIPHVFALFLFPTHFRTHIALLFLEAVWTTNIHDCIHGKIWPVMGAGYHTIHHTTYRHNYGHYTIWMDWMFGTLNEPEDILKKA

SEQ ID NO: 28559 - protein, 231 aa, Zea mays subsp. mays
  peptide (1)..(231): Ceres Seq. ID no. 13492576
  misc_feature (1)..(135): NCBI GI NO: 34895618 NR Description: putative sterol-C5(6)-desaturase
  misc_feature (170)..(230): NCBI GI NO: 34895618 NR Description: putative sterol-C5(6)-desaturase
  misc_feature (1)..(230): NCBI GI NO: 4426627 NR Description: sterol-C5(6)-desaturase homolog
  misc_feature (1)..(230): NCBI GI NO: 33301670 NR Description: Delta-7-sterol-C5
  misc_feature (1)..(224): NCBI GI NO: 5031219 NR Description: delta7 sterol C-5 desaturase
  misc_feature (1)..(224): NCBI GI NO: 15232935 NR Description: delta 7-sterol-C5-desaturase (STE1)
  misc_feature (1)..(224): NCBI GI NO: 21594971 NR Description: sterol-C5-desaturase [Arabidopsis thaliana]
  misc_feature (1)..(224): NCBI GI NO: 2129741 NR Description: C-5 sterol desaturase (EC 1
  misc_feature (1)..(224): NCBI GI NO: 15232937 NR Description: delta 7-sterol-C5-desaturase, putative
  misc_feature (5)..(224): NCBI GI NO: 25742651 NR Description: sterol-C5-desaturase
MRNCVGGYLLYFISGFLWCFVIYYWKRHAYIPKDAIPTNDAMKKQIVVASKAMPFYCALPTLSEYMIESGWTQCYFNISEIGFSMYLCYMAMYLIFVEFGIYWMHRELHDIKPLYKYLHATHHIYNKENTLSPFAGLAFHPLDGILQAIPHVFALFLFPTHFRTHIALLFLEAVWTTNIHDCIHGKIWPVMGAGYHTIHHTTYRHNYGHYTIWMDWMFGTLNEPEDILKKA

SEQ ID NO: 28560 - DNA, 1998 bp, Zea mays subsp. mays
  misc_feature (1)..(1998): Ceres Seq. ID no. 12356403
actacgcccaggacacgacagggcgctgcttgttgccgattgctagctggtaaagggtaggccggtgcgtctagctaccttggttggttgggtgccggaatttccatggaggtcgcggtcgtggaaagtcctcgtcctcctccgccgccgccgcaggccaaggaggagaagaggtccgacgccaccaagccagagatcgccgcatcgatggtaggaagcgctctcccaatagtcttcgaaagctttccgtcgacgcaaagagaagcggcggcggcgggcgtcaaacaggaggagcgcaggctggaggcggccagggcggagatgggcgaggtgagggaggagaacgagcgcctcaagtcgatgctgtcccgcatcgtcggccagtaccagtccctgcagacgcacttcctcgacgtcgtcaaggtgcgcgagctggcatcatcgtcagccaagcggcggcagagaacaagatccccgcggcgccggctctgctgcccggcaccgacgacggcgacgaaccctacgacgacctcgtctccctgagcctcggcacgagggcgaatagcagcggcggcggccctcgccgcaaggggcacgacgacaggtcggcgtcctcgtctggcaccgctgacgagatgcccaataccgccgacgacgaacgccgccaccagatctccctcggtctcggcttcgcgcgcgggcttccgccatcgggcacggcggcggccgcggacgacgacaaggccagccacgacgcgtccacggcgccggtcctgaacctgagctccgacagcagcggcagcgccggggacaccgacaccacgaagcctgccctggccgccgcgggcgccgcccgtaagagcccgagtgccggtgccggagacgggtcagctgacgacgaggtgcagcagcaggccaagaaggctagggtttccgtcagggtcaagtgtgacactcccacgatgcccgatggctgccaatggcggaagtacgggcagaagatctccaaggggaacccgtccccgcgcgcctactaccgctgcacggtggcgccgcactgcccggtgaggaagcaggtgcagcggtgcgcggaggacacgtcggtcctgatcaccacgtacgattgcgcgcacaaccacccgctcccgccggcggcgacggccatggcgtccacgacctccgcggcggtggccatgctcacctatggatccaccacctccgccgcctcggcctcgctcgtccacggccaccaataccactcgctggcggccgccgccgggcttctcggcccccaccaccatggtctccaccgccgcgtcctgccccaccatcacgctcgacctcacctcccccgccgcgccgcactccctcgtgcactcctccttgccctacgccgccgccgccgccgcagcagcagcggggttcgagtccaaggcggtccccgcggcgtggagcagcgggtacctggcgtacggcggcgcccacccgtcctacgacaccaagatctcgtcggcgttggggcacctgttcggtgggaagcctgggcgtgccatcgagaccggaacagcctgtacgcccagtcgtacctgcagagagctaatagcctgggcgacggccatggtgcggtggcgcccgccgtcacggacacgctcgcgaaggcgatcacgtcggatccgagcttccagtcggtgctggcagcggcgatcacgtccgtcatggggcgcggcggagccgctgctacccagaagtgatcaagatcgatggcgcatgcagcattcgctcatgcataagatcgacttgcaagggcagatcgccgtttttgaccccacacacataggcatgcatggatcggtggttcatgtgtaattaataattccatcacatggttaatttttctttgttcattggagtgttagtaattggccggcttgggaaatgggaatagtgatcataatatgtcaatgtaacagggataatcaatttgatcgatagatgtac

SEQ ID NO: 28561 - protein, 371 aa, Zea mays subsp. mays
  peptide (1)..(371): Ceres Seq. ID no. 12356404
  misc_feature (110)..(170): Pfam Name: Pfam Description:  WRKY DNA -binding domain
  misc_feature (24)..(368): NCBI GI NO: 5042446 NR Description: putative WRKY DNA binding protein
  misc_feature (24)..(368): NCBI GI NO: 34904618 NR Description: putative WRKY DNA binding protein
  misc_feature (82)..(204): NCBI GI NO: 30686070 NR Description: WRKY family transcription factor
  misc_feature (333)..(362): NCBI GI NO: 30686070 NR Description: WRKY family transcription factor
  misc_feature (85)..(198): NCBI GI NO: 30013667 NR Description: Avr9/Cf-9 rapidly elicited protein 126
  misc_feature (321)..(362): NCBI GI NO: 30013667 NR Description: Avr9/Cf-9 rapidly elicited protein 126
  misc_feature (73)..(195): NCBI GI NO: 15233516 NR Description: WRKY family transcription factor
  misc_feature (82)..(204): NCBI GI NO: 25518561 NR Description: hypothetical protein F6A14
  misc_feature (333)..(362): NCBI GI NO: 25518561 NR Description: hypothetical protein F6A14
  misc_feature (1)..(149): NCBI GI NO: 34906312 NR Description: unnamed protein product
MPNTADDERRHQISLGLGFARGLPPSGTAAAADDDKASHDASTAPVLNLSSDSSGSAGDTDTTKPALAAAGAARKSPSAGAGDGSADDEVQQQAKKARVSVRVKCDTPTMPDGCQWRKYGQKISKGNPSPRAYYRCTVAPHCPVRKQVQRCAEDTSVLITTYDCAHNHPLPPAATAMASTTSAAVAMLTYGSTTSAASASLVHGHQYHSLAAAAGLLGPHHHGLHRRVLPHHHARPHLPRRAALPRALLLALRRRRRRSSSGVRVQGGPRGVEQRVPGVRRRPPVLRHQDLVGVGAPVRWEAWACHRDRNSLYAQSYLQRANSLGDGHGAVAPAVTDTLAKAITSDPSFQSVLAAAITSVMGRGGAAATQK

SEQ ID NO: 28562 - protein, 262 aa, Zea mays subsp. mays
  peptide (1)..(262): Ceres Seq. ID no. 12356405
  misc_feature (1)..(61): Pfam Name: Pfam Description:  WRKY DNA -binding domain
  misc_feature (1)..(259): NCBI GI NO: 5042446 NR Description: putative WRKY DNA binding protein
  misc_feature (1)..(259): NCBI GI NO: 34904618 NR Description: putative WRKY DNA binding protein
  misc_feature (1)..(95): NCBI GI NO: 30686070 NR Description: WRKY family transcription factor
  misc_feature (224)..(253): NCBI GI NO: 30686070 NR Description: WRKY family transcription factor
  misc_feature (1)..(89): NCBI GI NO: 30013667 NR Description: Avr9/Cf-9 rapidly elicited protein 126
  misc_feature (212)..(253): NCBI GI NO: 30013667 NR Description: Avr9/Cf-9 rapidly elicited protein 126
  misc_feature (1)..(86): NCBI GI NO: 15233516 NR Description: WRKY family transcription factor
  misc_feature (1)..(95): NCBI GI NO: 25518561 NR Description: hypothetical protein F6A14
  misc_feature (224)..(253): NCBI GI NO: 25518561 NR Description: hypothetical protein F6A14
  misc_feature (1)..(40): NCBI GI NO: 34906312 NR Description: unnamed protein product
MPDGCQWRKYGQKISKGNPSPRAYYRCTVAPHCPVRKQVQRCAEDTSVLITTYDCAHNHPLPPAATAMASTTSAAVAMLTYGSTTSAASASLVHGHQYHSLAAAAGLLGPHHHGLHRRVLPHHHARPHLPRRAALPRALLLALRRRRRRSSSGVRVQGGPRGVEQRVPGVRRRPPVLRHQDLVGVGAPVRWEAWACHRDRNSLYAQSYLQRANSLGDGHGAVAPAVTDTLAKAITSDPSFQSVLAAAITSVMGRGGAAATQK

SEQ ID NO: 28563 - protein, 220 aa, Zea mays subsp. mays
  peptide (1)..(220): Ceres Seq. ID no. 12356406
  misc_feature (1)..(31): NCBI GI NO: 34872074 NR Description: similar to Ser/Arg-related nuclear matrix protein
  misc_feature (1)..(193): NCBI GI NO: 11360318 NR Description: probable mucin DKFZp434C196.1 - human (fragment)
  misc_feature (1)..(39): NCBI GI NO: 34872074 NR Description: similar to Ser/Arg-related nuclear matrix protein
MDPPPPPPRPRSSTATNTTRWRPPPGFSAPTTMVSTAASCPTITLDLTSPAAPHSLVHSSLPYAAAAAAAAAGFESKAVPAAWSSGYLAYGGAHPSYDTKISSALGHLFGGKPGRAIETGTACTPSRTCRELIAWATAMVRWRPPSRTRSRRRSRRIRASSRCWQRRSRPSWGAAEPLLPRSDQDRWRMQHSLMHKIDLQGQIAVFDPTHIGMHGSVVHV

SEQ ID NO: 28564 - DNA, 1407 bp, Zea mays subsp. mays
  misc_feature (1)..(1407): Ceres Seq. ID no. 12353910
aaaaaaaactgcgctccgaataccccagacccccgatcctcccaatggccaccgcattttcgctgcgcgctgcggccccggccaccgctccccgcgccgtctcccgatccacctccgcggcgagggtcgtgcccatggcatcggcactggcgggacgcggaaggctggtggcgcgtgcagcagttacagcaaaggcggatgtgccatcgagcacgtccgacggccatgaggtcttgctgtttgaagctcttcgtgaggccttgatggaagagatggaattagatccaacagtgtgtgtgtttggtgaagatgttggccattacggtggttcttacaaggtgacaaaaggtttggctgatacgtttggtgaccttcgagttctggacacccctattgcggagaactcgtttactggcatgggagttggagcgggaatgaaagggctgaggcccgtcgttgaaggcatgaacatgggattcctgctccttgcttacaaccagatctcaaataactgtggcatgcttcattacacttccggcggccagttcaaaatcccacttgtgatccgtggccccggtggtgtgggtcgtcagcttggagcagagcactcgcagcgcctggaatcgtatttccagtccatcccaggcctgcagatggtcgcctgctcgactccttacaacgctaagggcctgatgaaagctgccatcaggagcgagaaccctgtggtgctgtttgagcacgtccttctgtacaacctgaaggagaaaatcccggacgaggagtacgtgctctgcttggaggaggccgagatggtgcggcctggggagcacgtgactatactcacatactcgcgcatgaggtaccacgtgatgcaggcagcgaagacgctggtgaacaaagggtacgatcccgaggtcatcgacatcaggtcgttgaagccgtttgatctgcacactattggcaactccatcaagaagacccaccgcgtgctgatcgtggaggagtgcatgcgcacgggtgggatcggcgccagccttaggtcggccatcgtcgacaatttctgggactaccttgacgcccccatcatgtgcctgtcatctcaggatgtgcctacgccatatgctgcgactctggaggatgcaaccgttgtgcagcctgcccagatcgtggctgcggtggaacaactatgtgcatagattgtggcctgggacgtttgggagactgttgttgccatgaaaaagccttccgtttgttagttttgtgctgtaacaagcattctttggagacttaaggtgtaggcttatagtcgttttgttcttgttttaagaagtataatccagcttcgtagctgcacggactcgatcttcttgttcctaaatctgcgctatgcaatgccgaatttgatgc

SEQ ID NO: 28565 - protein, 397 aa, Zea mays subsp. mays
  peptide (1)..(397): Ceres Seq. ID no. 12353911
  misc_feature (266)..(388): Pfam Name: Pfam Description:  Transketolase, C-terminal domain
  misc_feature (54)..(396): NCBI GI NO: 15220670 NR Description: pyruvate dehydrogenase E1 beta subunit, putative
  misc_feature (54)..(396): NCBI GI NO: 2454184 NR Description: pyruvate dehydrogenase E1 beta subunit
  misc_feature (46)..(396): NCBI GI NO: 15226781 NR Description: putative pyruvate dehydrogenase E1 beta subunit
  misc_feature (46)..(396): NCBI GI NO: 21593379 NR Description: putative pyruvate dehydrogenase E1 beta subunit
  misc_feature (111)..(396): NCBI GI NO: 2982328 NR Description: pyruvate dehydrogenase E1 beta subunit
  misc_feature (76)..(396): NCBI GI NO: 22711921 NR Description: pyruvate dehydrogenase E1 component beta subunit
  misc_feature (76)..(395): NCBI GI NO: 22297748 NR Description: pyruvate dehydrogenase E1 component beta subunit
  misc_feature (76)..(397): NCBI GI NO: 23041427 NR Description: hypothetical protein
  misc_feature (76)..(397): NCBI GI NO: 17227618 NR Description: pyruvate dehydrogenase E1 beta subunit
  misc_feature (76)..(397): NCBI GI NO: 23124048 NR Description: hypothetical protein [Nostoc punctiforme]
KKLRSEYPRPPILPMATAFSLRAAAPATAPRAVSRSTSAARVVPMASALAGRGRLVARAAVTAKADVPSSTSDGHEVLLFEALREALMEEMELDPTVCVFGEDVGHYGGSYKVTKGLADTFGDLRVLDTPIAENSFTGMGVGAGMKGLRPVVEGMNMGFLLLAYNQISNNCGMLHYTSGGQFKIPLVIRGPGGVGRQLGAEHSQRLESYFQSIPGLQMVACSTPYNAKGLMKAAIRSENPVVLFEHVLLYNLKEKIPDEEYVLCLEEAEMVRPGEHVTILTYSRMRYHVMQAAKTLVNKGYDPEVIDIRSLKPFDLHTIGNSIKKTHRVLIVEECMRTGGIGASLRSAIVDNFWDYLDAPIMCLSSQDVPTPYAATLEDATVVQPAQIVAAVEQLCA

SEQ ID NO: 28566 - protein, 383 aa, Zea mays subsp. mays
  peptide (1)..(383): Ceres Seq. ID no. 12353912
  misc_feature (252)..(374): Pfam Name: Pfam Description:  Transketolase, C-terminal domain
  misc_feature (40)..(382): NCBI GI NO: 15220670 NR Description: pyruvate dehydrogenase E1 beta subunit, putative
  misc_feature (40)..(382): NCBI GI NO: 2454184 NR Description: pyruvate dehydrogenase E1 beta subunit
  misc_feature (32)..(382): NCBI GI NO: 15226781 NR Description: putative pyruvate dehydrogenase E1 beta subunit
  misc_feature (32)..(382): NCBI GI NO: 21593379 NR Description: putative pyruvate dehydrogenase E1 beta subunit
  misc_feature (97)..(382): NCBI GI NO: 2982328 NR Description: pyruvate dehydrogenase E1 beta subunit
  misc_feature (62)..(382): NCBI GI NO: 22711921 NR Description: pyruvate dehydrogenase E1 component beta subunit
  misc_feature (62)..(381): NCBI GI NO: 22297748 NR Description: pyruvate dehydrogenase E1 component beta subunit
  misc_feature (62)..(383): NCBI GI NO: 23041427 NR Description: hypothetical protein
  misc_feature (62)..(383): NCBI GI NO: 17227618 NR Description: pyruvate dehydrogenase E1 beta subunit
  misc_feature (62)..(383): NCBI GI NO: 23124048 NR Description: hypothetical protein [Nostoc punctiforme]
MATAFSLRAAAPATAPRAVSRSTSAARVVPMASALAGRGRLVARAAVTAKADVPSSTSDGHEVLLFEALREALMEEMELDPTVCVFGEDVGHYGGSYKVTKGLADTFGDLRVLDTPIAENSFTGMGVGAGMKGLRPVVEGMNMGFLLLAYNQISNNCGMLHYTSGGQFKIPLVIRGPGGVGRQLGAEHSQRLESYFQSIPGLQMVACSTPYNAKGLMKAAIRSENPVVLFEHVLLYNLKEKIPDEEYVLCLEEAEMVRPGEHVTILTYSRMRYHVMQAAKTLVNKGYDPEVIDIRSLKPFDLHTIGNSIKKTHRVLIVEECMRTGGIGASLRSAIVDNFWDYLDAPIMCLSSQDVPTPYAATLEDATVVQPAQIVAAVEQLCA

SEQ ID NO: 28567 - protein, 353 aa, Zea mays subsp. mays
  peptide (1)..(353): Ceres Seq. ID no. 12353913
  misc_feature (222)..(344): Pfam Name: Pfam Description:  Transketolase, C-terminal domain
  misc_feature (10)..(352): NCBI GI NO: 15220670 NR Description: pyruvate dehydrogenase E1 beta subunit, putative
  misc_feature (10)..(352): NCBI GI NO: 2454184 NR Description: pyruvate dehydrogenase E1 beta subunit
  misc_feature (2)..(352): NCBI GI NO: 15226781 NR Description: putative pyruvate dehydrogenase E1 beta subunit
  misc_feature (2)..(352): NCBI GI NO: 21593379 NR Description: putative pyruvate dehydrogenase E1 beta subunit
  misc_feature (67)..(352): NCBI GI NO: 2982328 NR Description: pyruvate dehydrogenase E1 beta subunit
  misc_feature (32)..(352): NCBI GI NO: 22711921 NR Description: pyruvate dehydrogenase E1 component beta subunit
  misc_feature (32)..(351): NCBI GI NO: 22297748 NR Description: pyruvate dehydrogenase E1 component beta subunit
  misc_feature (32)..(353): NCBI GI NO: 23041427 NR Description: hypothetical protein
  misc_feature (32)..(353): NCBI GI NO: 17227618 NR Description: pyruvate dehydrogenase E1 beta subunit
  misc_feature (32)..(353): NCBI GI NO: 23124048 NR Description: hypothetical protein [Nostoc punctiforme]
MASALAGRGRLVARAAVTAKADVPSSTSDGHEVLLFEALREALMEEMELDPTVCVFGEDVGHYGGSYKVTKGLADTFGDLRVLDTPIAENSFTGMGVGAGMKGLRPVVEGMNMGFLLLAYNQISNNCGMLHYTSGGQFKIPLVIRGPGGVGRQLGAEHSQRLESYFQSIPGLQMVACSTPYNAKGLMKAAIRSENPVVLFEHVLLYNLKEKIPDEEYVLCLEEAEMVRPGEHVTILTYSRMRYHVMQAAKTLVNKGYDPEVIDIRSLKPFDLHTIGNSIKKTHRVLIVEECMRTGGIGASLRSAIVDNFWDYLDAPIMCLSSQDVPTPYAATLEDATVVQPAQIVAAVEQLCA

SEQ ID NO: 28568 - DNA, 1521 bp, Zea mays subsp. mays
  misc_feature (1)..(1521): Ceres Seq. ID no. 12409001
agaaatctccgtgcgtgtttggccgaaatccacgggagggtgctcgtctttgctgagctgctccggcctccggagcggagctctgcctacttaagttcaggcttgttccgccatccgaggacaagattcggagcgtcgccgaagggaggcgatgaaggggaaaggcggggcgatggaccgcaggtcctccgccaggtggagggtgttgctgctctgcgcattcagcttcggcctcggcatgctcttcaccgaccggttctggacagcaccggatagcagtaaccatatcatgtctcaaagccggaggcaagagcaagagctccaacttgtatcagaggattgcagcacaaagaggaagcatggggaagacaaggatataatgggagaggtaaccaagacccatgaagctatacaatcattggataagtccatctcaacgctgcagatggagcttgcagcaaagcggagcacacttgagctgctccgatctagtggttcaccagtaacctttgaaactagccaaccaaggaaaaaggcatttgttgtcattggagtcaatactgcattcagcagccgcaagcgccgtgattctgtccgggagacatggatgcctcaaggagaaaaactgcaacaattagaagaacaaaagggaatagtaatccgcttcactatcgggcacagtgctacatctgacagtatactggacaaagctatagattcagaggacgctcagcatcatgactttcttaggctggaccatgttgagggataccatgaactctcagctaagacaaaaatattcttctctactgctcttggcatctgggatgctgacttctacgtcaaggttgatgatgatgtgcatgtaaacttaggaatgcttgccactacccttgctcggcataaattgaaaccaagaacttatattggctgcatgaagtcaggcccagttctcgctgacaagaatgttaagtaccatgaacctgagtactggaaatttggggaggaaggaaataaatacttccgtcatgccacggggcagatatatgccatttcgaaagatctcgctacttatatttcaatcaaccagcctatcttgcacaaatatgcaaatgaagacgtgtcgcttggatcatggttcattggtttggaagttaatcacattgatgaaaggaacatgtgctgtggaactccaccagattgtgagtggaaagggcaagctggtaatgtctgtgtagcgtccttcgattggagctgcagtggcatatgcaagtctgttgagaggatcaaagatgtacatgctcgctgtggtgagggggattcagcagtttggagtgctcttttctagcgcataccttctttgcccgtaaatatgtagcatacttgctaagctctcgcggcggacaccataggcaactcaagtaaacttgacaaaaaccaaagatcgtggagtatgatctgaaactgcagaaacagtatgttgcttggaaatattctgcaacaacataattttgctccggc

SEQ ID NO: 28569 - protein, 398 aa, Zea mays subsp. mays
  peptide (1)..(398): Ceres Seq. ID no. 12409002
  misc_feature (143)..(341): Pfam Name: Pfam Description:  Galactosyltransferase
  misc_feature (13)..(398): NCBI GI NO: 4138265 NR Description: Avr9 elicitor response protein [Nicotiana tabacum]
  misc_feature (13)..(397): NCBI GI NO: 30699558 NR Description: Avr9 elicitor response protein -related
  misc_feature (13)..(397): NCBI GI NO: 12323294 NR Description: putative
  misc_feature (6)..(398): NCBI GI NO: 15220440 NR Description: putative AVR9 elicitor response protein
  misc_feature (2)..(398): NCBI GI NO: 15225684 NR Description: unknown protein; protein id: At2g32430.1
  misc_feature (8)..(396): NCBI GI NO: 18395060 NR Description: Expressed protein; protein id: At1g22015
  misc_feature (13)..(398): NCBI GI NO: 18416895 NR Description: Avr9 elicitor response like protein
  misc_feature (13)..(398): NCBI GI NO: 7485336 NR Description: hypothetical protein F10M23
  misc_feature (13)..(398): NCBI GI NO: 15223337 NR Description: Avr9 elicitor response protein, putative
  misc_feature (8)..(391): NCBI GI NO: 15217544 NR Description: elicitor response protein, putative
MKGKGGAMDRRSSARWRVLLLCAFSFGLGMLFTDRFWTAPDSSNHIMSQSRRQEQELQLVSEDCSTKRKHGEDKDIMGEVTKTHEAIQSLDKSISTLQMELAAKRSTLELLRSSGSPVTFETSQPRKKAFVVIGVNTAFSSRKRRDSVRETWMPQGEKLQQLEEQKGIVIRFTIGHSATSDSILDKAIDSEDAQHHDFLRLDHVEGYHELSAKTKIFFSTALGIWDADFYVKVDDDVHVNLGMLATTLARHKLKPRTYIGCMKSGPVLADKNVKYHEPEYWKFGEEGNKYFRHATGQIYAISKDLATYISINQPILHKYANEDVSLGSWFIGLEVNHIDERNMCCGTPPDCEWKGQAGNVCVASFDWSCSGICKSVERIKDVHARCGEGDSAVWSALF

SEQ ID NO: 28570 - protein, 391 aa, Zea mays subsp. mays
  peptide (1)..(391): Ceres Seq. ID no. 12409003
  misc_feature (136)..(334): Pfam Name: Pfam Description:  Galactosyltransferase
  misc_feature (6)..(391): NCBI GI NO: 4138265 NR Description: Avr9 elicitor response protein [Nicotiana tabacum]
  misc_feature (6)..(390): NCBI GI NO: 30699558 NR Description: Avr9 elicitor response protein -related
  misc_feature (6)..(390): NCBI GI NO: 12323294 NR Description: putative
  misc_feature (1)..(391): NCBI GI NO: 15220440 NR Description: putative AVR9 elicitor response protein
  misc_feature (1)..(391): NCBI GI NO: 15225684 NR Description: unknown protein; protein id: At2g32430.1
  misc_feature (1)..(389): NCBI GI NO: 18395060 NR Description: Expressed protein; protein id: At1g22015
  misc_feature (6)..(391): NCBI GI NO: 18416895 NR Description: Avr9 elicitor response like protein
  misc_feature (6)..(391): NCBI GI NO: 7485336 NR Description: hypothetical protein F10M23
  misc_feature (6)..(391): NCBI GI NO: 15223337 NR Description: Avr9 elicitor response protein, putative
  misc_feature (1)..(384): NCBI GI NO: 15217544 NR Description: elicitor response protein, putative
MDRRSSARWRVLLLCAFSFGLGMLFTDRFWTAPDSSNHIMSQSRRQEQELQLVSEDCSTKRKHGEDKDIMGEVTKTHEAIQSLDKSISTLQMELAAKRSTLELLRSSGSPVTFETSQPRKKAFVVIGVNTAFSSRKRRDSVRETWMPQGEKLQQLEEQKGIVIRFTIGHSATSDSILDKAIDSEDAQHHDFLRLDHVEGYHELSAKTKIFFSTALGIWDADFYVKVDDDVHVNLGMLATTLARHKLKPRTYIGCMKSGPVLADKNVKYHEPEYWKFGEEGNKYFRHATGQIYAISKDLATYISINQPILHKYANEDVSLGSWFIGLEVNHIDERNMCCGTPPDCEWKGQAGNVCVASFDWSCSGICKSVERIKDVHARCGEGDSAVWSALF

SEQ ID NO: 28571 - protein, 369 aa, Zea mays subsp. mays
  peptide (1)..(369): Ceres Seq. ID no. 12409004
  misc_feature (114)..(312): Pfam Name: Pfam Description:  Galactosyltransferase
  misc_feature (1)..(369): NCBI GI NO: 4138265 NR Description: Avr9 elicitor response protein [Nicotiana tabacum]
  misc_feature (1)..(368): NCBI GI NO: 30699558 NR Description: Avr9 elicitor response protein -related
  misc_feature (1)..(368): NCBI GI NO: 12323294 NR Description: putative
  misc_feature (1)..(369): NCBI GI NO: 15220440 NR Description: putative AVR9 elicitor response protein
  misc_feature (1)..(369): NCBI GI NO: 15225684 NR Description: unknown protein; protein id: At2g32430.1
  misc_feature (1)..(367): NCBI GI NO: 18395060 NR Description: Expressed protein; protein id: At1g22015
  misc_feature (1)..(369): NCBI GI NO: 18416895 NR Description: Avr9 elicitor response like protein
  misc_feature (1)..(369): NCBI GI NO: 7485336 NR Description: hypothetical protein F10M23
  misc_feature (1)..(369): NCBI GI NO: 15223337 NR Description: Avr9 elicitor response protein, putative
  misc_feature (1)..(362): NCBI GI NO: 15217544 NR Description: elicitor response protein, putative
MLFTDRFWTAPDSSNHIMSQSRRQEQELQLVSEDCSTKRKHGEDKDIMGEVTKTHEAIQSLDKSISTLQMELAAKRSTLELLRSSGSPVTFETSQPRKKAFVVIGVNTAFSSRKRRDSVRETWMPQGEKLQQLEEQKGIVIRFTIGHSATSDSILDKAIDSEDAQHHDFLRLDHVEGYHELSAKTKIFFSTALGIWDADFYVKVDDDVHVNLGMLATTLARHKLKPRTYIGCMKSGPVLADKNVKYHEPEYWKFGEEGNKYFRHATGQIYAISKDLATYISINQPILHKYANEDVSLGSWFIGLEVNHIDERNMCCGTPPDCEWKGQAGNVCVASFDWSCSGICKSVERIKDVHARCGEGDSAVWSALF

SEQ ID NO: 28572 - DNA, 1164 bp, Zea mays subsp. mays
  misc_feature (1)..(1164): Ceres Seq. ID no. 12365653
ctcgtaatctctcctgcgtccatcctctcctcgcggcgggggaagaatggccgacccgagcttcctcgtcgggatcgtagggaacgtaatctccatcctcgtcttcgcgtcgccgatagcgacgttccggcgcatcgtgaggagcaggagcacggaggacttcaggtggctgccgtacgtcaccaccctgctcagcaccagcctctggaccttctacggcctcctcaagcccggctgcctcctcgtcgtcaccgtcaacggcgccggcgccgcgctcgaggccgcctacgtcgcgctctacctcgtctacgcgccaagggagaccaaggcgaagatggccaaggtggtggtggccgtgaacgtcgccttccttgccgcggtcgtcgcggtggcgcctgctggcgctgcacggcggcgcccgcctgttcgcggtgggcctgctgtgcgccgcgctcacggtcgggatgtacgcggcaccgctcggcgcgatgcggacggtggtgaagacccggagcgtggagtacatgcccttctccctctccttcttcctcttcctcaacggcggcgtctggagcatctactccctgctcgtcaaggactacttcatcggggtccccaacgccatcggcctcgtcctgggcacggcgcagctgctgctgtacctggcgtaccggaaggcgccggcgagcaaggacgacgacgaggaggcggccgctgctgcgtcgggggacgacggcgacgacgaggaggaggaggaagggctgacgcacctgatggggcagcaggtggagatggcgcagcgcggccgcctgcgcctgcacaaggggcagagcctgcccaagccgccgccgggcgggccgctgtcgtcgccgcgccacgggttcgggagcatcatcaagtccctgtccgccacccccgtcgagctgcactccgtcctgtaccagcacgcccggttccagcccgtcaagaaggacgacgacgacgtggaggccaacgactgactgatatgatgcattaattgatgctgctattgttcgaccgacgtggtagcggtacagaggcgcccttttagtattcaggccagggtagcgttccaatggacagggtttgagtgtgttcttcacatatttgcaggttcgaaacccagatgaattaatatgtttg

SEQ ID NO: 28573 - protein, 323 aa, Zea mays subsp. mays
  peptide (1)..(323): Ceres Seq. ID no. 12365654
  misc_feature (6)..(91): Pfam Name: Pfam Description:  MtN3/saliva family
  misc_feature (1)..(118): NCBI GI NO: 27754697 NR Description: putative cytochrome c oxidoreductase
  misc_feature (1)..(118): NCBI GI NO: 30683457 NR Description: nodulin MtN3 family protein [Arabidopsis thaliana]
  misc_feature (1)..(116): NCBI GI NO: 30684193 NR Description: nodulin MtN3 family protein [Arabidopsis thaliana]
  misc_feature (6)..(123): NCBI GI NO: 34907420 NR Description: P0018C10.36
  misc_feature (5)..(115): NCBI GI NO: 21593422 NR Description: senescence-associated protein (SAG29)
  misc_feature (5)..(115): NCBI GI NO: 15240040 NR Description: senescence-associated protein
  misc_feature (5)..(115): NCBI GI NO: 1619602 NR Description: MtN3 [Medicago truncatula]
  misc_feature (5)..(133): NCBI GI NO: 15241278 NR Description: MtN3-like protein; protein id: At5g50800
  misc_feature (5)..(133): NCBI GI NO: 21593109 NR Description: MtN3-like protein [Arabidopsis thaliana]
  misc_feature (5)..(113): NCBI GI NO: 14715258 NR Description: N3 like protein [Medicago truncatula]
MADPSFLVGIVGNVISILVFASPIATFRRIVRSRSTEDFRWLPYVTTLLSTSLWTFYGLLKPGCLLVVTVNGAGAALEAAYVALYLVYAPRETKAKMAKVVVAVNVAFLAAVVAVAPAGAARRRPPVRGGPAVRRAHGRDVRGTARRDADGGEDPERGVHALLPLLLPLPQRRRLEHLLPARQGLLHRGPQRHRPRPGHGAAAAVPGVPEGAGEQGRRRGGGRCCVGGRRRRRGGGGRADAPDGAAGGDGAARPPAPAQGAEPAQAAAGRAAVVAAPRVREHHQVPVRHPRRAALRPVPARPVPARQEGRRRRGGQRLTDMMH

SEQ ID NO: 28574 - protein, 227 aa, Zea mays subsp. mays
  peptide (1)..(227): Ceres Seq. ID no. 12365655
  misc_feature (101)..(159): Pfam Name: 20 copies Pfam Description: Collagen triple helix repeat
  misc_feature (1)..(22): NCBI GI NO: 27754697 NR Description: putative cytochrome c oxidoreductase
  misc_feature (1)..(22): NCBI GI NO: 30683457 NR Description: nodulin MtN3 family protein [Arabidopsis thaliana]
  misc_feature (1)..(20): NCBI GI NO: 30684193 NR Description: nodulin MtN3 family protein [Arabidopsis thaliana]
  misc_feature (1)..(27): NCBI GI NO: 34907420 NR Description: P0018C10.36
  misc_feature (1)..(19): NCBI GI NO: 21593422 NR Description: senescence-associated protein (SAG29)
  misc_feature (1)..(19): NCBI GI NO: 15240040 NR Description: senescence-associated protein
  misc_feature (1)..(19): NCBI GI NO: 1619602 NR Description: MtN3 [Medicago truncatula]
  misc_feature (1)..(37): NCBI GI NO: 15241278 NR Description: MtN3-like protein; protein id: At5g50800
  misc_feature (1)..(37): NCBI GI NO: 21593109 NR Description: MtN3-like protein [Arabidopsis thaliana]
  misc_feature (1)..(17): NCBI GI NO: 14715258 NR Description: N3 like protein [Medicago truncatula]
MAKVVVAVNVAFLAAVVAVAPAGAARRRPPVRGGPAVRRAHGRDVRGTARRDADGGEDPERGVHALLPLLLPLPQRRRLEHLLPARQGLLHRGPQRHRPRPGHGAAAAVPGVPEGAGEQGRRRGGGRCCVGGRRRRRGGGGRADAPDGAAGGDGAARPPAPAQGAEPAQAAAGRAAVVAAPRVREHHQVPVRHPRRAALRPVPARPVPARQEGRRRRGGQRLTDMMH

SEQ ID NO: 28575 - protein, 178 aa, Zea mays subsp. mays
  peptide (1)..(178): Ceres Seq. ID no. 12365656
  misc_feature (1)..(101): NCBI GI NO: 27754697 NR Description: putative cytochrome c oxidoreductase
  misc_feature (1)..(101): NCBI GI NO: 30683457 NR Description: nodulin MtN3 family protein [Arabidopsis thaliana]
  misc_feature (1)..(80): NCBI GI NO: 30684193 NR Description: nodulin MtN3 family protein [Arabidopsis thaliana]
  misc_feature (1)..(96): NCBI GI NO: 34907420 NR Description: P0018C10.36
  misc_feature (1)..(81): NCBI GI NO: 21593422 NR Description: senescence-associated protein (SAG29)
  misc_feature (1)..(72): NCBI GI NO: 15240040 NR Description: senescence-associated protein
  misc_feature (1)..(70): NCBI GI NO: 1619602 NR Description: MtN3 [Medicago truncatula]
  misc_feature (1)..(80): NCBI GI NO: 15241278 NR Description: MtN3-like protein; protein id: At5g50800
  misc_feature (1)..(80): NCBI GI NO: 21593109 NR Description: MtN3-like protein [Arabidopsis thaliana]
  misc_feature (1)..(72): NCBI GI NO: 14715258 NR Description: N3 like protein [Medicago truncatula]
MYAAPLGAMRTVVKTRSVEYMPFSLSFFLFLNGGVWSIYSLLVKDYFIGVPNAIGLVLGTAQLLLYLAYRKAPASKDDDEEAAAAASGDDGDDEEEEEGLTHLMGQQVEMAQRGRLRLHKGQSLPKPPPGGPLSSPRHGFGSIIKSLSATPVELHSVLYQHARFQPVKKDDDDVEAND

SEQ ID NO: 28576 - DNA, 1951 bp, Zea mays subsp. mays
  misc_feature (1)..(1951): Ceres Seq. ID no. 12372631
gcacgagaccattacctagaacatcctaatcgaaaaaacggatcaagcgaggtagacgactccgcgtctaattaaacctgtggtctgcggacgggcggtcgtcggttagagcattgcttccgtgtggtgcggttgatagctcggatcttctgctggcggagttcgtcttggaggagaagagagagagagagcgcgcgcgccgggatcggagccaggaagcatccagcagcgatggcgggcggcggggtggcggcgctgggcgtgaagacggaccgcgcggcgcagtacaaggggcgcatgacgctcgccgtcgccacgacctgcctcgtggccgccgtcgggggcgccatcttcggctacgacatcggcatctccggaggcgtgacatccatggacccattcctggagaaattcttcccggtagtgttccaccggaagaactccggcgggaagaacaactactgtaagtacgacaaccagggactagcggcgttcacatcgtcactctacctcgccggcctcgttgcctccctcgtcgcgtcccccgtgacgaggaactacggccgcaaagctagcattgtctgcggcggcgtgagcttcctcatcggcgcggccctcaacgtggccgccgtgaatctggctatgctcatcctcgggcgcatcatgctcggcgtcggcatcggttttggcaaccaggctgtgccgctgtacctgtcggagatggcgccggcgcacctccgcggcggcctgaacatgatgttccagctcgcgacgacgctgggcatcttcacggcgaacctgatcaactatggcacgcagaacatcaagccgtgggggtggcggctgtcgctgggcctcgcggcggtgccggcgctgctgatgacgttgggcgggctctttcttccggagactcccaacagcctcattgagcgcgggcgcgtggaggagggtcggcgcgtgctggagcgcatccggggcacggccgacgtggacgccgagttcacggacatggtggaggcgagcgagctggccaacaccgtcgagcacccgttccggaacatcctgcagccgcgcaaccggccgcagctggtgatggccgtgtgcatgccggcgttccagatcctgacgggcatcaactccatcctcttctacgcgccggtcctgttccagagcatgggtttcggcgggaacgcgtcccctctactcctccgtgctcaccggcgccgtgctcttctcctcgacgctcatctccatcggcatcgtcgaccgcctcggccgccggaagctcctcatcagcggcgggatccagatgatcgtctgccaggtgatcgtggcggtgatcctgggcgtgaagttcggggcggagaagcaactggcgcggagctactcggtcgcggtggtggtggtgatctgcctgttcgttctggcgttcgggtggtcgtggggcccgctgggatggacggtgccgagcgagatcttcccgctggagacgcggtcggcggggcagagcatcacggtggccgtgaacctgctcttcaccttcgccatcgcgcaggcgttcctgtcgctgctgtgcgccttcaagttcggcatcttcctctttttcgcggggtggatcaccgtcatgaccgtgttcgtctacgtcttcctgccggagaccaagggcgtgcccatcgaagagatggtgctgctatggcggaagcactggttctggaagaaggtcatgccggacatgccgctcgaggatggctggggcgcggctgagggtcatgcggcacctgccagcaacaatcacaagggatgactggagtgaagcatgcatggttgcctggttggtttcgtggacactttatataataactgaagaaaacaagacacacactaacatgtaggcggctgcttattcttattgtattttgtataaagcaggctgtgtgatatgcaggggtag

SEQ ID NO: 28577 - protein, 510 aa, Zea mays subsp. mays
  peptide (1)..(510): Ceres Seq. ID no. 12372632
  misc_feature (30)..(322): Pfam Name: and other Pfam Description: Sugar
  misc_feature (1)..(322): NCBI GI NO: 347855 NR Description: glucose transporter
  misc_feature (1)..(322): NCBI GI NO: 15235215 NR Description: putative hexose transporter; protein id:At4g02050
  misc_feature (1)..(322): NCBI GI NO: 1723182 NR Description: Sugar carrier protein A
  misc_feature (1)..(322): NCBI GI NO: 15240313 NR Description: hexose transporter - like protein
  misc_feature (1)..(322): NCBI GI NO: 5734440 NR Description: hexose transporter [Lycopersicon esculentum]
  misc_feature (1)..(322): NCBI GI NO: 7446737 NR Description: hexose transport protein - tomato
  misc_feature (4)..(322): NCBI GI NO: 7446723 NR Description: probable monosaccharide transport protein Mst-1 -Norway spruce
  misc_feature (1)..(322): NCBI GI NO: 100347 NR Description: monosaccharide transport protein MST1
  misc_feature (1)..(338): NCBI GI NO: 15223861 NR Description: sugar carrier protein, putative
  misc_feature (90)..(324): NCBI GI NO: 27467165 NR Description: bicyclomycin resistance protein TcaB
MAGGGVAALGVKTDRAAQYKGRMTLAVATTCLVAAVGGAIFGYDIGISGGVTSMDPFLEKFFPVVFHRKNSGGKNNYCKYDNQGLAAFTSSLYLAGLVASLVASPVTRNYGRKASIVCGGVSFLIGAALNVAAVNLAMLILGRIMLGVGIGFGNQAVPLYLSEMAPAHLRGGLNMMFQLATTLGIFTANLINYGTQNIKPWGWRLSLGLAAVPALLMTLGGLFLPETPNSLIERGRVEEGRRVLERIRGTADVDAEFTDMVEASELANTVEHPFRNILQPRNRPQLVMAVCMPAFQILTGINSILFYAPVLFQSMGFGGNASPLLLRAHRRRALLLDAHLHRHRRPPRPPEAPHQRRDPDDRLPGDRGGDPGREVRGGEATGAELLGRGGGGDLPVRSGVRVVVGPAGMDGAERDLPAGDAVGGAEHHGGREPALHLRHRAGVPVAAVRLQVRHLPLFRGVDHRHDRVRLRLPAGDQGRAHRRDGAAMAEALVLEEGHAGHAARGWLGRG

SEQ ID NO: 28578 - protein, 488 aa, Zea mays subsp. mays
  peptide (1)..(488): Ceres Seq. ID no. 12372633
  misc_feature (8)..(300): Pfam Name: and other Pfam Description: Sugar
  misc_feature (1)..(300): NCBI GI NO: 347855 NR Description: glucose transporter
  misc_feature (1)..(300): NCBI GI NO: 15235215 NR Description: putative hexose transporter; protein id:At4g02050
  misc_feature (1)..(300): NCBI GI NO: 1723182 NR Description: Sugar carrier protein A
  misc_feature (1)..(300): NCBI GI NO: 15240313 NR Description: hexose transporter - like protein
  misc_feature (1)..(300): NCBI GI NO: 5734440 NR Description: hexose transporter [Lycopersicon esculentum]
  misc_feature (1)..(300): NCBI GI NO: 7446737 NR Description: hexose transport protein - tomato
  misc_feature (1)..(300): NCBI GI NO: 7446723 NR Description: probable monosaccharide transport protein Mst-1 -Norway spruce
  misc_feature (1)..(300): NCBI GI NO: 100347 NR Description: monosaccharide transport protein MST1
  misc_feature (1)..(316): NCBI GI NO: 15223861 NR Description: sugar carrier protein, putative
  misc_feature (68)..(302): NCBI GI NO: 27467165 NR Description: bicyclomycin resistance protein TcaB
MTLAVATTCLVAAVGGAIFGYDIGISGGVTSMDPFLEKFFPVVFHRKNSGGKNNYCKYDNQGLAAFTSSLYLAGLVASLVASPVTRNYGRKASIVCGGVSFLIGAALNVAAVNLAMLILGRIMLGVGIGFGNQAVPLYLSEMAPAHLRGGLNMMFQLATTLGIFTANLINYGTQNIKPWGWRLSLGLAAVPALLMTLGGLFLPETPNSLIERGRVEEGRRVLERIRGTADVDAEFTDMVEASELANTVEHPFRNILQPRNRPQLVMAVCMPAFQILTGINSILFYAPVLFQSMGFGGNASPLLLRAHRRRALLLDAHLHRHRRPPRPPEAPHQRRDPDDRLPGDRGGDPGREVRGGEATGAELLGRGGGGDLPVRSGVRVVVGPAGMDGAERDLPAGDAVGGAEHHGGREPALHLRHRAGVPVAAVRLQVRHLPLFRGVDHRHDRVRLRLPAGDQGRAHRRDGAAMAEALVLEEGHAGHAARGWLGRG

SEQ ID NO: 28579 - protein, 457 aa, Zea mays subsp. mays
  peptide (1)..(457): Ceres Seq. ID no. 12372634
  misc_feature (1)..(269): Pfam Name: and other Pfam Description: Sugar
  misc_feature (1)..(269): NCBI GI NO: 347855 NR Description: glucose transporter
  misc_feature (1)..(269): NCBI GI NO: 15235215 NR Description: putative hexose transporter; protein id:At4g02050
  misc_feature (1)..(269): NCBI GI NO: 1723182 NR Description: Sugar carrier protein A
  misc_feature (1)..(269): NCBI GI NO: 15240313 NR Description: hexose transporter - like protein
  misc_feature (1)..(269): NCBI GI NO: 5734440 NR Description: hexose transporter [Lycopersicon esculentum]
  misc_feature (1)..(269): NCBI GI NO: 7446737 NR Description: hexose transport protein - tomato
  misc_feature (1)..(269): NCBI GI NO: 7446723 NR Description: probable monosaccharide transport protein Mst-1 -Norway spruce
  misc_feature (1)..(269): NCBI GI NO: 100347 NR Description: monosaccharide transport protein MST1
  misc_feature (1)..(285): NCBI GI NO: 15223861 NR Description: sugar carrier protein, putative
  misc_feature (37)..(271): NCBI GI NO: 27467165 NR Description: bicyclomycin resistance protein TcaB
MDPFLEKFFPVVFHRKNSGGKNNYCKYDNQGLAAFTSSLYLAGLVASLVASPVTRNYGRKASIVCGGVSFLIGAALNVAAVNLAMLILGRIMLGVGIGFGNQAVPLYLSEMAPAHLRGGLNMMFQLATTLGIFTANLINYGTQNIKPWGWRLSLGLAAVPALLMTLGGLFLPETPNSLIERGRVEEGRRVLERIRGTADVDAEFTDMVEASELANTVEHPFRNILQPRNRPQLVMAVCMPAFQILTGINSILFYAPVLFQSMGFGGNASPLLLRAHRRRALLLDAHLHRHRRPPRPPEAPHQRRDPDDRLPGDRGGDPGREVRGGEATGAELLGRGGGGDLPVRSGVRVVVGPAGMDGAERDLPAGDAVGGAEHHGGREPALHLRHRAGVPVAAVRLQVRHLPLFRGVDHRHDRVRLRLPAGDQGRAHRRDGAAMAEALVLEEGHAGHAARGWLGRG

SEQ ID NO: 28580 - DNA, 1435 bp, Zea mays subsp. mays
  misc_feature (1)..(1435): Ceres Seq. ID no. 12359747
ctttctatccctccactccctcttatctgctgcgccatcctccccggcctccaccatggccacagccgccgcggccaccgcctcctcctccctcctcgcgccggcggccagcagcacggcgccggcctcgtcaaacgcgctgctgttcccctcctccgtgccgtcgctgcgtgcgtacccgcggctcctcctcgcgttccgccgccccgccgcggccgccgtcgccgacccgcagggggccgtgctcgaagaggaggcggaggtcgaccagcagggccagtacgacgacgacgacgggtatgagggcgggcgcggccccgcgttcacggcccccacgcgcccgcgcaccggcaaggccgcgctactgcttaagcgcgaccgcacgaggtcgaagaggttcctcgagatacagaagctgcgggagagcaagaaggactacgacgtgcccaccgccatctcgttgatgaagcagatgtccagtgccaagtttgttgagtcagcggaggcgcacttccgcatgaacctcgaccccaagtacaatgaccagcagctccgggccacggtgaatttgcccaagggaacaggccagtcggtgaagattgcggttctcacacaaggtgagaagatagatgaagctagagctgcaggagctgatatcgtaggtggagaagatttgattgaacaaataaaaggaggatttatggagtttgacaaattgattgcatcacctgatatgatgcctaaggttgcgggcttaggtaagattctaggaccaagaggactgatgcctaaccccaaagctggcactgtttcttcaaatattactcaggctatagaagagttcaagaaagggaaggttgaatacagagttgataaatcaggaattgtccatattccctttggcaaggttgactttccagaggaagatctcattgcaaacttcatgtctgttgttcgttctgttgagaggaacaagccatctggtgctaaggggatatactggaaaacggcgtacttgtgctcatccatgggaccttctatcaagctaaacataaaagaaatgcttgactatggtttggaatcatctgactagatgtgaccacaggcaccagttaagtcagctggcatcgttatcaccttcacagattaactatttgccccttgcgacaaatgagcagaaacatggttggtgtatggcaagcaggtgcttaggtacagttttctcagtttttatggcacatcatcagagcagctaaagtcacccagattgacaaagagatggtttgttggtcatgtatttatgagaaaattatgcacggtttcatagatgtctgtctctgagacgtttgttgtaatgtttcatattttgtcaatagtcatccttgagcttaagccaacaatttgttttcacctgtcattaatttaattacctttc

SEQ ID NO: 28581 - protein, 363 aa, Zea mays subsp. mays
  peptide (1)..(363): Ceres Seq. ID no. 12359748
  misc_feature (142)..(346): Pfam Name: Pfam Description:  Ribosomal protein L1p/L10e family
  misc_feature (22)..(357): NCBI GI NO: 15229443 NR Description: chloroplast ribosomal L1 - like protein
  misc_feature (22)..(357): NCBI GI NO: 25456457 NR Description: ribosomal protein L1 protein
  misc_feature (80)..(357): NCBI GI NO: 25453504 NR Description: ribosomal protein L1 [imported] - spinach
  misc_feature (129)..(355): NCBI GI NO: 11465804 NR Description: ribosomal protein L1 [Porphyra purpurea]
  misc_feature (130)..(356): NCBI GI NO: 11467612 NR Description: ribosomal protein L1 [Guillardia theta]
  misc_feature (127)..(359): NCBI GI NO: 22297840 NR Description: 50S ribosomal protein L1
  misc_feature (130)..(359): NCBI GI NO: 17232793 NR Description: 50S ribosomal protein L1 [Nostoc sp. PCC 7120]
  misc_feature (130)..(362): NCBI GI NO: 16330010 NR Description: 50S ribosomal protein L1
  misc_feature (127)..(359): NCBI GI NO: 11467315 NR Description: ribosomal protein L1 [Cyanophora paradoxa]
  misc_feature (110)..(281): NCBI GI NO: 1350625 NR Description: 50S RIBOSOMAL PROTEIN L1, CHLOROPLAST PRECURSOR
FLSLHSLLSAAPSSPASTMATAAAATASSSLLAPAASSTAPASSNALLFPSSVPSLRAYPRLLLAFRRPAAAAVADPQGAVLEEEAEVDQQGQYDDDDGYEGGRGPAFTAPTRPRTGKAALLLKRDRTRSKRFLEIQKLRESKKDYDVPTAISLMKQMSSAKFVESAEAHFRMNLDPKYNDQQLRATVNLPKGTGQSVKIAVLTQGEKIDEARAAGADIVGGEDLIEQIKGGFMEFDKLIASPDMMPKVAGLGKILGPRGLMPNPKAGTVSSNITQAIEEFKKGKVEYRVDKSGIVHIPFGKVDFPEEDLIANFMSVVRSVERNKPSGAKGIYWKTAYLCSSMGPSIKLNIKEMLDYGLESSD

SEQ ID NO: 28582 - protein, 345 aa, Zea mays subsp. mays
  peptide (1)..(345): Ceres Seq. ID no. 12359749
  misc_feature (124)..(328): Pfam Name: Pfam Description:  Ribosomal protein L1p/L10e family
  misc_feature (4)..(339): NCBI GI NO: 15229443 NR Description: chloroplast ribosomal L1 - like protein
  misc_feature (4)..(339): NCBI GI NO: 25456457 NR Description: ribosomal protein L1 protein
  misc_feature (62)..(339): NCBI GI NO: 25453504 NR Description: ribosomal protein L1 [imported] - spinach
  misc_feature (111)..(337): NCBI GI NO: 11465804 NR Description: ribosomal protein L1 [Porphyra purpurea]
  misc_feature (112)..(338): NCBI GI NO: 11467612 NR Description: ribosomal protein L1 [Guillardia theta]
  misc_feature (109)..(341): NCBI GI NO: 22297840 NR Description: 50S ribosomal protein L1
  misc_feature (112)..(341): NCBI GI NO: 17232793 NR Description: 50S ribosomal protein L1 [Nostoc sp. PCC 7120]
  misc_feature (112)..(344): NCBI GI NO: 16330010 NR Description: 50S ribosomal protein L1
  misc_feature (109)..(341): NCBI GI NO: 11467315 NR Description: ribosomal protein L1 [Cyanophora paradoxa]
  misc_feature (92)..(263): NCBI GI NO: 1350625 NR Description: 50S RIBOSOMAL PROTEIN L1, CHLOROPLAST PRECURSOR
MATAAAATASSSLLAPAASSTAPASSNALLFPSSVPSLRAYPRLLLAFRRPAAAAVADPQGAVLEEEAEVDQQGQYDDDDGYEGGRGPAFTAPTRPRTGKAALLLKRDRTRSKRFLEIQKLRESKKDYDVPTAISLMKQMSSAKFVESAEAHFRMNLDPKYNDQQLRATVNLPKGTGQSVKIAVLTQGEKIDEARAAGADIVGGEDLIEQIKGGFMEFDKLIASPDMMPKVAGLGKILGPRGLMPNPKAGTVSSNITQAIEEFKKGKVEYRVDKSGIVHIPFGKVDFPEEDLIANFMSVVRSVERNKPSGAKGIYWKTAYLCSSMGPSIKLNIKEMLDYGLESSD

SEQ ID NO: 28583 - protein, 209 aa, Zea mays subsp. mays
  peptide (1)..(209): Ceres Seq. ID no. 12359750
  misc_feature (1)..(192): Pfam Name: Pfam Description:  Ribosomal protein L1p/L10e family
  misc_feature (1)..(203): NCBI GI NO: 15229443 NR Description: chloroplast ribosomal L1 - like protein
  misc_feature (1)..(203): NCBI GI NO: 25456457 NR Description: ribosomal protein L1 protein
  misc_feature (1)..(203): NCBI GI NO: 25453504 NR Description: ribosomal protein L1 [imported] - spinach
  misc_feature (1)..(201): NCBI GI NO: 11465804 NR Description: ribosomal protein L1 [Porphyra purpurea]
  misc_feature (1)..(202): NCBI GI NO: 11467612 NR Description: ribosomal protein L1 [Guillardia theta]
  misc_feature (1)..(205): NCBI GI NO: 22297840 NR Description: 50S ribosomal protein L1
  misc_feature (1)..(205): NCBI GI NO: 17232793 NR Description: 50S ribosomal protein L1 [Nostoc sp. PCC 7120]
  misc_feature (1)..(208): NCBI GI NO: 16330010 NR Description: 50S ribosomal protein L1
  misc_feature (1)..(205): NCBI GI NO: 11467315 NR Description: ribosomal protein L1 [Cyanophora paradoxa]
  misc_feature (1)..(127): NCBI GI NO: 1350625 NR Description: 50S RIBOSOMAL PROTEIN L1, CHLOROPLAST PRECURSOR
MKQMSSAKFVESAEAHFRMNLDPKYNDQQLRATVNLPKGTGQSVKIAVLTQGEKIDEARAAGADIVGGEDLIEQIKGGFMEFDKLIASPDMMPKVAGLGKILGPRGLMPNPKAGTVSSNITQAIEEFKKGKVEYRVDKSGIVHIPFGKVDFPEEDLIANFMSVVRSVERNKPSGAKGIYWKTAYLCSSMGPSIKLNIKEMLDYGLESSD

SEQ ID NO: 28584 - DNA, 1572 bp, Zea mays subsp. mays
  misc_feature (1)..(1572): Ceres Seq. ID no. 12369120
atccagccatcgattctcctccagttcataggcacagcagcagaaagcgccaggagcttaagaacatggcgaacaggggcttgcatctggctctgttcctcgtccttctcgggctgtcgtccaatttggcagccgggcagatcctgttccagggcttcaactgggagtcgtggaagcagaacgggggatggtacaacttcctgatgggcaaggtggacgacatcgccgaggccggcatcacgcacgtctggctccctccggcgtcacactctctcgccgagcaaggctacctgccggggcgcctgtacgaccttgacgcgtccaagtacggcaacgaggcgcagctcaagtccctgatcgaggcgttccacagcaagggcgtgaaggtcatcgccgacatcgtcatcaaccaccgcacggcggagcaccaggacggccgcggcatctactgcatcttcgagggcggcacgccggactcccgcctcgactggggcccccacatgatctgcagcgacgacagggcgtactccgacggcacggggaaccccgacaccggcgccgacttcggcggcgcgccggacatcgaccacctgaacccgcgcgtccagcaggagctcaccggctggctcaactggctcaagacggacgtcggcttcgacgcgtggcgcctcgacttcgccaagggctactccgccgacgtcgccaaggtctacatcgacggcacccagccctgcttcgccgtcgccgagatatggacctcgctggcctacggcggcgacggcaagcccttctacgaccagaacgcgcaccggcaggagctggtgagctggctggaccgcgtcggcggcaaggccagcccggccaccacgttcgacttcaccaccaagggcatcctcaacgtggccgtcgacggcgagctgtggcggctgcgcggcgctgacggcaaggcacccggtttgatcgggtggtggccggccaaggccgtcaccttcgtcgacaaccacgacactggctccacgcagcacatgtggccgttccccgccgacaaggtcatgcagggctacgcctacatcctcacgcaccccgggaacccatccatcttctacgatcacttcttcgactggggcctcaagaacgagatcgcgcacctggtgtccatcagggaccgccacgggatccaggcggacagtgagctgcgcatcatcgaggccgacgccgacctctacctcgctgagatcgacggcaaggtcatcgtgaagattggatcaagatacgactgcgggcacctcatcccagaaggcttccaggtcgtggcgcacggagatggctatgccgtctgggagaaaaactgagccaaatctgtgcctgatccgtccgtccggtccggcacgacgagttttagcggatttgacctgcattttccttagcttattattactccaaatacgggatatatatagcgacaacctgtattcgagatacatgcgtgcccccagggacgcggaaaaagaaagagaagcacgcgtgtcaggacagccgaaagaagaacttgtgaagattattttttcccct

SEQ ID NO: 28585 - protein, 449 aa, Zea mays subsp. mays
  peptide (1)..(449): Ceres Seq. ID no. 12369121
  misc_feature (17)..(448): NCBI GI NO: 100654 NR Description: alpha-amylase (EC 3
  misc_feature (22)..(448): NCBI GI NO: 113766 NR Description: ALPHA-AMYLASE PRECURSOR
  misc_feature (22)..(448): NCBI GI NO: 2851583 NR Description: Alpha-amylase type B isozyme precursor
  misc_feature (22)..(448): NCBI GI NO: 166985 NR Description: alpha-amylase
  misc_feature (22)..(448): NCBI GI NO: 295804 NR Description: alpha-amylase [Hordeum vulgare]
  misc_feature (22)..(448): NCBI GI NO: 166977 NR Description: alpha-amylase 1
  misc_feature (22)..(448): NCBI GI NO: 113778 NR Description: ALPHA-AMYLASE TYPE B ISOZYME PRECURSOR
  misc_feature (22)..(448): NCBI GI NO: 166979 NR Description: alpha-amylase 1
  misc_feature (46)..(448): NCBI GI NO: 1065365 NR Description: Alpha-1,4 Glycan-4-Glucanohydrolase
  misc_feature (28)..(449): NCBI GI NO: 3549648 NR Description: alpha amylase [Avena fatua]
PAIDSPPVHRHSSRKRQELKNMANRGLHLALFLVLLGLSSNLAAGQILFQGFNWESWKQNGGWYNFLMGKVDDIAEAGITHVWLPPASHSLAEQGYLPGRLYDLDASKYGNEAQLKSLIEAFHSKGVKVIADIVINHRTAEHQDGRGIYCIFEGGTPDSRLDWGPHMICSDDRAYSDGTGNPDTGADFGGAPDIDHLNPRVQQELTGWLNWLKTDVGFDAWRLDFAKGYSADVAKVYIDGTQPCFAVAEIWTSLAYGGDGKPFYDQNAHRQELVSWLDRVGGKASPATTFDFTTKGILNVAVDGELWRLRGADGKAPGLIGWWPAKAVTFVDNHDTGSTQHMWPFPADKVMQGYAYILTHPGNPSIFYDHFFDWGLKNEIAHLVSIRDRHGIQADSELRIIEADADLYLAEIDGKVIVKIGSRYDCGHLIPEGFQVVAHGDGYAVWEKN

SEQ ID NO: 28586 - protein, 428 aa, Zea mays subsp. mays
  peptide (1)..(428): Ceres Seq. ID no. 12369122
  misc_feature (1)..(427): NCBI GI NO: 100654 NR Description: alpha-amylase (EC 3
  misc_feature (1)..(427): NCBI GI NO: 113766 NR Description: ALPHA-AMYLASE PRECURSOR
  misc_feature (1)..(427): NCBI GI NO: 2851583 NR Description: Alpha-amylase type B isozyme precursor
  misc_feature (1)..(427): NCBI GI NO: 166985 NR Description: alpha-amylase
  misc_feature (1)..(427): NCBI GI NO: 295804 NR Description: alpha-amylase [Hordeum vulgare]
  misc_feature (1)..(427): NCBI GI NO: 166977 NR Description: alpha-amylase 1
  misc_feature (1)..(427): NCBI GI NO: 113778 NR Description: ALPHA-AMYLASE TYPE B ISOZYME PRECURSOR
  misc_feature (1)..(427): NCBI GI NO: 166979 NR Description: alpha-amylase 1
  misc_feature (25)..(427): NCBI GI NO: 1065365 NR Description: Alpha-1,4 Glycan-4-Glucanohydrolase
  misc_feature (7)..(428): NCBI GI NO: 3549648 NR Description: alpha amylase [Avena fatua]
MANRGLHLALFLVLLGLSSNLAAGQILFQGFNWESWKQNGGWYNFLMGKVDDIAEAGITHVWLPPASHSLAEQGYLPGRLYDLDASKYGNEAQLKSLIEAFHSKGVKVIADIVINHRTAEHQDGRGIYCIFEGGTPDSRLDWGPHMICSDDRAYSDGTGNPDTGADFGGAPDIDHLNPRVQQELTGWLNWLKTDVGFDAWRLDFAKGYSADVAKVYIDGTQPCFAVAEIWTSLAYGGDGKPFYDQNAHRQELVSWLDRVGGKASPATTFDFTTKGILNVAVDGELWRLRGADGKAPGLIGWWPAKAVTFVDNHDTGSTQHMWPFPADKVMQGYAYILTHPGNPSIFYDHFFDWGLKNEIAHLVSIRDRHGIQADSELRIIEADADLYLAEIDGKVIVKIGSRYDCGHLIPEGFQVVAHGDGYAVWEKN

SEQ ID NO: 28587 - protein, 382 aa, Zea mays subsp. mays
  peptide (1)..(382): Ceres Seq. ID no. 12369123
  misc_feature (1)..(381): NCBI GI NO: 100654 NR Description: alpha-amylase (EC 3
  misc_feature (1)..(381): NCBI GI NO: 113766 NR Description: ALPHA-AMYLASE PRECURSOR
  misc_feature (1)..(381): NCBI GI NO: 2851583 NR Description: Alpha-amylase type B isozyme precursor
  misc_feature (1)..(381): NCBI GI NO: 166985 NR Description: alpha-amylase
  misc_feature (1)..(381): NCBI GI NO: 295804 NR Description: alpha-amylase [Hordeum vulgare]
  misc_feature (1)..(381): NCBI GI NO: 166977 NR Description: alpha-amylase 1
  misc_feature (1)..(381): NCBI GI NO: 113778 NR Description: ALPHA-AMYLASE TYPE B ISOZYME PRECURSOR
  misc_feature (1)..(381): NCBI GI NO: 166979 NR Description: alpha-amylase 1
  misc_feature (1)..(381): NCBI GI NO: 1065365 NR Description: Alpha-1,4 Glycan-4-Glucanohydrolase
  misc_feature (1)..(382): NCBI GI NO: 3549648 NR Description: alpha amylase [Avena fatua]
MGKVDDIAEAGITHVWLPPASHSLAEQGYLPGRLYDLDASKYGNEAQLKSLIEAFHSKGVKVIADIVINHRTAEHQDGRGIYCIFEGGTPDSRLDWGPHMICSDDRAYSDGTGNPDTGADFGGAPDIDHLNPRVQQELTGWLNWLKTDVGFDAWRLDFAKGYSADVAKVYIDGTQPCFAVAEIWTSLAYGGDGKPFYDQNAHRQELVSWLDRVGGKASPATTFDFTTKGILNVAVDGELWRLRGADGKAPGLIGWWPAKAVTFVDNHDTGSTQHMWPFPADKVMQGYAYILTHPGNPSIFYDHFFDWGLKNEIAHLVSIRDRHGIQADSELRIIEADADLYLAEIDGKVIVKIGSRYDCGHLIPEGFQVVAHGDGYAVWEKN

SEQ ID NO: 28588 - DNA, 1304 bp, Zea mays subsp. mays
  misc_feature (1)..(1304): Ceres Seq. ID no. 12358154
attttcgtcagctctcctggcgcccggtggctcgccggcgcaaattaagtaattaacccgaactccctggcattctccgcgggcctgtagtcttgtagcctatcgcttgcttcgccgtagcacttgcttaattagggcggtgttcgagaggtgggtgtggtggtgtactggtgtactagtactactcgcctcgcctcgcctcgcctcgagggtttgtttgactggcggaggcaggagctgcggcggtccgggagcgcatggggaacgcgaacgccaaggagggggagaacggccacatggcggcgtctcctgagccggcggctcccaacggcggcggaggaagcagcagctcggcgggaggcgctgccgcgcgacctccaccgttgtcgccgccagacgacgtgatgctggagcgtccaccgcccgtgccctatctcttcgtgccgcaggttccagagactccactgcacagacctactgagctctctcctcttctcaaccattcaccggtaaacgaatccaccgaccaccactcccaggatcagggtattccaactctgattacatggagccaaggaggagatgaggtgttcctggaaggatcgtgggataactggacatcgaggagggcacttgagagatctggaaaagatcacgccgtcttgttggttctgccatccggagtctaccattaccggatcatcgtggacggggagctgaggtacatccctgaactacctcacgcagctgacgaaagagggcgagtggccaacgtcctcgatgtccatgactacgtgccagaaagcctcgacagcgtagccgagttcgaagcgcccccgtctcccgtgcacagctacgacctgcattgcccgggcgacgaggagttcgccaaggagccgcccacgctcccgccccagcttctcgtgtccgtcctcgggggggacgtcgatagcgctggccatggcaatcaagctttgaagccacagcacgtcgtcctcgaccacctgttcatcgagaaagggtgggggtcgcagtcgctgctcgccctcggcgtcacccaccggtttgagtccaagtacgtgagctttgtgctctacaagccgttggagaggtgatggtggtactgtctactagctgtgtgtgagtggaagaacagagtggactgctggaggtgaataatgtgtgtgtgtgcccttgtatagaagggaaatgcatgcaggagcttgtagctgtagctgatcttttattttatttttttattttcctttcactttcgacgaaagtaataaattagttgaccatgc

SEQ ID NO: 28589 - protein, 285 aa, Zea mays subsp. mays
  peptide (1)..(285): Ceres Seq. ID no. 12358155
  misc_feature (193)..(283): Pfam Name: Pfam Description:  5'-AMP-activated protein kinase
  misc_feature (1)..(285): NCBI GI NO: 6686782 NR Description: AKIN gamma [Arabidopsis thaliana]
  misc_feature (1)..(285): NCBI GI NO: 15242175 NR Description: AKIN beta1; protein id: At5g21170
  misc_feature (1)..(285): NCBI GI NO: 5702015 NR Description: GAL83 protein [Solanum tuberosum]
  misc_feature (1)..(285): NCBI GI NO: 32364486 NR Description: AKIN beta1 [Medicago truncatula]
  misc_feature (1)..(285): NCBI GI NO: 6686784 NR Description: AKIN beta2 [Arabidopsis thaliana]
  misc_feature (9)..(285): NCBI GI NO: 22324436 NR Description: AKIN beta1-like protein
  misc_feature (30)..(285): NCBI GI NO: 15234895 NR Description: kinase like protein; protein id: At4g16360.1
  misc_feature (1)..(285): NCBI GI NO: 32364488 NR Description: AKIN beta2 [Medicago truncatula]
  misc_feature (45)..(243): NCBI GI NO: 29725558 NR Description: SNF1 kinase complex anchoring protein
  misc_feature (60)..(285): NCBI GI NO: 11935162 NR Description: SNF1-related kinase complex anchoring protein SIP1
MGNANAKEGENGHMAASPEPAAPNGGGGSSSSAGGAAARPPPLSPPDDVMLERPPPVPYLFVPQVPETPLHRPTELSPLLNHSPVNESTDHHSQDQGIPTLITWSQGGDEVFLEGSWDNWTSRRALERSGKDHAVLLVLPSGVYHYRIIVDGELRYIPELPHAADERGRVANVLDVHDYVPESLDSVAEFEAPPSPVHSYDLHCPGDEEFAKEPPTLPPQLLVSVLGGDVDSAGHGNQALKPQHVVLDHLFIEKGWGSQSLLALGVTHRFESKYVSFVLYKPLER

SEQ ID NO: 28590 - protein, 272 aa, Zea mays subsp. mays
  peptide (1)..(272): Ceres Seq. ID no. 12358156
  misc_feature (180)..(270): Pfam Name: Pfam Description:  5'-AMP-activated protein kinase
  misc_feature (1)..(272): NCBI GI NO: 6686782 NR Description: AKIN gamma [Arabidopsis thaliana]
  misc_feature (1)..(272): NCBI GI NO: 15242175 NR Description: AKIN beta1; protein id: At5g21170
  misc_feature (1)..(272): NCBI GI NO: 5702015 NR Description: GAL83 protein [Solanum tuberosum]
  misc_feature (1)..(272): NCBI GI NO: 32364486 NR Description: AKIN beta1 [Medicago truncatula]
  misc_feature (1)..(272): NCBI GI NO: 6686784 NR Description: AKIN beta2 [Arabidopsis thaliana]
  misc_feature (1)..(272): NCBI GI NO: 22324436 NR Description: AKIN beta1-like protein
  misc_feature (17)..(272): NCBI GI NO: 15234895 NR Description: kinase like protein; protein id: At4g16360.1
  misc_feature (1)..(272): NCBI GI NO: 32364488 NR Description: AKIN beta2 [Medicago truncatula]
  misc_feature (32)..(230): NCBI GI NO: 29725558 NR Description: SNF1 kinase complex anchoring protein
  misc_feature (47)..(272): NCBI GI NO: 11935162 NR Description: SNF1-related kinase complex anchoring protein SIP1
MAASPEPAAPNGGGGSSSSAGGAAARPPPLSPPDDVMLERPPPVPYLFVPQVPETPLHRPTELSPLLNHSPVNESTDHHSQDQGIPTLITWSQGGDEVFLEGSWDNWTSRRALERSGKDHAVLLVLPSGVYHYRIIVDGELRYIPELPHAADERGRVANVLDVHDYVPESLDSVAEFEAPPSPVHSYDLHCPGDEEFAKEPPTLPPQLLVSVLGGDVDSAGHGNQALKPQHVVLDHLFIEKGWGSQSLLALGVTHRFESKYVSFVLYKPLER

SEQ ID NO: 28591 - protein, 236 aa, Zea mays subsp. mays
  peptide (1)..(236): Ceres Seq. ID no. 12358157
  misc_feature (144)..(234): Pfam Name: Pfam Description:  5'-AMP-activated protein kinase
  misc_feature (1)..(236): NCBI GI NO: 6686782 NR Description: AKIN gamma [Arabidopsis thaliana]
  misc_feature (1)..(236): NCBI GI NO: 15242175 NR Description: AKIN beta1; protein id: At5g21170
  misc_feature (1)..(236): NCBI GI NO: 5702015 NR Description: GAL83 protein [Solanum tuberosum]
  misc_feature (1)..(236): NCBI GI NO: 32364486 NR Description: AKIN beta1 [Medicago truncatula]
  misc_feature (1)..(236): NCBI GI NO: 6686784 NR Description: AKIN beta2 [Arabidopsis thaliana]
  misc_feature (1)..(236): NCBI GI NO: 22324436 NR Description: AKIN beta1-like protein
  misc_feature (1)..(236): NCBI GI NO: 15234895 NR Description: kinase like protein; protein id: At4g16360.1
  misc_feature (1)..(236): NCBI GI NO: 32364488 NR Description: AKIN beta2 [Medicago truncatula]
  misc_feature (1)..(194): NCBI GI NO: 29725558 NR Description: SNF1 kinase complex anchoring protein
  misc_feature (11)..(236): NCBI GI NO: 11935162 NR Description: SNF1-related kinase complex anchoring protein SIP1
MLERPPPVPYLFVPQVPETPLHRPTELSPLLNHSPVNESTDHHSQDQGIPTLITWSQGGDEVFLEGSWDNWTSRRALERSGKDHAVLLVLPSGVYHYRIIVDGELRYIPELPHAADERGRVANVLDVHDYVPESLDSVAEFEAPPSPVHSYDLHCPGDEEFAKEPPTLPPQLLVSVLGGDVDSAGHGNQALKPQHVVLDHLFIEKGWGSQSLLALGVTHRFESKYVSFVLYKPLER

SEQ ID NO: 28592 - DNA, 1704 bp, Zea mays subsp. mays
  misc_feature (1)..(1704): Ceres Seq. ID no. 12348030
actcatctccagtctccctctccactctgcggcccggtcgatccccattccgatccatcgcacgggcagcgcccagtccggttcactcatggagtctctagtggctgcgctccccgcgggcggcgctgcggcggcggcggccttcggtgggctggtggccgctgccgcgctcgccggaaaggtcggccttgtcgggtccaagaaacacctcaacgcgcccccagctgtctctggtttacccctgattgggaatcttcatcagttgaaagagaagaaacctcaccagacctttacaaagtgggcagaaatttatgggccaatttacactataaggaccggttcttctactgtagttgtgctcaattcagcccaagtagccaaggaggcaatgattgcaaaattctcatcaatatctactcgaaagctatcgaaggcattgtcagcgctcacccgtgacaaaactatggttgctacaagtgactatggtgacttccacaaaatgattaagcgttatatcatgacattcatgttgggtacttctggccagaaacaatttagggacacaagaaacatgatggttgacaacatgttgaacactttccatacattgttgatggatgatccaaattctcctctgaacttccgggaagttttcaagaatgaattatttcgcttatccctggttcaggctttaggcgaggatgtgagttcaatctatgtggaagagtatggaaaggttatatcaaaggaggaaatctacaaggccactgtggttgacatgatgatgtgtgcaattgaggtcgactggagggatttcttcccgtacctcagctggattccaaataggaccttcgaaacaagagtactgactaccgaagcgaggagaactaccgtgatgcaagccttgatcaagcagcaaaaggaaagaattgcacgtggggagactaggatatcctacctggacttcctgctggcagagaatacactgactgatgaacaattactaatgctggtgtgggaagcagtcatagaagctgctgatactactttggtcacgaccgagtgggctatgtatgagattgcgaagcacccagaaaaacaggaatacctttatcaagaaatccaaaaagtctgcggcaataagacagttaccgaggatcacctgccagagttaccgtacttgaacgcggtgttccatgagaccatgaggcggcattctccagttccattagtgcctccaagattggtccatgagaataccaacttggctggctatgaggttccagccggcacagagataatcatcaatctgtacgggtgcaacatgaacaaaaacgactgggccgagcctgaggaatggaagccagagaggtttctggacgggaggtttgaagcagtggatatgcacaagaccatggcctttggcgcaggaaggagggcctgtgctggcagcatgcaggcgatgaacatctcgtgcaccgccatcggcaggtttgtgcaagagtttgcctggaggctcgaggaaggcgacgaggacaaggttgacaccatccagcttacaaccaacaggctttacccactgcatgtgtacctcgcacctagaggaaggaaatgagcctctactgtaaacgggtttcactgtactaatttaaaaaaataatttgctgttgcctgtgtatgacttttggatgatctctatgctgc

SEQ ID NO: 28593 - protein, 537 aa, Zea mays subsp. mays
  peptide (1)..(537): Ceres Seq. ID no. 12348031
  misc_feature (70)..(534): NCBI GI NO: 15239520 NR Description: cytochrome P450 GA3; protein id: At5g25900
  misc_feature (30)..(534): NCBI GI NO: 11934675 NR Description: ent-kaurene oxidase [Cucurbita maxima]
  misc_feature (70)..(534): NCBI GI NO: 3342253 NR Description: GA3 [Arabidopsis thaliana]
  misc_feature (36)..(534): NCBI GI NO: 34304722 NR Description: ent-kaurene oxidase CYP701A5 [Stevia rebaudiana]
  misc_feature (74)..(534): NCBI GI NO: 38350593 NR Description: ent-kaurene oxidase [Fragaria grandiflora]
  misc_feature (268)..(534): NCBI GI NO: 29468363 NR Description: ent-kaurene oxidase [Fragaria grandiflora]
  misc_feature (268)..(534): NCBI GI NO: 29468361 NR Description: ent-kaurene oxidase [Prunus persica]
  misc_feature (70)..(318): NCBI GI NO: 16323135 NR Description: AT5g25900/T1N24_23 [Arabidopsis thaliana]
  misc_feature (168)..(412): NCBI GI NO: 8777514 NR Description: ent-kaurene oxidase [Nicotiana tabacum]
  misc_feature (44)..(534): NCBI GI NO: 40641238 NR Description: cytochrome P450 [Triticum aestivum]
LISSLPLHSAARSIPIPIHRTGSAQSGSLMESLVAALPAGGAAAAAAFGGLVAAAALAGKVGLVGSKKHLNAPPAVSGLPLIGNLHQLKEKKPHQTFTKWAEIYGPIYTIRTGSSTVVVLNSAQVAKEAMIAKFSSISTRKLSKALSALTRDKTMVATSDYGDFHKMIKRYIMTFMLGTSGQKQFRDTRNMMVDNMLNTFHTLLMDDPNSPLNFREVFKNELFRLSLVQALGEDVSSIYVEEYGKVISKEEIYKATVVDMMMCAIEVDWRDFFPYLSWIPNRTFETRVLTTEARRTTVMQALIKQQKERIARGETRISYLDFLLAENTLTDEQLLMLVWEAVIEAADTTLVTTEWAMYEIAKHPEKQEYLYQEIQKVCGNKTVTEDHLPELPYLNAVFHETMRRHSPVPLVPPRLVHENTNLAGYEVPAGTEIIINLYGCNMNKNDWAEPEEWKPERFLDGRFEAVDMHKTMAFGAGRRACAGSMQAMNISCTAIGRFVQEFAWRLEEGDEDKVDTIQLTTNRLYPLHVYLAPRGRK

SEQ ID NO: 28594 - protein, 508 aa, Zea mays subsp. mays
  peptide (1)..(508): Ceres Seq. ID no. 12348032
  misc_feature (41)..(505): NCBI GI NO: 15239520 NR Description: cytochrome P450 GA3; protein id: At5g25900
  misc_feature (1)..(505): NCBI GI NO: 11934675 NR Description: ent-kaurene oxidase [Cucurbita maxima]
  misc_feature (41)..(505): NCBI GI NO: 3342253 NR Description: GA3 [Arabidopsis thaliana]
  misc_feature (7)..(505): NCBI GI NO: 34304722 NR Description: ent-kaurene oxidase CYP701A5 [Stevia rebaudiana]
  misc_feature (45)..(505): NCBI GI NO: 38350593 NR Description: ent-kaurene oxidase [Fragaria grandiflora]
  misc_feature (239)..(505): NCBI GI NO: 29468363 NR Description: ent-kaurene oxidase [Fragaria grandiflora]
  misc_feature (239)..(505): NCBI GI NO: 29468361 NR Description: ent-kaurene oxidase [Prunus persica]
  misc_feature (41)..(289): NCBI GI NO: 16323135 NR Description: AT5g25900/T1N24_23 [Arabidopsis thaliana]
  misc_feature (139)..(383): NCBI GI NO: 8777514 NR Description: ent-kaurene oxidase [Nicotiana tabacum]
  misc_feature (15)..(505): NCBI GI NO: 40641238 NR Description: cytochrome P450 [Triticum aestivum]
MESLVAALPAGGAAAAAAFGGLVAAAALAGKVGLVGSKKHLNAPPAVSGLPLIGNLHQLKEKKPHQTFTKWAEIYGPIYTIRTGSSTVVVLNSAQVAKEAMIAKFSSISTRKLSKALSALTRDKTMVATSDYGDFHKMIKRYIMTFMLGTSGQKQFRDTRNMMVDNMLNTFHTLLMDDPNSPLNFREVFKNELFRLSLVQALGEDVSSIYVEEYGKVISKEEIYKATVVDMMMCAIEVDWRDFFPYLSWIPNRTFETRVLTTEARRTTVMQALIKQQKERIARGETRISYLDFLLAENTLTDEQLLMLVWEAVIEAADTTLVTTEWAMYEIAKHPEKQEYLYQEIQKVCGNKTVTEDHLPELPYLNAVFHETMRRHSPVPLVPPRLVHENTNLAGYEVPAGTEIIINLYGCNMNKNDWAEPEEWKPERFLDGRFEAVDMHKTMAFGAGRRACAGSMQAMNISCTAIGRFVQEFAWRLEEGDEDKVDTIQLTTNRLYPLHVYLAPRGRK

SEQ ID NO: 28595 - protein, 408 aa, Zea mays subsp. mays
  peptide (1)..(408): Ceres Seq. ID no. 12348033
  misc_feature (1)..(405): NCBI GI NO: 15239520 NR Description: cytochrome P450 GA3; protein id: At5g25900
  misc_feature (1)..(405): NCBI GI NO: 11934675 NR Description: ent-kaurene oxidase [Cucurbita maxima]
  misc_feature (1)..(405): NCBI GI NO: 3342253 NR Description: GA3 [Arabidopsis thaliana]
  misc_feature (1)..(405): NCBI GI NO: 34304722 NR Description: ent-kaurene oxidase CYP701A5 [Stevia rebaudiana]
  misc_feature (1)..(405): NCBI GI NO: 38350593 NR Description: ent-kaurene oxidase [Fragaria grandiflora]
  misc_feature (139)..(405): NCBI GI NO: 29468363 NR Description: ent-kaurene oxidase [Fragaria grandiflora]
  misc_feature (139)..(405): NCBI GI NO: 29468361 NR Description: ent-kaurene oxidase [Prunus persica]
  misc_feature (1)..(189): NCBI GI NO: 16323135 NR Description: AT5g25900/T1N24_23 [Arabidopsis thaliana]
  misc_feature (39)..(283): NCBI GI NO: 8777514 NR Description: ent-kaurene oxidase [Nicotiana tabacum]
  misc_feature (1)..(405): NCBI GI NO: 40641238 NR Description: cytochrome P450 [Triticum aestivum]
MIAKFSSISTRKLSKALSALTRDKTMVATSDYGDFHKMIKRYIMTFMLGTSGQKQFRDTRNMMVDNMLNTFHTLLMDDPNSPLNFREVFKNELFRLSLVQALGEDVSSIYVEEYGKVISKEEIYKATVVDMMMCAIEVDWRDFFPYLSWIPNRTFETRVLTTEARRTTVMQALIKQQKERIARGETRISYLDFLLAENTLTDEQLLMLVWEAVIEAADTTLVTTEWAMYEIAKHPEKQEYLYQEIQKVCGNKTVTEDHLPELPYLNAVFHETMRRHSPVPLVPPRLVHENTNLAGYEVPAGTEIIINLYGCNMNKNDWAEPEEWKPERFLDGRFEAVDMHKTMAFGAGRRACAGSMQAMNISCTAIGRFVQEFAWRLEEGDEDKVDTIQLTTNRLYPLHVYLAPRGRK

SEQ ID NO: 28596 - DNA, 1579 bp, Zea mays subsp. mays
  misc_feature (1)..(1579): Ceres Seq. ID no. 12352446
aaaagacggcgactctgcctgcacagcattgaccgccgccttcgctcctccacctccccgctcgctctcctgcctccgcgcgggccgcggatcccttcactcgccacagcaagcgctagaagagggaatggagcccggcctcgcatcccgcgtcgcccgttcagccgctcagccgctttccggctgcctgtcgcggcactcgctctcgccgtggctcaagatccagaaccacatttatcctatgccaagtctctgtcacaaggttcctagcacgggaaaatgccacgcttctatgacaacaagttacatggaaacatcagatgtcactgatttggactgggaaaaccttggctttggcctcatcgagactgactttatgtatgttgcaaaatgtggaactgatggaatcttttccaaaggtgaagtcctaccatttggtcctatagcactgagtccttcagctggagtcttaaattatgggcagggattgtttgaaggcctaaaagcatataggaaaactgatgggtccatccttctatttcgtccagaggagaatgctataaggatgctaagcggtgcagagaggatgtgtatgcctgctccaactgttgagcaattcgttgatgctgttaaacaaactgttttggcaaataaaagatgggtgcctcctactggtaaaggttccctatatatcaggccactcctaataggaagcggtgcagttcttggtcttgcgcctgctcctgagtatagctttatcatttttgtatcccctgttgggaattatttcaaggaaggtttatctcctattaatttgatcgttgaggataaatttcaccgtgccagccctggtggaactggaggtgtgaaaaccattggaaactatgcctcggtactgaaagcacaaaagattgcaaaggggaaaggatattctgatgtcctttatttggatgctgttcatgacaaatatcttgaagaagtctcttcctgcaatatttttgttgtgaaagacaatgttatttctacgcctgccattaaaggaacaatacttcctggtataacgaggaaaagtatcattgaagttgctcagagcaaaggtttcaaggttgaggagcgtctggtgtgtgtagatgagttgattaacgctgatgaagttttctgcacggggactgctgttgtggtgtcacctgtggggagtgttacatatatggggaaaagggtggaatatggcaaccaaggagtcggtgtcgtgtctcagcaactatacaagtcacttacaagcctccagatgggcaatgtggaggactggatgggttggaccatgcaacttaatcagtagcggatcacagatattgccttggcagatcccggattattacagctactgggtgcgatagttttttttttggcagatccatcttgagcatatttgactgtaccggtttcccttgagactaagacgaaagtgatcttactgatcttttgtttcaaatctaaaacgataaaataaaatgtggtttgcaccttgccatgtactgtaagaatggacccataaaaaatttcatgctgctgttgcttg

SEQ ID NO: 28597 - protein, 445 aa, Zea mays subsp. mays
  peptide (1)..(445): Ceres Seq. ID no. 12352447
  misc_feature (139)..(426): Pfam Name: Pfam Description:  Aminotransferase class IV
  misc_feature (43)..(445): NCBI GI NO: 34902362 NR Description: Putative aminotransferase
  misc_feature (184)..(444): NCBI GI NO: 37536656 NR Description: putative aminotransferase
  misc_feature (43)..(155): NCBI GI NO: 37536656 NR Description: putative aminotransferase
  misc_feature (48)..(444): NCBI GI NO: 26391655 NR Description: Branched-chain amino acid aminotransferase 5
  misc_feature (90)..(444): NCBI GI NO: 18408919 NR Description: branched-chain-amino-acid transaminase -like
  misc_feature (90)..(444): NCBI GI NO: 21593211 NR Description: branched-chain-amino-acid transaminase-like
  misc_feature (87)..(444): NCBI GI NO: 15239157 NR Description: branched-chain amino acid aminotransferase
  misc_feature (106)..(443): NCBI GI NO: 6319167 NR Description: branched-chain amino acid aminotransferase
  misc_feature (90)..(444): NCBI GI NO: 11280250 NR Description: branched-chain-amino-acid transaminase-like
  misc_feature (60)..(443): NCBI GI NO: 6319165 NR Description: branched-chain amino acid aminotransferase
KDGDSACTALTAAFAPPPPRSLSCLRAGRGSLHSPQQALEEGMEPGLASRVARSAAQPLSGCLSRHSLSPWLKIQNHIYPMPSLCHKVPSTGKCHASMTTSYMETSDVTDLDWENLGFGLIETDFMYVAKCGTDGIFSKGEVLPFGPIALSPSAGVLNYGQGLFEGLKAYRKTDGSILLFRPEENAIRMLSGAERMCMPAPTVEQFVDAVKQTVLANKRWVPPTGKGSLYIRPLLIGSGAVLGLAPAPEYSFIIFVSPVGNYFKEGLSPINLIVEDKFHRASPGGTGGVKTIGNYASVLKAQKIAKGKGYSDVLYLDAVHDKYLEEVSSCNIFVVKDNVISTPAIKGTILPGITRKSIIEVAQSKGFKVEERLVCVDELINADEVFCTGTAVVVSPVGSVTYMGKRVEYGNQGVGVVSQQLYKSLTSLQMGNVEDWMGWTMQLNQ

SEQ ID NO: 28598 - protein, 403 aa, Zea mays subsp. mays
  peptide (1)..(403): Ceres Seq. ID no. 12352448
  misc_feature (97)..(384): Pfam Name: Pfam Description:  Aminotransferase class IV
  misc_feature (1)..(403): NCBI GI NO: 34902362 NR Description: Putative aminotransferase
  misc_feature (142)..(402): NCBI GI NO: 37536656 NR Description: putative aminotransferase
  misc_feature (1)..(113): NCBI GI NO: 37536656 NR Description: putative aminotransferase
  misc_feature (6)..(402): NCBI GI NO: 26391655 NR Description: Branched-chain amino acid aminotransferase 5
  misc_feature (48)..(402): NCBI GI NO: 18408919 NR Description: branched-chain-amino-acid transaminase -like
  misc_feature (48)..(402): NCBI GI NO: 21593211 NR Description: branched-chain-amino-acid transaminase-like
  misc_feature (45)..(402): NCBI GI NO: 15239157 NR Description: branched-chain amino acid aminotransferase
  misc_feature (64)..(401): NCBI GI NO: 6319167 NR Description: branched-chain amino acid aminotransferase
  misc_feature (48)..(402): NCBI GI NO: 11280250 NR Description: branched-chain-amino-acid transaminase-like
  misc_feature (18)..(401): NCBI GI NO: 6319165 NR Description: branched-chain amino acid aminotransferase
MEPGLASRVARSAAQPLSGCLSRHSLSPWLKIQNHIYPMPSLCHKVPSTGKCHASMTTSYMETSDVTDLDWENLGFGLIETDFMYVAKCGTDGIFSKGEVLPFGPIALSPSAGVLNYGQGLFEGLKAYRKTDGSILLFRPEENAIRMLSGAERMCMPAPTVEQFVDAVKQTVLANKRWVPPTGKGSLYIRPLLIGSGAVLGLAPAPEYSFIIFVSPVGNYFKEGLSPINLIVEDKFHRASPGGTGGVKTIGNYASVLKAQKIAKGKGYSDVLYLDAVHDKYLEEVSSCNIFVVKDNVISTPAIKGTILPGITRKSIIEVAQSKGFKVEERLVCVDELINADEVFCTGTAVVVSPVGSVTYMGKRVEYGNQGVGVVSQQLYKSLTSLQMGNVEDWMGWTMQLNQ

SEQ ID NO: 28599 - protein, 365 aa, Zea mays subsp. mays
  peptide (1)..(365): Ceres Seq. ID no. 12352449
  misc_feature (59)..(346): Pfam Name: Pfam Description:  Aminotransferase class IV
  misc_feature (1)..(365): NCBI GI NO: 34902362 NR Description: Putative aminotransferase
  misc_feature (104)..(364): NCBI GI NO: 37536656 NR Description: putative aminotransferase
  misc_feature (1)..(75): NCBI GI NO: 37536656 NR Description: putative aminotransferase
  misc_feature (1)..(364): NCBI GI NO: 26391655 NR Description: Branched-chain amino acid aminotransferase 5
  misc_feature (10)..(364): NCBI GI NO: 18408919 NR Description: branched-chain-amino-acid transaminase -like
  misc_feature (10)..(364): NCBI GI NO: 21593211 NR Description: branched-chain-amino-acid transaminase-like
  misc_feature (7)..(364): NCBI GI NO: 15239157 NR Description: branched-chain amino acid aminotransferase
  misc_feature (26)..(363): NCBI GI NO: 6319167 NR Description: branched-chain amino acid aminotransferase
  misc_feature (10)..(364): NCBI GI NO: 11280250 NR Description: branched-chain-amino-acid transaminase-like
  misc_feature (1)..(363): NCBI GI NO: 6319165 NR Description: branched-chain amino acid aminotransferase
MPSLCHKVPSTGKCHASMTTSYMETSDVTDLDWENLGFGLIETDFMYVAKCGTDGIFSKGEVLPFGPIALSPSAGVLNYGQGLFEGLKAYRKTDGSILLFRPEENAIRMLSGAERMCMPAPTVEQFVDAVKQTVLANKRWVPPTGKGSLYIRPLLIGSGAVLGLAPAPEYSFIIFVSPVGNYFKEGLSPINLIVEDKFHRASPGGTGGVKTIGNYASVLKAQKIAKGKGYSDVLYLDAVHDKYLEEVSSCNIFVVKDNVISTPAIKGTILPGITRKSIIEVAQSKGFKVEERLVCVDELINADEVFCTGTAVVVSPVGSVTYMGKRVEYGNQGVGVVSQQLYKSLTSLQMGNVEDWMGWTMQLNQ

SEQ ID NO: 28600 - DNA, 1601 bp, Zea mays subsp. mays
  misc_feature (1)..(1601): Ceres Seq. ID no. 12435006
  misc_feature (1081)..(1081): n is a, c, t, g, unknown, or other
  misc_feature (1087)..(1087): n is a, c, t, g, unknown, or other
actccaactctcaagcgtctctactcctcttcctcctctctctactctccaagttctcttctccgtcgaccgctctacacgtctcttgtcgacctggacaccgaggtggaagaaggaagcagtcagcagatggatccatggatcagcagccagccttctctgagccttgacctgcgcgtcggcctgccgccgctcagcctccaccaccaggcgccggtggccgtcgccttgcccaggcccaagctgctcgtcgaggagaacttcctcctgccgcctccaaagaaagaaccagaggtcgcggctctcgagacggagctgcagcggatgggcgaggagaaccggcgcctggcggaggcgctggccgaggtggcctccaagtacgaggcgctgcgggggcagtacacggagatggtggccgcggcggccacggcctgcgggaaccacccgtcgtccacgtcggagggcgggtccgtgtcgccgtcgcggaagcgcaagagcgagagcacggacaccgcgccgcccgcgcagcagctactgcaccagcactacccggcggtggcgccggaccagacggagtgcacctcgggcgagccgtgcaagcgcatccgggaggcggagtgcaagcccagggtgtcgaagctgcacgtgcacgccgacccggccgacctcagcctggtggtcaaggacgggtaccagtggcgcaagtacggtcagaaggtcaccaaggacaacccctgcccgcgggcctacttccgctgctccttcgccccggcctgcccagtcaagaagaaggtgcagcgcagcgccgacgaccccaccatcctggtcgccacgtacgagggcgaccacaaccacggccagcccccgccacaggcgcaggcgccgcacgacggctccagccctggcgccagcaagaagccgccgtcgccgccgaggccggtcgccgccgctccggcgccgctccaccaccagcaggtccagcagcaccagcagcagcaggcggttggcgcggtgaaatgcgagccgcccgtggccgcggcggcgtcggagctcatccggcggaacctcgcggagcagatgnccatgnactgacgcgggaccccagcttcaaggcggcgttcgtcaccgcgctgtccggccggctcttcgagatgtcgccgaccaaggactgacggaacggatcggatggattgggagattggcatcgcaggagattctggatcagattgtcttcgagcgcacgccgcaatggtcaactgcgcagcgctggcttggctgctgcctccgttcactcttcgctgtcagagcgaaacagcggtaacagagcaagacacgaggggtctgcactctgcagttgtgcaggaggaggaacagacacagggagaggagggcgcgcggccggacatggcgtggaacagagatcgtcgtcaccgccggcgggggtgtggtcgacgacgcgacatgcgaaacactacgtgctagctagcataggaaaaaacaacatgaaatcgtacaaccaaccaatccctcgcactgttttagttgttagctgtaggcgaaactgttcatccaattgatcaaatgaaaattatttttccctg

SEQ ID NO: 28601 - protein, 363 aa, Zea mays subsp. mays
  peptide (1)..(363): Ceres Seq. ID no. 12435007
  misc_feature (227)..(285): Pfam Name: Pfam Description:  WRKY DNA -binding domain
  misc_feature (44)..(362): NCBI GI NO: 2130024 NR Description: DNA-binding protein ABF2 - wild oat
  misc_feature (44)..(362): NCBI GI NO: 38174837 NR Description: putative WRKY9-10 protein
  misc_feature (208)..(288): NCBI GI NO: 15224660 NR Description: WRKY family transcription factor
  misc_feature (64)..(137): NCBI GI NO: 15224660 NR Description: WRKY family transcription factor
  misc_feature (93)..(311): NCBI GI NO: 40060529 NR Description: putative WRKY4 transcription factor
  misc_feature (208)..(288): NCBI GI NO: 21592591 NR Description: putative WRKY-type DNA binding protein
  misc_feature (64)..(137): NCBI GI NO: 21592591 NR Description: putative WRKY-type DNA binding protein
  misc_feature (98)..(294): NCBI GI NO: 6472585 NR Description: WIZZ [Nicotiana tabacum]
  misc_feature (47)..(308): NCBI GI NO: 40645752 NR Description: WRKY transcription factor 1 [Spinacia oleracea]
  misc_feature (49)..(300): NCBI GI NO: 11493822 NR Description: transcription factor WRKY4 [Petroselinum crispum]
  misc_feature (361)..(361): Xaa is any aa, unknown or other
  misc_feature (363)..(363): Xaa is any aa, unknown or other
TPTLKRLYSSSSSLYSPSSLLRRPLYTSLVDLDTEVEEGSSQQMDPWISSQPSLSLDLRVGLPPLSLHHQAPVAVALPRPKLLVEENFLLPPPKKEPEVAALETELQRMGEENRRLAEALAEVASKYEALRGQYTEMVAAAATACGNHPSSTSEGGSVSPSRKRKSESTDTAPPAQQLLHQHYPAVAPDQTECTSGEPCKRIREAECKPRVSKLHVHADPADLSLVVKDGYQWRKYGQKVTKDNPCPRAYFRCSFAPACPVKKKVQRSADDPTILVATYEGDHNHGQPPPQAQAPHDGSSPGASKKPPSPPRPVAAAPAPLHHQQVQQHQQQQAVGAVKCEPPVAAAASELIRRNLAEQMXMX

SEQ ID NO: 28602 - protein, 320 aa, Zea mays subsp. mays
  peptide (1)..(320): Ceres Seq. ID no. 12435008
  misc_feature (184)..(242): Pfam Name: Pfam Description:  WRKY DNA -binding domain
  misc_feature (1)..(319): NCBI GI NO: 2130024 NR Description: DNA-binding protein ABF2 - wild oat
  misc_feature (1)..(319): NCBI GI NO: 38174837 NR Description: putative WRKY9-10 protein
  misc_feature (165)..(245): NCBI GI NO: 15224660 NR Description: WRKY family transcription factor
  misc_feature (21)..(94): NCBI GI NO: 15224660 NR Description: WRKY family transcription factor
  misc_feature (50)..(268): NCBI GI NO: 40060529 NR Description: putative WRKY4 transcription factor
  misc_feature (165)..(245): NCBI GI NO: 21592591 NR Description: putative WRKY-type DNA binding protein
  misc_feature (21)..(94): NCBI GI NO: 21592591 NR Description: putative WRKY-type DNA binding protein
  misc_feature (55)..(251): NCBI GI NO: 6472585 NR Description: WIZZ [Nicotiana tabacum]
  misc_feature (4)..(265): NCBI GI NO: 40645752 NR Description: WRKY transcription factor 1 [Spinacia oleracea]
  misc_feature (6)..(257): NCBI GI NO: 11493822 NR Description: transcription factor WRKY4 [Petroselinum crispum]
  misc_feature (318)..(318): Xaa is any aa, unknown or other
  misc_feature (320)..(320): Xaa is any aa, unknown or other
MDPWISSQPSLSLDLRVGLPPLSLHHQAPVAVALPRPKLLVEENFLLPPPKKEPEVAALETELQRMGEENRRLAEALAEVASKYEALRGQYTEMVAAAATACGNHPSSTSEGGSVSPSRKRKSESTDTAPPAQQLLHQHYPAVAPDQTECTSGEPCKRIREAECKPRVSKLHVHADPADLSLVVKDGYQWRKYGQKVTKDNPCPRAYFRCSFAPACPVKKKVQRSADDPTILVATYEGDHNHGQPPPQAQAPHDGSSPGASKKPPSPPRPVAAAPAPLHHQQVQQHQQQQAVGAVKCEPPVAAAASELIRRNLAEQMXMX

SEQ ID NO: 28603 - protein, 255 aa, Zea mays subsp. mays
  peptide (1)..(255): Ceres Seq. ID no. 12435009
  misc_feature (119)..(177): Pfam Name: Pfam Description:  WRKY DNA -binding domain
  misc_feature (1)..(254): NCBI GI NO: 2130024 NR Description: DNA-binding protein ABF2 - wild oat
  misc_feature (1)..(254): NCBI GI NO: 38174837 NR Description: putative WRKY9-10 protein
  misc_feature (100)..(180): NCBI GI NO: 15224660 NR Description: WRKY family transcription factor
  misc_feature (1)..(29): NCBI GI NO: 15224660 NR Description: WRKY family transcription factor
  misc_feature (1)..(203): NCBI GI NO: 40060529 NR Description: putative WRKY4 transcription factor
  misc_feature (100)..(180): NCBI GI NO: 21592591 NR Description: putative WRKY-type DNA binding protein
  misc_feature (1)..(29): NCBI GI NO: 21592591 NR Description: putative WRKY-type DNA binding protein
  misc_feature (1)..(186): NCBI GI NO: 6472585 NR Description: WIZZ [Nicotiana tabacum]
  misc_feature (1)..(200): NCBI GI NO: 40645752 NR Description: WRKY transcription factor 1 [Spinacia oleracea]
  misc_feature (1)..(192): NCBI GI NO: 11493822 NR Description: transcription factor WRKY4 [Petroselinum crispum]
  misc_feature (253)..(253): Xaa is any aa, unknown or other
  misc_feature (255)..(255): Xaa is any aa, unknown or other
MGEENRRLAEALAEVASKYEALRGQYTEMVAAAATACGNHPSSTSEGGSVSPSRKRKSESTDTAPPAQQLLHQHYPAVAPDQTECTSGEPCKRIREAECKPRVSKLHVHADPADLSLVVKDGYQWRKYGQKVTKDNPCPRAYFRCSFAPACPVKKKVQRSADDPTILVATYEGDHNHGQPPPQAQAPHDGSSPGASKKPPSPPRPVAAAPAPLHHQQVQQHQQQQAVGAVKCEPPVAAAASELIRRNLAEQMXMX

SEQ ID NO: 28604 - DNA, 1405 bp, Zea mays subsp. mays
  misc_feature (1)..(1405): Ceres Seq. ID no. 12344535
gccgccgccgccattcccatggttttccatgctcggttgcgagccagcaattccatttcagtgtcctccctcgtctcgagaccttgccccatccagcccaacgctccgtccatcaactgaatagcttggcggtgtaaccctttcgtgtgcgatgagctcctcgccgttgatcaccgccgcggcgtcggctgccgtggtggcgctggctgtcgccaaccgcgtgctctacaagctcgcgcttgtgcctctcaaggcgtaccctttcttcctcgcccagctcaccaccttcgggtacgttgccgtgtacttctcgatgctctacacgaggtaccgcactgggttggtgactagagacatgctggcgctccccaagcaccggttcgtcgctatcggtttgctggaggcacttggagtctttgctggcatgtctgctggagctatgctaccagggcctgcgattcctatactgtcccagtcattcttggtctggcagcttatcttctctgccctgcttttagggaggacatattcggccagacaagtcattggttgcttcctagtagtttctggtgtgattcttgctgttgcaagtggagcggatgatggccagcttctttcagatgtaaagttaatttggccagcactcatgatcgcttcatcagcatttcacgctggtgcatctattctgaaggaagctgttttcattgatggtgcaaaacgtcttaaggggaagcggccagacatatttgtggtcaattcatttggatctggatttcaggctgtttttgtctttcttcttcttccattcctttctaatttgaggggaattaagtttgctgagcttcctgcttatttaaatggtggtgctgagtgcttcttaaatgtcgcagaaagtccaatcgactgcggaggagctccattcctgcctttgctgtttataatggtgaatatggcattcaatgtctctctcctcaatttggtgaagatgtcatctgccattgtggcttcacttacagcaacatcagcagtgccaatatcgatctatattctttcacttcctttgccctacatccctcatggcacggaattaagcacgtctttcatcattggtgccgtgatattgctgatgggcctgattctgtataaccttcctcaatcgtcactgaaacaattgaaggctgattgaaggtaaagtgacacactgccacatgccttgtaacagagagtttactgattgatattttatggtgaaattgatttccacactgaactatacgaagcatgtgactcattcagattttgtattatgaatgttatcgaaattaagattttctaaaacgcaagcaacatgtgtatgtagtagggacatttttaatacttaccctatagtctggaagtgtgatct

SEQ ID NO: 28605 - protein, 344 aa, Zea mays subsp. mays
  peptide (1)..(344): Ceres Seq. ID no. 12344536
  misc_feature (1)..(340): NCBI GI NO: 30686536 NR Description: expressed protein [Arabidopsis thaliana]
  misc_feature (6)..(331): NCBI GI NO: 21553716 NR Description: unknown [Arabidopsis thaliana]
  misc_feature (6)..(331): NCBI GI NO: 18419900 NR Description: putative protein; protein id: At5g19380
  misc_feature (12)..(332): NCBI GI NO: 20260240 NR Description: unknown protein [Arabidopsis thaliana]
  misc_feature (12)..(332): NCBI GI NO: 21536591 NR Description: unknown [Arabidopsis thaliana]
  misc_feature (123)..(294): NCBI GI NO: 7487326 NR Description: hypothetical protein T22A6
  misc_feature (1)..(94): NCBI GI NO: 7487326 NR Description: hypothetical protein T22A6
  misc_feature (69)..(332): NCBI GI NO: 15239887 NR Description: putative protein; protein id: At5g12170.1
  misc_feature (1)..(146): NCBI GI NO: 28973717 NR Description: unknown protein [Arabidopsis thaliana]
  misc_feature (3)..(96): NCBI GI NO: 20161872 NR Description: B1139B11.13
MSSSPLITAAASAAVVALAVANRVLYKLALVPLKAYPFFLAQLTTFGYVAVYFSMLYTRYRTGLVTRDMLALPKHRFVAIGLLEALGVFAGMSAGAMLPGPAIPILSQSFLVWQLIFSALLLGRTYSARQVIGCFLVVSGVILAVASGADDGQLLSDVKLIWPALMIASSAFHAGASILKEAVFIDGAKRLKGKRPDIFVVNSFGSGFQAVFVFLLLPFLSNLRGIKFAELPAYLNGGAECFLNVAESPIDCGGAPFLPLLFIMVNMAFNVSLLNLVKMSSAIVASLTATSAVPISIYILSLPLPYIPHGTELSTSFIIGAVILLMGLILYNLPQSSLKQLKAD

SEQ ID NO: 28606 - protein, 290 aa, Zea mays subsp. mays
  peptide (1)..(290): Ceres Seq. ID no. 12344537
  misc_feature (1)..(286): NCBI GI NO: 30686536 NR Description: expressed protein [Arabidopsis thaliana]
  misc_feature (1)..(277): NCBI GI NO: 21553716 NR Description: unknown [Arabidopsis thaliana]
  misc_feature (1)..(277): NCBI GI NO: 18419900 NR Description: putative protein; protein id: At5g19380
  misc_feature (1)..(278): NCBI GI NO: 20260240 NR Description: unknown protein [Arabidopsis thaliana]
  misc_feature (1)..(278): NCBI GI NO: 21536591 NR Description: unknown [Arabidopsis thaliana]
  misc_feature (69)..(240): NCBI GI NO: 7487326 NR Description: hypothetical protein T22A6
  misc_feature (1)..(40): NCBI GI NO: 7487326 NR Description: hypothetical protein T22A6
  misc_feature (15)..(278): NCBI GI NO: 15239887 NR Description: putative protein; protein id: At5g12170.1
  misc_feature (1)..(92): NCBI GI NO: 28973717 NR Description: unknown protein [Arabidopsis thaliana]
  misc_feature (1)..(42): NCBI GI NO: 20161872 NR Description: B1139B11.13
MLYTRYRTGLVTRDMLALPKHRFVAIGLLEALGVFAGMSAGAMLPGPAIPILSQSFLVWQLIFSALLLGRTYSARQVIGCFLVVSGVILAVASGADDGQLLSDVKLIWPALMIASSAFHAGASILKEAVFIDGAKRLKGKRPDIFVVNSFGSGFQAVFVFLLLPFLSNLRGIKFAELPAYLNGGAECFLNVAESPIDCGGAPFLPLLFIMVNMAFNVSLLNLVKMSSAIVASLTATSAVPISIYILSLPLPYIPHGTELSTSFIIGAVILLMGLILYNLPQSSLKQLKAD

SEQ ID NO: 28607 - protein, 276 aa, Zea mays subsp. mays
  peptide (1)..(276): Ceres Seq. ID no. 12344538
  misc_feature (1)..(272): NCBI GI NO: 30686536 NR Description: expressed protein [Arabidopsis thaliana]
  misc_feature (1)..(263): NCBI GI NO: 21553716 NR Description: unknown [Arabidopsis thaliana]
  misc_feature (1)..(263): NCBI GI NO: 18419900 NR Description: putative protein; protein id: At5g19380
  misc_feature (1)..(264): NCBI GI NO: 20260240 NR Description: unknown protein [Arabidopsis thaliana]
  misc_feature (1)..(264): NCBI GI NO: 21536591 NR Description: unknown [Arabidopsis thaliana]
  misc_feature (55)..(226): NCBI GI NO: 7487326 NR Description: hypothetical protein T22A6
  misc_feature (1)..(26): NCBI GI NO: 7487326 NR Description: hypothetical protein T22A6
  misc_feature (1)..(264): NCBI GI NO: 15239887 NR Description: putative protein; protein id: At5g12170.1
  misc_feature (1)..(78): NCBI GI NO: 28973717 NR Description: unknown protein [Arabidopsis thaliana]
  misc_feature (1)..(28): NCBI GI NO: 20161872 NR Description: B1139B11.13
MLALPKHRFVAIGLLEALGVFAGMSAGAMLPGPAIPILSQSFLVWQLIFSALLLGRTYSARQVIGCFLVVSGVILAVASGADDGQLLSDVKLIWPALMIASSAFHAGASILKEAVFIDGAKRLKGKRPDIFVVNSFGSGFQAVFVFLLLPFLSNLRGIKFAELPAYLNGGAECFLNVAESPIDCGGAPFLPLLFIMVNMAFNVSLLNLVKMSSAIVASLTATSAVPISIYILSLPLPYIPHGTELSTSFIIGAVILLMGLILYNLPQSSLKQLKAD

SEQ ID NO: 28608 - DNA, 1677 bp, Zea mays subsp. mays
  misc_feature (1)..(1677): Ceres Seq. ID no. 13492998
acaccgggccgtgccgatgggtgtttacgagtagcagctgtatctcgttgacctcaccgcctgcagggcaccaaggaggagatgacttccccgaagcgggcagcagggcgggaagggtgcggatgcttggccgccgtcgcgcggggcctccgcggggcgtgcttccggccggcggtgacggcggacggtgacggcggcggctcggccaagggcagccacgttcacgacgcagcagagacaagatatctgaatgctagcaatcgggagcttggtgatcattttcagacaaaacgtgatggtgaaaatggtgttgatgcatcaattgaaaagagaacacccaagctacttcagtttacctttcaagagttgaaatctgccacgcttaacttcaggccagacagtattcttggggagggtgggttcggttatgtattcaaggggtggattgagccaaacagcactgctcctgcaaaacctggcacaggggttactgtggcagtcaaaagtttgaagccagatgcgcttcaaggtcatagagaatgggtggcagaagttgactttctgggacagttgcatcataaacaccttgttaagctgattggattgtattgaggatgatcaaaggttacttgtatatgaattcatggcacggggaagtcttgaaaatcatcttttcagaagggctcttcccctaccttggtccaacaggatgaagattgctctaggtgccgcgaaaggactagccttcctccatggaggtcccaaacctgttatttacagggattttaagacatcgaatgttcttcttgatgtggagtacaacgcaaaactatctgatttcggtttagcaaaagctggtcctcagggtgataaaactcatgtatctactcgggttgttggcacctatggttatgctgcaccagagtatgtaatgacagggcacttgacatctaagagtgatgtttatagcttcggagttgtgctactcgagatgttgactgggagaagatcaatggacaagaagcggcctacgggggagcagaacctggttgcatgggcaaggccttacctaaatgatcggcgaaggctctatcagcttgtagatcctcgcttggggctgaactactctgtcaaaggggtgcaaaaggtcgctcagatctgccactactgccttacccgtgacagtaagtctcgcccatcgatggatgaagttgtcaagcaactcacaccattacaagatctaaacgacatggcatctgcttcgccaaggcctcgctcaactcagcgcggaaaggtgcatcgatgacaacccggttctgttgtaagaagagcagtgtggtcctggttgcttgatgcttgtttggtttaattgtatagcaaaattaggtgttgcctgccgatacctggagatgtgactccgcctgatgtgtcgctcaggtcagtcacactgctctgctgtttggctggttgccaaagcaagataacgatgtatctggttgcatcatgtaataattattataattaccatttaacttctggcgggggtacatcatgtaatggttggtgtacacccaggttagtaatcttaatagtgtttggctgacaggctgagggtcagtagacggtttgcagttcgcttttttcaggggaaaggtacaggtgttaaattgtgattgt

SEQ ID NO: 28609 - protein, 220 aa, Zea mays subsp. mays
  peptide (1)..(220): Ceres Seq. ID no. 13492999
  misc_feature (1)..(194): Pfam Name: Pfam Description:  Protein kinase domain
  misc_feature (1)..(215): NCBI GI NO: 34898434 NR Description: ESTs C98382
  misc_feature (1)..(207): NCBI GI NO: 34912198 NR Description: putative protein kinase
  misc_feature (1)..(207): NCBI GI NO: 28804505 NR Description: serine/threonine protein kinase [Aster tripolium]
  misc_feature (1)..(207): NCBI GI NO: 15232085 NR Description: protein kinase -related [Arabidopsis thaliana]
  misc_feature (1)..(207): NCBI GI NO: 21592646 NR Description: putative protein kinase [Arabidopsis thaliana]
  misc_feature (1)..(207): NCBI GI NO: 15242204 NR Description: serine/threonine specific protein kinase -related
  misc_feature (1)..(207): NCBI GI NO: 15233058 NR Description: protein kinase -related [Arabidopsis thaliana]
  misc_feature (1)..(207): NCBI GI NO: 9294282 NR Description: protein kinase [Arabidopsis thaliana]
  misc_feature (1)..(217): NCBI GI NO: 14719339 NR Description: putative protein kinase [Oryza sativa]
  misc_feature (1)..(212): NCBI GI NO: 34906046 NR Description: putative serine/threonine-specific protein kinase
MARGSLENHLFRRALPLPWSNRMKIALGAAKGLAFLHGGPKPVIYRDFKTSNVLLDVEYNAKLSDFGLAKAGPQGDKTHVSTRVVGTYGYAAPEYVMTGHLTSKSDVYSFGVVLLEMLTGRRSMDKKRPTGEQNLVAWARPYLNDRRRLYQLVDPRLGLNYSVKGVQKVAQICHYCLTRDSKSRPSMDEVVKQLTPLQDLNDMASASPRPRSTQRGKVHR

SEQ ID NO: 28610 - protein, 198 aa, Zea mays subsp. mays
  peptide (1)..(198): Ceres Seq. ID no. 13493000
  misc_feature (1)..(172): Pfam Name: Pfam Description:  Protein kinase domain
  misc_feature (1)..(193): NCBI GI NO: 34898434 NR Description: ESTs C98382
  misc_feature (1)..(185): NCBI GI NO: 34912198 NR Description: putative protein kinase
  misc_feature (1)..(185): NCBI GI NO: 28804505 NR Description: serine/threonine protein kinase [Aster tripolium]
  misc_feature (1)..(185): NCBI GI NO: 15232085 NR Description: protein kinase -related [Arabidopsis thaliana]
  misc_feature (1)..(185): NCBI GI NO: 21592646 NR Description: putative protein kinase [Arabidopsis thaliana]
  misc_feature (1)..(185): NCBI GI NO: 15242204 NR Description: serine/threonine specific protein kinase -related
  misc_feature (1)..(185): NCBI GI NO: 15233058 NR Description: protein kinase -related [Arabidopsis thaliana]
  misc_feature (1)..(185): NCBI GI NO: 9294282 NR Description: protein kinase [Arabidopsis thaliana]
  misc_feature (1)..(195): NCBI GI NO: 14719339 NR Description: putative protein kinase [Oryza sativa]
  misc_feature (1)..(190): NCBI GI NO: 34906046 NR Description: putative serine/threonine-specific protein kinase
MKIALGAAKGLAFLHGGPKPVIYRDFKTSNVLLDVEYNAKLSDFGLAKAGPQGDKTHVSTRVVGTYGYAAPEYVMTGHLTSKSDVYSFGVVLLEMLTGRRSMDKKRPTGEQNLVAWARPYLNDRRRLYQLVDPRLGLNYSVKGVQKVAQICHYCLTRDSKSRPSMDEVVKQLTPLQDLNDMASASPRPRSTQRGKVHR

SEQ ID NO: 28611 - protein, 176 aa, Zea mays subsp. mays
  peptide (1)..(176): Ceres Seq. ID no. 13493001
  misc_feature (103)..(174): Pfam Name: Pfam Description:  Protein kinase domain
  misc_feature (4)..(174): NCBI GI NO: 34898434 NR Description: ESTs C98382
  misc_feature (1)..(174): NCBI GI NO: 34912198 NR Description: putative protein kinase
  misc_feature (22)..(174): NCBI GI NO: 28804505 NR Description: serine/threonine protein kinase [Aster tripolium]
  misc_feature (88)..(174): NCBI GI NO: 15232085 NR Description: protein kinase -related [Arabidopsis thaliana]
  misc_feature (88)..(174): NCBI GI NO: 21592646 NR Description: putative protein kinase [Arabidopsis thaliana]
  misc_feature (88)..(174): NCBI GI NO: 15242204 NR Description: serine/threonine specific protein kinase -related
  misc_feature (83)..(174): NCBI GI NO: 15233058 NR Description: protein kinase -related [Arabidopsis thaliana]
  misc_feature (83)..(174): NCBI GI NO: 9294282 NR Description: protein kinase [Arabidopsis thaliana]
  misc_feature (91)..(174): NCBI GI NO: 14719339 NR Description: putative protein kinase [Oryza sativa]
  misc_feature (40)..(174): NCBI GI NO: 34906046 NR Description: putative serine/threonine-specific protein kinase
MTSPKRAAGREGCGCLAAVARGLRGACFRPAVTADGDGGGSAKGSHVHDAAETRYLNASNRELGDHFQTKRDGENGVDASIEKRTPKLLQFTFQELKSATLNFRPDSILGEGGFGYVFKGWIEPNSTAPAKPGTGVTVAVKSLKPDALQGHREWVAEVDFLGQLHHKHLVKLIGLY

SEQ ID NO: 28612 - DNA, 1601 bp, Zea mays subsp. mays
  misc_feature (1)..(1601): Ceres Seq. ID no. 12352454
aggtcggtcctacacggtcccgttctgcctggtgcctgcaacctgccttttcttcttccgtcgccacccagcgtgctctctctccctctttctctctctctcgtggcggcgcctgggcagccgtcgctgccgcctgcgctaggtgccaggtcttcttcgggcccttcgccggcgacgagtaccaccaggttgtacatgtgtacacccatgtgctttactgggtcggaccctactcatcctccacactaaggccatctccatagactgcactgtttagactccactgtttagagagtggagatagggagtgagatagagagtggaatagggaggatgctggagatagcctaaggttgccactgagtgtgtgcatgattcagaggcaatgtcatcacaaactggaggtggcaaagagagtgacgccggccctgggcaacacaggcagatgcaaagtttggcaagacaagggtctttatacaaccttaccctcgatgaggtgcagaaccatttgggggagccattgcttagcatgaattttgatgagctcctgaagagcgtgtttcctgatggtgtagattcagatggtgctgtcacaggcaagcctgatcggacctcgagcctgcagcgacaggggagcatcctgatgcctccgcagttgagcaagaagactgttgacgaggtgtggaagggcatccagggtggaccagagaccagtactgtggtggatggtctgcagaggcgagagaggcatccaacacttggggagatgacacttgaggacttcttggtcaaagctggggttgttactgaaggacttgtgaaggattcagctgattttccaagcaatatggatacagctggcagcagtgttgttgtggctgctgcttctagtttgaaccctggagcacagtggttgcaacagtaccagcagcaagttttggggtcccagcaattgagtttggcaggttcatacatggctagtcagttgcgccctcagccattgtctattgctacaggtgctactttggattcaatttactctgatgaccagattacttcgccatcatttggtgcactttcggaccctcagacacctgggcgcaagcgtggtgccttaggggaggtagtggataaggtggttgaaagaaggcagaagaggatgataaagaatagggaatcagctgcgcgatcaagagcgagaaagcaggcttatactaatgaacttgaaaacaaggtattccgtctagaagaggagaataagaggctaaagaaacagcaggagttggatgagatactgagctctgctcctcccccagaacccaaatatcaactcaggagaacgggttcggctgccttttgagtttcggcgctgacaatgctcatagtgatttttgtacattatacaaggattctactttatatggtttccttccttttgtattagaaacatttgatagattgagggtatagctttttcccggcccggtaggtcagtgtatgtaggtcgctagcaagctgtagcatgtcctggcggatcatttccttggtgtctgtcagtgtgtacatcttctagacacatgtctaagtctgagagcttcctt

SEQ ID NO: 28613 - protein, 324 aa, Zea mays subsp. mays
  peptide (1)..(324): Ceres Seq. ID no. 12352455
  misc_feature (1)..(299): NCBI GI NO: 34909206 NR Description: putative promoter-binding factor-like protein
  misc_feature (10)..(181): NCBI GI NO: 15230146 NR Description: ABA-responsive element binding protein 3
  misc_feature (185)..(324): NCBI GI NO: 15230146 NR Description: ABA-responsive element binding protein 3
  misc_feature (10)..(181): NCBI GI NO: 13346155 NR Description: bZIP protein DPBF3 [Arabidopsis thaliana]
  misc_feature (185)..(324): NCBI GI NO: 13346155 NR Description: bZIP protein DPBF3 [Arabidopsis thaliana]
  misc_feature (22)..(145): NCBI GI NO: 18405590 NR Description: bZIP family transcription factor
  misc_feature (229)..(323): NCBI GI NO: 18405590 NR Description: bZIP family transcription factor
  misc_feature (22)..(145): NCBI GI NO: 26451276 NR Description: putative bZIP transcription factor AtbZIP12 / DPBF4
  misc_feature (229)..(323): NCBI GI NO: 26451276 NR Description: putative bZIP transcription factor AtbZIP12 / DPBF4
  misc_feature (78)..(324): NCBI GI NO: 7489325 NR Description: Dc3 promoter-binding factor-3 - common sunflower
MSSQTGGGKESDAGPGQHRQMQSLARQGSLYNLTLDEVQNHLGEPLLSMNFDELLKSVFPDGVDSDGAVTGKPDRTSSLQRQGSILMPPQLSKKTVDEVWKGIQGGPETSTVVDGLQRRERHPTLGEMTLEDFLVKAGVVTEGLVKDSADFPSNMDTAGSSVVVAAASSLNPGAQWLQQYQQQVLGSQQLSLAGSYMASQLRPQPLSIATGATLDSIYSDDQITSPSFGALSDPQTPGRKRGALGEVVDKVVERRQKRMIKNRESAARSRARKQAYTNELENKVFRLEEENKRLKKQQELDEILSSAPPPEPKYQLRRTGSAAF

SEQ ID NO: 28614 - protein, 304 aa, Zea mays subsp. mays
  peptide (1)..(304): Ceres Seq. ID no. 12352456
  misc_feature (1)..(279): NCBI GI NO: 34909206 NR Description: putative promoter-binding factor-like protein
  misc_feature (1)..(161): NCBI GI NO: 15230146 NR Description: ABA-responsive element binding protein 3
  misc_feature (165)..(304): NCBI GI NO: 15230146 NR Description: ABA-responsive element binding protein 3
  misc_feature (1)..(161): NCBI GI NO: 13346155 NR Description: bZIP protein DPBF3 [Arabidopsis thaliana]
  misc_feature (165)..(304): NCBI GI NO: 13346155 NR Description: bZIP protein DPBF3 [Arabidopsis thaliana]
  misc_feature (2)..(125): NCBI GI NO: 18405590 NR Description: bZIP family transcription factor
  misc_feature (209)..(303): NCBI GI NO: 18405590 NR Description: bZIP family transcription factor
  misc_feature (2)..(125): NCBI GI NO: 26451276 NR Description: putative bZIP transcription factor AtbZIP12 / DPBF4
  misc_feature (209)..(303): NCBI GI NO: 26451276 NR Description: putative bZIP transcription factor AtbZIP12 / DPBF4
  misc_feature (58)..(304): NCBI GI NO: 7489325 NR Description: Dc3 promoter-binding factor-3 - common sunflower
MQSLARQGSLYNLTLDEVQNHLGEPLLSMNFDELLKSVFPDGVDSDGAVTGKPDRTSSLQRQGSILMPPQLSKKTVDEVWKGIQGGPETSTVVDGLQRRERHPTLGEMTLEDFLVKAGVVTEGLVKDSADFPSNMDTAGSSVVVAAASSLNPGAQWLQQYQQQVLGSQQLSLAGSYMASQLRPQPLSIATGATLDSIYSDDQITSPSFGALSDPQTPGRKRGALGEVVDKVVERRQKRMIKNRESAARSRARKQAYTNELENKVFRLEEENKRLKKQQELDEILSSAPPPEPKYQLRRTGSAAF

SEQ ID NO: 28615 - protein, 276 aa, Zea mays subsp. mays
  peptide (1)..(276): Ceres Seq. ID no. 12352457
  misc_feature (1)..(251): NCBI GI NO: 34909206 NR Description: putative promoter-binding factor-like protein
  misc_feature (1)..(133): NCBI GI NO: 15230146 NR Description: ABA-responsive element binding protein 3
  misc_feature (137)..(276): NCBI GI NO: 15230146 NR Description: ABA-responsive element binding protein 3
  misc_feature (1)..(133): NCBI GI NO: 13346155 NR Description: bZIP protein DPBF3 [Arabidopsis thaliana]
  misc_feature (137)..(276): NCBI GI NO: 13346155 NR Description: bZIP protein DPBF3 [Arabidopsis thaliana]
  misc_feature (1)..(97): NCBI GI NO: 18405590 NR Description: bZIP family transcription factor
  misc_feature (181)..(275): NCBI GI NO: 18405590 NR Description: bZIP family transcription factor
  misc_feature (1)..(97): NCBI GI NO: 26451276 NR Description: putative bZIP transcription factor AtbZIP12 / DPBF4
  misc_feature (181)..(275): NCBI GI NO: 26451276 NR Description: putative bZIP transcription factor AtbZIP12 / DPBF4
  misc_feature (30)..(276): NCBI GI NO: 7489325 NR Description: Dc3 promoter-binding factor-3 - common sunflower
MNFDELLKSVFPDGVDSDGAVTGKPDRTSSLQRQGSILMPPQLSKKTVDEVWKGIQGGPETSTVVDGLQRRERHPTLGEMTLEDFLVKAGVVTEGLVKDSADFPSNMDTAGSSVVVAAASSLNPGAQWLQQYQQQVLGSQQLSLAGSYMASQLRPQPLSIATGATLDSIYSDDQITSPSFGALSDPQTPGRKRGALGEVVDKVVERRQKRMIKNRESAARSRARKQAYTNELENKVFRLEEENKRLKKQQELDEILSSAPPPEPKYQLRRTGSAAF

SEQ ID NO: 28616 - DNA, 1465 bp, Zea mays subsp. mays
  misc_feature (1)..(1465): Ceres Seq. ID no. 12383185
gaatctcacacccaaaagtttcccactgccctggtcccccattcaattcttccaactccgccgcttcgcctcgttccgtccgccgcccccatggcgtccgccgccgccacgaccacctccgcccccgcccagaacctcaatccccttagtatcaacatcaagctccccccatggctcagcgggctgcgctgccccttcaccttcgtctgcccgcccccgcccccgcctccgccgccgccgccgcctcctcccccgctgccacctacggaacccgtggtcccacggtcgcggaggttaccaagcctgcgggtgaccacggagtacgatagcgaagagggcgtgtttgtgaacaaggtgtcgtgcaagcttgcgggggacctcgccaaactgcggctctccttccagagcgacccgcaggggcagtggcaagggggcggggaggaaggggacccgctacagcagctcttcgccgcgccgttggtggggctcatcaccaagcgtttctccgtgctctacgacgtcgaggcacgcaacgcgctgctccgcggagactgctcgcttcccggaggcgccgtccagctccgtgcctcgcatgatgtcaaggcacaacaaggagaagtttcggtgatcactagtttgggtgatccattgtataaaatggagttatcatctttggtgccttacagtggtttgccaagggcaacattccactttcctattggtcaagtttcagtggaagagaagagaaatgaagatgatgagaaggtgctgtctgtatatgggattggaaaatctgatttcttggacggtgttcttactgctcagtacaatgaaaatgatcttaatctaagatattgttataaggacaaggaattaactttagttccaagtgtctcgttgccttccaatgcagtatccatagacttcaaaaggcgttttggtcctgatgataagttgagctaccgttacatcttcgacactgatgaatggaatgctgtttataaacataaagtgggtaaaaatttcaaagtgaaagctggttatgattctgaggtgcgagtcggatgggcttctctttgggttggagaagaagggggcaaggcgaagactgcgccaatgaaaacaaaacttcagcttatgcttcaagtaccccaggataatcccagaaatccttattttctcttcaatgtgaagaaacgatgggatctgtaaataggtgtaagttatccattatgtggactccaaaggcttcggccaaccttttgttgcaatcttcgtaggtcaacagcaacacaatccatgagctctttctatttatcatatattttcaactactgtacgtagttagtacacagcgccccaagtaatccaaaatttatgtaaactctaaccctaaaccctaagtacttgttcgttttgttctcaatccatgtagattgagtgggattaagtgagtttcaattct

SEQ ID NO: 28617 - protein, 403 aa, Zea mays subsp. mays
  peptide (1)..(403): Ceres Seq. ID no. 12383186
  misc_feature (72)..(403): NCBI GI NO: 18406405 NR Description: expressed protein; protein id: At2g43950
  misc_feature (72)..(339): NCBI GI NO: 30689554 NR Description: expressed protein [Arabidopsis thaliana]
  misc_feature (72)..(311): NCBI GI NO: 7486492 NR Description: hypothetical protein At2g43950
  misc_feature (271)..(403): NCBI GI NO: 7486492 NR Description: hypothetical protein At2g43950
  misc_feature (56)..(91): NCBI GI NO: 17158343 NR Description: wsv239 [shrimp white spot syndrome virus]
  misc_feature (65)..(101): NCBI GI NO: 17158343 NR Description: wsv239 [shrimp white spot syndrome virus]
  misc_feature (71)..(149): NCBI GI NO: 1644457 NR Description: neural variant mena+ protein [Mus musculus]
  misc_feature (71)..(149): NCBI GI NO: 1644459 NR Description: neural variant mena++ protein [Mus musculus]
  misc_feature (71)..(149): NCBI GI NO: 6753754 NR Description: enabled homolog (Drosophila) [Mus musculus]
  misc_feature (71)..(91): NCBI GI NO: 28829166 NR Description: similar to Volvox carteri f
ESHTQKFPTALVPHSILPTPPLRLVPSAAPMASAAATTTSAPAQNLNPLSINIKLPPWLSGLRCPFTFVCPPPPPPPPPPPPPPPLPPTEPVVPRSRRLPSLRVTTEYDSEEGVFVNKVSCKLAGDLAKLRLSFQSDPQGQWQGGGEEGDPLQQLFAAPLVGLITKRFSVLYDVEARNALLRGDCSLPGGAVQLRASHDVKAQQGEVSVITSLGDPLYKMELSSLVPYSGLPRATFHFPIGQVSVEEKRNEDDEKVLSVYGIGKSDFLDGVLTAQYNENDLNLRYCYKDKELTLVPSVSLPSNAVSIDFKRRFGPDDKLSYRYIFDTDEWNAVYKHKVGKNFKVKAGYDSEVRVGWASLWVGEEGGKAKTAPMKTKLQLMLQVPQDNPRNPYFLFNVKKRWDL

SEQ ID NO: 28618 - protein, 373 aa, Zea mays subsp. mays
  peptide (1)..(373): Ceres Seq. ID no. 12383187
  misc_feature (42)..(373): NCBI GI NO: 18406405 NR Description: expressed protein; protein id: At2g43950
  misc_feature (42)..(309): NCBI GI NO: 30689554 NR Description: expressed protein [Arabidopsis thaliana]
  misc_feature (42)..(281): NCBI GI NO: 7486492 NR Description: hypothetical protein At2g43950
  misc_feature (241)..(373): NCBI GI NO: 7486492 NR Description: hypothetical protein At2g43950
  misc_feature (26)..(61): NCBI GI NO: 17158343 NR Description: wsv239 [shrimp white spot syndrome virus]
  misc_feature (35)..(71): NCBI GI NO: 17158343 NR Description: wsv239 [shrimp white spot syndrome virus]
  misc_feature (41)..(119): NCBI GI NO: 1644457 NR Description: neural variant mena+ protein [Mus musculus]
  misc_feature (41)..(119): NCBI GI NO: 1644459 NR Description: neural variant mena++ protein [Mus musculus]
  misc_feature (41)..(119): NCBI GI NO: 6753754 NR Description: enabled homolog (Drosophila) [Mus musculus]
  misc_feature (41)..(61): NCBI GI NO: 28829166 NR Description: similar to Volvox carteri f
MASAAATTTSAPAQNLNPLSINIKLPPWLSGLRCPFTFVCPPPPPPPPPPPPPPPLPPTEPVVPRSRRLPSLRVTTEYDSEEGVFVNKVSCKLAGDLAKLRLSFQSDPQGQWQGGGEEGDPLQQLFAAPLVGLITKRFSVLYDVEARNALLRGDCSLPGGAVQLRASHDVKAQQGEVSVITSLGDPLYKMELSSLVPYSGLPRATFHFPIGQVSVEEKRNEDDEKVLSVYGIGKSDFLDGVLTAQYNENDLNLRYCYKDKELTLVPSVSLPSNAVSIDFKRRFGPDDKLSYRYIFDTDEWNAVYKHKVGKNFKVKAGYDSEVRVGWASLWVGEEGGKAKTAPMKTKLQLMLQVPQDNPRNPYFLFNVKKRWDL

SEQ ID NO: 28619 - DNA, 1378 bp, Zea mays subsp. mays
  misc_feature (1)..(1378): Ceres Seq. ID no. 12352458
atagctgaagcctcggattgcaggttgcagccatgccaatgacaatcgagcgtgatctccacatggccacagggaacggagaaactagctacacgaaaaactctaggattcaggagaaagttatgtttcagatcaagccagtccttgaggaggccactagagcagcatactcagctctcctccctcaaaccatggtcgtggccgacttaggctgctcatcggggcctaacacactgcgcttcgtctccgaggtgattggcatcatagctcgccattgcaaagaacacgaccgacgacatgactacccacaacttcagttcttcctgaatgacctgccgggaaacgacttcaacaatctcttcctactcatccagcagttcaataagtcgatggcaagaaaccacaagggtgaggcagccgaggcactgcctccgtgctatatctctggtttgccaggctccttctacactaggatcttccctagcgaaagcgttcaccttttccactctttgttctccgttcactggcactctcaggcatcagaacaactaaaggacaccaaaaataaatgcttagatatctacatcacaaagaatatgccaccgtcgatggtgaagttgtttcaacagcagtttgagaaggacttctccctcttcctcaagctacgctatgaggaactcgtgtctggtggccaaatggttctaacatttattggaagaaagcatgaggatgtgttcactggagagtccaaccatctttacggattgcttgcgcagtcactgaaatccctagttgatgagggtcttgtggagaaagaaaaacttgagtcattctatcttccgatctactcaccgtcggttggtgaagtggaggcgatagtgaagcaagttgggttgttcaacatgaatcatgttaaagtatttgagataaattgggatccctacggtgactcataaggtgatgatgtgcatgacagtattaggagcggtgaaaatgttgctaagtgcctacgagcagttatggagccgttggttgcaagccaatttggagaacacatactcgacaagttattcaaagagtacgctcgtcgtgttgccaaacaccttgagaatgagaaaaccaagcatgctattcttgtcctatccatcgagaaagcaataattcatgtgtgaagtgtcttgtttctcactatctttccattattatcacatggtaatgtatgtttgttttgaatgtgcatgtttgtgccactagtatattgaatggcatggtgtttttgttgttttctttatcgcttctcctatattttagatgcctgaattttaaggtgatttcaggaaacattcttgtacaaggaattaatacaaataatttgctc

SEQ ID NO: 28620 - protein, 307 aa, Zea mays subsp. mays
  peptide (1)..(307): Ceres Seq. ID no. 12352459
  misc_feature (39)..(307): Pfam Name: Pfam Description:  SAM dependent carboxyl methyltransferase
  misc_feature (3)..(307): NCBI GI NO: 13366161 NR Description: S-adenosyl-L-methionine: salicylic acid carboxylmethyltransferase
  misc_feature (3)..(307): NCBI GI NO: 23957318 NR Description: S-adenosyl-L-methionine: salicylic acidmethyltransferase
  misc_feature (3)..(307): NCBI GI NO: 28629497 NR Description: S-adenosyl-L-methionine:benzoic acid/ salicylic acidcarboxyl methyltransferase
  misc_feature (3)..(307): NCBI GI NO: 28629495 NR Description: S-adenosyl-L-methionine:benzoic acid/ salicylic acidcarboxyl methyltransferase
  misc_feature (3)..(307): NCBI GI NO: 13235641 NR Description: S-adenosyl-L-methionine: salicylic acid carboxylmethyltransferase
  misc_feature (9)..(307): NCBI GI NO: 37904506 NR Description: methyl transferase
  misc_feature (3)..(307): NCBI GI NO: 6651395 NR Description: floral nectary-specific protein
  misc_feature (3)..(307): NCBI GI NO: 34809619 NR Description: Chain X
  misc_feature (3)..(307): NCBI GI NO: 15223601 NR Description: S-adenosyl-L-methionine: jasmonic acid carboxylmethyltransferase
  misc_feature (3)..(307): NCBI GI NO: 13676829 NR Description: S-adenosyl-L-methionine: jasmonic acid carboxylmethyltransferase
MPMTIERDLHMATGNGETSYTKNSRIQEKVMFQIKPVLEEATRAAYSALLPQTMVVADLGCSSGPNTLRFVSEVIGIIARHCKEHDRRHDYPQLQFFLNDLPGNDFNNLFLLIQQFNKSMARNHKGEAAEALPPCYISGLPGSFYTRIFPSESVHLFHSLFSVHWHSQASEQLKDTKNKCLDIYITKNMPPSMVKLFQQQFEKDFSLFLKLRYEELVSGGQMVLTFIGRKHEDVFTGESNHLYGLLAQSLKSLVDEGLVEKEKLESFYLPIYSPSVGEVEAIVKQVGLFNMNHVKVFEINWDPYGDS

SEQ ID NO: 28621 - protein, 305 aa, Zea mays subsp. mays
  peptide (1)..(305): Ceres Seq. ID no. 12352460
  misc_feature (37)..(305): Pfam Name: Pfam Description:  SAM dependent carboxyl methyltransferase
  misc_feature (1)..(305): NCBI GI NO: 13366161 NR Description: S-adenosyl-L-methionine: salicylic acid carboxylmethyltransferase
  misc_feature (1)..(305): NCBI GI NO: 23957318 NR Description: S-adenosyl-L-methionine: salicylic acidmethyltransferase
  misc_feature (1)..(305): NCBI GI NO: 28629497 NR Description: S-adenosyl-L-methionine:benzoic acid/ salicylic acidcarboxyl methyltransferase
  misc_feature (1)..(305): NCBI GI NO: 28629495 NR Description: S-adenosyl-L-methionine:benzoic acid/ salicylic acidcarboxyl methyltransferase
  misc_feature (1)..(305): NCBI GI NO: 13235641 NR Description: S-adenosyl-L-methionine: salicylic acid carboxylmethyltransferase
  misc_feature (7)..(305): NCBI GI NO: 37904506 NR Description: methyl transferase
  misc_feature (1)..(305): NCBI GI NO: 6651395 NR Description: floral nectary-specific protein
  misc_feature (1)..(305): NCBI GI NO: 34809619 NR Description: Chain X
  misc_feature (1)..(305): NCBI GI NO: 15223601 NR Description: S-adenosyl-L-methionine: jasmonic acid carboxylmethyltransferase
  misc_feature (1)..(305): NCBI GI NO: 13676829 NR Description: S-adenosyl-L-methionine: jasmonic acid carboxylmethyltransferase
MTIERDLHMATGNGETSYTKNSRIQEKVMFQIKPVLEEATRAAYSALLPQTMVVADLGCSSGPNTLRFVSEVIGIIARHCKEHDRRHDYPQLQFFLNDLPGNDFNNLFLLIQQFNKSMARNHKGEAAEALPPCYISGLPGSFYTRIFPSESVHLFHSLFSVHWHSQASEQLKDTKNKCLDIYITKNMPPSMVKLFQQQFEKDFSLFLKLRYEELVSGGQMVLTFIGRKHEDVFTGESNHLYGLLAQSLKSLVDEGLVEKEKLESFYLPIYSPSVGEVEAIVKQVGLFNMNHVKVFEINWDPYGDS

SEQ ID NO: 28622 - protein, 297 aa, Zea mays subsp. mays
  peptide (1)..(297): Ceres Seq. ID no. 12352461
  misc_feature (29)..(297): Pfam Name: Pfam Description:  SAM dependent carboxyl methyltransferase
  misc_feature (1)..(297): NCBI GI NO: 13366161 NR Description: S-adenosyl-L-methionine: salicylic acid carboxylmethyltransferase
  misc_feature (1)..(297): NCBI GI NO: 23957318 NR Description: S-adenosyl-L-methionine: salicylic acidmethyltransferase
  misc_feature (1)..(297): NCBI GI NO: 28629497 NR Description: S-adenosyl-L-methionine:benzoic acid/ salicylic acidcarboxyl methyltransferase
  misc_feature (1)..(297): NCBI GI NO: 28629495 NR Description: S-adenosyl-L-methionine:benzoic acid/ salicylic acidcarboxyl methyltransferase
  misc_feature (1)..(297): NCBI GI NO: 13235641 NR Description: S-adenosyl-L-methionine: salicylic acid carboxylmethyltransferase
  misc_feature (1)..(297): NCBI GI NO: 37904506 NR Description: methyl transferase
  misc_feature (1)..(297): NCBI GI NO: 6651395 NR Description: floral nectary-specific protein
  misc_feature (1)..(297): NCBI GI NO: 34809619 NR Description: Chain X
  misc_feature (1)..(297): NCBI GI NO: 15223601 NR Description: S-adenosyl-L-methionine: jasmonic acid carboxylmethyltransferase
  misc_feature (1)..(297): NCBI GI NO: 13676829 NR Description: S-adenosyl-L-methionine: jasmonic acid carboxylmethyltransferase
MATGNGETSYTKNSRIQEKVMFQIKPVLEEATRAAYSALLPQTMVVADLGCSSGPNTLRFVSEVIGIIARHCKEHDRRHDYPQLQFFLNDLPGNDFNNLFLLIQQFNKSMARNHKGEAAEALPPCYISGLPGSFYTRIFPSESVHLFHSLFSVHWHSQASEQLKDTKNKCLDIYITKNMPPSMVKLFQQQFEKDFSLFLKLRYEELVSGGQMVLTFIGRKHEDVFTGESNHLYGLLAQSLKSLVDEGLVEKEKLESFYLPIYSPSVGEVEAIVKQVGLFNMNHVKVFEINWDPYGDS

SEQ ID NO: 28623 - DNA, 1388 bp, Zea mays subsp. mays
  misc_feature (1)..(1388): Ceres Seq. ID no. 12382081
gcacgagaccattacctagaacatcctaatcgaaaagaaaacgtaagggagtcctacttgtctgcttcccgagttcagagttcagactcagcacatcacccttctctagtctcaaatggcgtgctcactcccgctccacgcccccttctcctcgtcgccccgcatcctctcctaccgcgccgcgcccagaaccctccctctgttccgccgagggctcagggttccgtaccaccgctccccttccccgcctcgcgcgctcccggacgttgctgcgggggccgtggcgggcatccgggacgcgctcgccgacgccttcttgacgtcgccgccgacgtggcggtccgccgctgccagcaacctcgctgtctttgtctccggatcgccgttgcttctctcgggactgtccgcctccggcttcgccgccgcctatctcttgggcaccctgacgtgggcgcgcgttcggagcccagggtttcctcctcgttgtcgcatacttcgttgtgggcacagcggttactaagttgaggataagacagaaggaagctctgggagtagcagaaaaaagaggaggaagaagagggcctggaagtgttattggttctagcgctgccggttgtgtttgtgccctactatcgatatatcatgctggtggtacagcgtcctctgagctctggagactgggttttgttgctagtttctgtactaaactaagtgatacagtttcaagtgaaatagggaaggcttttggaagaacaacgtacctggtgacaacattaaaggttgttcctagaggtacagaaggtgcaatcagtattgagggtactattgctggaattctagcgtctgtgtttcttgcaggtgctggttatcttcttgggcaggtggatgtatcacaagttgtgttatgcgttcttgcttctcagattgcaaattatgttgagagctatattggggccactttacaagacaaggaaggttttgaatggctgaataacgatattgtcaatgtactgaatatctctattggtgccatattggctgttctaacgcagcagctgctcgtcagttggagatcttaatttttccttttgacttaggtctgcatccactattcgaattttattcttgtagtagctgccatattttgcccatctgaaatgtaatcatagattcacatttgggcccatcctaactttctctaggttccggtctttgttatgcctactgtgaaaatgcaaaactgtctttccttcagttacattgaggagttctctaattatgctgttaacttaggcagatgttgattaggatctgtttgatagagctctcaaagtgttttttgggagctgaaaacaattttttttattaagaagtgggtgattttatgc

SEQ ID NO: 28624 - protein, 174 aa, Zea mays subsp. mays
  peptide (1)..(174): Ceres Seq. ID no. 12382082
ARDHYLEHPNRKENVRESYLSASRVQSSDSAHHPSLVSNGVLTPAPRPLLLVAPHPLLPRRAQNPPSVPPRAQGSVPPLPFPASRAPGRCCGGRGGHPGRARRRLLDVAADVAVRRCQQPRCLCLRIAVASLGTVRLRLRRRLSLGHPDVGARSEPRVSSSLSHTSLWAQRLLS

SEQ ID NO: 28625 - protein, 134 aa, Zea mays subsp. mays
  peptide (1)..(134): Ceres Seq. ID no. 12382083
  misc_feature (1)..(112): NCBI GI NO: 34910822 NR Description: P0456A01.17
  misc_feature (1)..(120): NCBI GI NO: 18412044 NR Description: expressed protein; protein id: At1g78620
  misc_feature (1)..(120): NCBI GI NO: 21592713 NR Description: unknown [Arabidopsis thaliana]
MACSLPLHAPFSSSPRILSYRAAPRTLPLFRRGLRVPYHRSPSPPRALPDVAAGAVAGIRDALADAFLTSPPTWRSAAASNLAVFVSGSPLLLSGLSASGFAAAYLLGTLTWARVRSPGFPPRCRILRCGHSGY

SEQ ID NO: 28626 - DNA, 1670 bp, Zea mays subsp. mays
  misc_feature (1)..(1670): Ceres Seq. ID no. 13493469
acctccagctttctactctactacctgcaggagtgcaggctgcaggcgcacacgcaactcgcagccgaccacgccccccgcaggccgcgatgccgccgccgccgcagcagcagcccccgcaccggcacgccaagacggactcggaggtgacgtccagcatggcggcgtcgtccccgccgcgtgcggcctactacgtgcagtcgccgagccacgacgacggcgagaacaagacggccgcgtcctccttccactcgtcccctgcggcatccccgccgcggtcggcgtccaggcactcctcctcctcctcccgcttctccgccagcgcaaagggcaccgcctccggcgccggcggcggccggcgacgcggcagcgcgtgggcgaaggaggcggccatcgaggaggagggcctgctcggcgtggacgacggcagcggcggcgatggagacggccgcggcgggatccccaggcgggcgcgctacttgctcggcttcgcgggcgccttcctcggcctgttcctcctcttcgcgctcgtcctctggggcgccagccgcaaccagcgccccgtcgtggccctgcgcgccgtcacgttccaccgcttcgtcgtccaggccggcaccgacgcgtcgctcgtgcccaccgagatggcctcgctcaacgccaccgtcagcctcaccttccgcaacgtcggtaccttcttcggcgtccacgtctccgccgaccccgtcacgctccactacgcgcagctccagctcgcgtcgggcaacatgaagtacttctaccagccccggaggagccagcggagcctggcggtggcggtggtcggcgacaaggtgcccctgtacggcggcggggcggggctgagcagcaccccgacgacgctgccgccgccgaggaagcgcgcgccgccggtggtggtgccgccgccgcccgtgccgctgcggctggccgtgcgggtgcggtcgcgcgcgttcgtgctggggagcctggtcaagcccaagttctacagcgaggcgcagtgcagcgtcaccatggaccaggccaggctcggtaagccagtctccctcaacaaggcatgcacctacacacactagcttggctaggctacatacatacgcctgctgccgtgggtcgtctcgtcgccaccatgcatggtcgtcgcgtcgtgaactttgcccttcttcttgaacaacacacactctctctcagtctctctctcccttcgcttttctgcgtgcgtgcgtttgttggtcgcttgtcttgtacatagaaatttttagtttctggtgtacgtaggagagttttgagtgagatggaataagaatcaggcattatttccctcatacggcgtttccgattgcgtgacatgccgtggagggcatgtaaaatgtcggtgaaattcaatgcgcctgtttggtgaaattcaatgcgctcgaagcagacgtaagattctggtgaaatacacctaaaaattcacggccgcgcatgtaatatagcttcttcaggtgaagtttggaccccggccgacagtcaccgaccgcaagtgctcatccggtgaggtttgtcagttagattcaaatccactaccgttcatataaatccgattcttttttttagatctgacaaatgtaacacggagccttcgcaatgaatgaatgaatgattgaataaac

SEQ ID NO: 28627 - protein, 362 aa, Zea mays subsp. mays
  peptide (1)..(362): Ceres Seq. ID no. 13493470
  misc_feature (12)..(116): Pfam Name: Pfam Description:  AF-4 proto-oncoprotein
  misc_feature (42)..(360): NCBI GI NO: 5777621 NR Description: CAA30379.1 protein [Oryza sativa]
  misc_feature (42)..(360): NCBI GI NO: 38345517 NR Description: OSJNBa0039K24.20
  misc_feature (42)..(361): NCBI GI NO: 18401556 NR Description: expressed protein [Arabidopsis thaliana]
  misc_feature (42)..(361): NCBI GI NO: 15239097 NR Description: expressed protein [Arabidopsis thaliana]
  misc_feature (42)..(361): NCBI GI NO: 28416677 NR Description: At5g42860 [Arabidopsis thaliana]
  misc_feature (42)..(282): NCBI GI NO: 15227481 NR Description: expressed protein [Arabidopsis thaliana]
  misc_feature (310)..(358): NCBI GI NO: 15227481 NR Description: expressed protein [Arabidopsis thaliana]
  misc_feature (45)..(361): NCBI GI NO: 34904260 NR Description: P0452F10.18
  misc_feature (42)..(339): NCBI GI NO: 9294056 NR Description: emb|CAB53482
  misc_feature (43)..(358): NCBI GI NO: 9294055 NR Description: gene_id:MOB24.18~unknown protein
LQLSTLLPAGVQAAGAHATRSRPRPPQAAMPPPPQQQPPHRHAKTDSEVTSSMAASSPPRAAYYVQSPSHDDGENKTAASSFHSSPAASPPRSASRHSSSSSRFSASAKGTASGAGGGRRRGSAWAKEAAIEEEGLLGVDDGSGGDGDGRGGIPRRARYLLGFAGAFLGLFLLFALVLWGASRNQRPVVALRAVTFHRFVVQAGTDASLVPTEMASLNATVSLTFRNVGTFFGVHVSADPVTLHYAQLQLASGNMKYFYQPRRSQRSLAVAVVGDKVPLYGGGAGLSSTPTTLPPPRKRAPPVVVPPPPVPLRLAVRVRSRAFVLGSLVKPKFYSEAQCSVTMDQARLGKPVSLNKACTYTH

SEQ ID NO: 28628 - protein, 349 aa, Zea mays subsp. mays
  peptide (1)..(349): Ceres Seq. ID no. 13493471
  misc_feature (15)..(349): NCBI GI NO: 29247944 NR Description: GLP_26_54603_52153 [Giardia lamblia ATCC 50803]
  misc_feature (107)..(349): NCBI GI NO: 23018055 NR Description: hypothetical protein [Thermobifida fusca]
  misc_feature (108)..(347): NCBI GI NO: 22960097 NR Description: hypothetical protein [Rhodobacter sphaeroides]
  misc_feature (101)..(347): NCBI GI NO: 23102225 NR Description: hypothetical protein [Azotobacter vinelandii]
PPAFYSTTCRSAGCRRTRNSQPTTPPAGRDAAAAAAAAPAPARQDGLGGDVQHGGVVPAACGLLRAVAEPRRRREQDGRVLLPLVPCGIPAAVGVQALLLLLPLLRQRKGHRLRRRRRPATRQRVGEGGGHRGGGPARRGRRQRRRWRRPRRDPQAGALLARLRGRLPRPVPPLRARPLGRQPQPAPRRGPARRHVPPLRRPGRHRRVARAHRDGLAQRHRQPHLPQRRYLLRRPRLRRPRHAPLRAAPARVGQHEVLLPAPEEPAEPGGGGGRRQGAPVRRRGGAEQHPDDAAAAEEARAAGGGAAAARAAAAGRAGAVARVRAGEPGQAQVLQRGAVQRHHGPGQAR

SEQ ID NO: 28629 - protein, 333 aa, Zea mays subsp. mays
  peptide (1)..(333): Ceres Seq. ID no. 13493472
  misc_feature (1)..(87): Pfam Name: Pfam Description:  AF-4 proto-oncoprotein
  misc_feature (13)..(331): NCBI GI NO: 5777621 NR Description: CAA30379.1 protein [Oryza sativa]
  misc_feature (13)..(331): NCBI GI NO: 38345517 NR Description: OSJNBa0039K24.20
  misc_feature (13)..(332): NCBI GI NO: 18401556 NR Description: expressed protein [Arabidopsis thaliana]
  misc_feature (13)..(332): NCBI GI NO: 15239097 NR Description: expressed protein [Arabidopsis thaliana]
  misc_feature (13)..(332): NCBI GI NO: 28416677 NR Description: At5g42860 [Arabidopsis thaliana]
  misc_feature (13)..(253): NCBI GI NO: 15227481 NR Description: expressed protein [Arabidopsis thaliana]
  misc_feature (281)..(329): NCBI GI NO: 15227481 NR Description: expressed protein [Arabidopsis thaliana]
  misc_feature (16)..(332): NCBI GI NO: 34904260 NR Description: P0452F10.18
  misc_feature (13)..(310): NCBI GI NO: 9294056 NR Description: emb|CAB53482
  misc_feature (14)..(329): NCBI GI NO: 9294055 NR Description: gene_id:MOB24.18~unknown protein
MPPPPQQQPPHRHAKTDSEVTSSMAASSPPRAAYYVQSPSHDDGENKTAASSFHSSPAASPPRSASRHSSSSSRFSASAKGTASGAGGGRRRGSAWAKEAAIEEEGLLGVDDGSGGDGDGRGGIPRRARYLLGFAGAFLGLFLLFALVLWGASRNQRPVVALRAVTFHRFVVQAGTDASLVPTEMASLNATVSLTFRNVGTFFGVHVSADPVTLHYAQLQLASGNMKYFYQPRRSQRSLAVAVVGDKVPLYGGGAGLSSTPTTLPPPRKRAPPVVVPPPPVPLRLAVRVRSRAFVLGSLVKPKFYSEAQCSVTMDQARLGKPVSLNKACTYTH

SEQ ID NO: 28630 - DNA, 1523 bp, Zea mays subsp. mays
  misc_feature (1)..(1523): Ceres Seq. ID no. 12365642
atgagaaaaatagaaaattcctccaaaccctaagcccctctctgctcacctctgtactccgaatctgctcccaagtctgctagggtttaacgctcgcgtcctcctcacgcattcggtctggtcgctgatcttcgcttgttcgattccgctcggctctaggacccaggctctcgaggcggctggagtggcggcgcgacgagagggtgaagcggatgcagacggaggcgagggtggggatggccgccgccacgatggacggcaccggcgccgcggcgtccgccgcccggaggtacacgacgcagcagcagcagcagcagctgcagcaccaccagccgcagctcgggaccgtgccccatctcctcgccggcggcgtcgctggcgcagtcagcaagacctgcaccgccccgctcgcacgcctcaccatcctctttcaggtacaaggaatgcactcagatgtggctacaatgcgcaatactagcatatggcgtgaagcatcccgcattgtctatggagaaggttttcgagctttctggaaagggaaccttgttaccattgctcaccggttgccttactcttcaattagtttctatgcctatgagagatacaagaatttgcttcagatgctaccgggtcttgagaagaatggtggatttggtgcagatgttggtgttagattgctaggtggtggtttatcaggaatcactgcagcttctgtgacgtatccactggacttggtgcggacacgtcttgctgcccagacaaatactgcctactacaggggcatatctcatgctctttatgcgatctgcagagatgagggtgtccgtggattgtacaagggtcttggtgccactttactgggagtgggccccagcattgcagtaagcttctctgtgtatgaaactttacgttcccattggcaaatagagaggccatgtgattcccctgttctgatcagtttggcttgtggaagtctttcaggaattgcatcatctacttttacattcccgttggatcttgtgagacgtcgcatgcaattggaaggagcagccgggagggctcgcgtctaccagacaggactttttggaaccttcggacatattgtccgtacggagggttttagaggcatgtatagaggaatcttgcctgagtactgcaaagtggttcctggtgtcggcatcgtatttatgacatatgagatgcttaaggccatcctcacaggactggaatctgatgattagatatctgcgaggtcatgctacacaattttgatacatggtgtcagaacaacatttgaggctgattagactgggagaaatatgagcatgtagcatacgttagggtttaggatgtgctaaggtttgcagtttgtgttatatggttacagatgtttatgtagtgcaccgtgaaagatgccacaggtcttccaaaatgaatatttttttggcatcaccaccattttgtgtatcttcaataacattgtaatggtacatgaagctgttgtctttagcctgatgatcttt

SEQ ID NO: 28631 - protein, 342 aa, Zea mays subsp. mays
  peptide (1)..(342): Ceres Seq. ID no. 12365643
  misc_feature (14)..(342): NCBI GI NO: 34902034 NR Description: putative peroxisomal Ca-dependent solute carrierprotein
  misc_feature (43)..(342): NCBI GI NO: 34895726 NR Description: putative peroxisomal Ca-dependent solute carrierprotein
  misc_feature (30)..(336): NCBI GI NO: 22331775 NR Description: mitochondrial carrier protein family
  misc_feature (1)..(341): NCBI GI NO: 15228163 NR Description: mitochondrial carrier protein family
  misc_feature (1)..(341): NCBI GI NO: 21554682 NR Description: Ca-dependent solute carrier-like protein
  misc_feature (30)..(336): NCBI GI NO: 11277067 NR Description: hypothetical protein F5K20
  misc_feature (1)..(338): NCBI GI NO: 30687297 NR Description: mitochondrial carrier protein family
  misc_feature (1)..(338): NCBI GI NO: 25295875 NR Description: probable mitochondrial carrier protein
  misc_feature (48)..(340): NCBI GI NO: 27694792 NR Description: Similar to hypothetical protein MGC36388
  misc_feature (49)..(335): NCBI GI NO: 33598954 NR Description: calcium-binding transporter [Homo sapiens]
MQTEARVGMAAATMDGTGAAASAARRYTTQQQQQQLQHHQPQLGTVPHLLAGGVAGAVSKTCTAPLARLTILFQVQGMHSDVATMRNTSIWREASRIVYGEGFRAFWKGNLVTIAHRLPYSSISFYAYERYKNLLQMLPGLEKNGGFGADVGVRLLGGGLSGITAASVTYPLDLVRTRLAAQTNTAYYRGISHALYAICRDEGVRGLYKGLGATLLGVGPSIAVSFSVYETLRSHWQIERPCDSPVLISLACGSLSGIASSTFTFPLDLVRRRMQLEGAAGRARVYQTGLFGTFGHIVRTEGFRGMYRGILPEYCKVVPGVGIVFMTYEMLKAILTGLESDD

SEQ ID NO: 28632 - protein, 334 aa, Zea mays subsp. mays
  peptide (1)..(334): Ceres Seq. ID no. 12365644
  misc_feature (6)..(334): NCBI GI NO: 34902034 NR Description: putative peroxisomal Ca-dependent solute carrierprotein
  misc_feature (35)..(334): NCBI GI NO: 34895726 NR Description: putative peroxisomal Ca-dependent solute carrierprotein
  misc_feature (22)..(328): NCBI GI NO: 22331775 NR Description: mitochondrial carrier protein family
  misc_feature (1)..(333): NCBI GI NO: 15228163 NR Description: mitochondrial carrier protein family
  misc_feature (1)..(333): NCBI GI NO: 21554682 NR Description: Ca-dependent solute carrier-like protein
  misc_feature (22)..(328): NCBI GI NO: 11277067 NR Description: hypothetical protein F5K20
  misc_feature (1)..(330): NCBI GI NO: 30687297 NR Description: mitochondrial carrier protein family
  misc_feature (1)..(330): NCBI GI NO: 25295875 NR Description: probable mitochondrial carrier protein
  misc_feature (40)..(332): NCBI GI NO: 27694792 NR Description: Similar to hypothetical protein MGC36388
  misc_feature (41)..(327): NCBI GI NO: 33598954 NR Description: calcium-binding transporter [Homo sapiens]
MAAATMDGTGAAASAARRYTTQQQQQQLQHHQPQLGTVPHLLAGGVAGAVSKTCTAPLARLTILFQVQGMHSDVATMRNTSIWREASRIVYGEGFRAFWKGNLVTIAHRLPYSSISFYAYERYKNLLQMLPGLEKNGGFGADVGVRLLGGGLSGITAASVTYPLDLVRTRLAAQTNTAYYRGISHALYAICRDEGVRGLYKGLGATLLGVGPSIAVSFSVYETLRSHWQIERPCDSPVLISLACGSLSGIASSTFTFPLDLVRRRMQLEGAAGRARVYQTGLFGTFGHIVRTEGFRGMYRGILPEYCKVVPGVGIVFMTYEMLKAILTGLESDD

SEQ ID NO: 28633 - protein, 329 aa, Zea mays subsp. mays
  peptide (1)..(329): Ceres Seq. ID no. 12365645
  misc_feature (1)..(329): NCBI GI NO: 34902034 NR Description: putative peroxisomal Ca-dependent solute carrierprotein
  misc_feature (30)..(329): NCBI GI NO: 34895726 NR Description: putative peroxisomal Ca-dependent solute carrierprotein
  misc_feature (17)..(323): NCBI GI NO: 22331775 NR Description: mitochondrial carrier protein family
  misc_feature (1)..(328): NCBI GI NO: 15228163 NR Description: mitochondrial carrier protein family
  misc_feature (1)..(328): NCBI GI NO: 21554682 NR Description: Ca-dependent solute carrier-like protein
  misc_feature (17)..(323): NCBI GI NO: 11277067 NR Description: hypothetical protein F5K20
  misc_feature (1)..(325): NCBI GI NO: 30687297 NR Description: mitochondrial carrier protein family
  misc_feature (1)..(325): NCBI GI NO: 25295875 NR Description: probable mitochondrial carrier protein
  misc_feature (35)..(327): NCBI GI NO: 27694792 NR Description: Similar to hypothetical protein MGC36388
  misc_feature (36)..(322): NCBI GI NO: 33598954 NR Description: calcium-binding transporter [Homo sapiens]
MDGTGAAASAARRYTTQQQQQQLQHHQPQLGTVPHLLAGGVAGAVSKTCTAPLARLTILFQVQGMHSDVATMRNTSIWREASRIVYGEGFRAFWKGNLVTIAHRLPYSSISFYAYERYKNLLQMLPGLEKNGGFGADVGVRLLGGGLSGITAASVTYPLDLVRTRLAAQTNTAYYRGISHALYAICRDEGVRGLYKGLGATLLGVGPSIAVSFSVYETLRSHWQIERPCDSPVLISLACGSLSGIASSTFTFPLDLVRRRMQLEGAAGRARVYQTGLFGTFGHIVRTEGFRGMYRGILPEYCKVVPGVGIVFMTYEMLKAILTGLESDD

SEQ ID NO: 28634 - DNA, 1659 bp, Zea mays subsp. mays
  misc_feature (1)..(1659): Ceres Seq. ID no. 12387042
aaagaacccgagcaccgcctcagctcatcctcgcagatacgtttcagttccggagcgactagcgcgagcgttcagggattatttactgaaagagagagtgttcagggattttagcacttgttcatggctgctgcgtgcatcagccatcgctttcgccactccaagctcccggtactggtcctggcgctggcgacggtggtggccgccgcacgggctcagctgtcgccgccgacgttctacgcctcgtcgtgccctgccgcgctcgtcaccatcaacgccgccgtgagggctgccgtgctgctggaccgccgcatgggcgcctccctgctccggctccacttccacgactgcttcgtgcagggctgcgacgcgtccgttctgctggacgacacgggcaacttcaccggggagaagggcgcgggccccaacgcgggctcgctcagggggttcggcgtcatcgacaccgtcaaggccctgctggaggcgctgtgcccgcggaccgtgtcgtgcgccgacatcctcgccgtcgccgcccgtgactctgtcgtcgcgctcggaggcccatcgtggaccgtgcagctcggcaggagggactccaccacggcgagcctctccaccgcgaacaccgacctcccctcgccggcgtccagcctgagcaccctgctcgccgcattcgccaggaaaggcggtcagcagcaccgacatggtcgctctgtctggtgcgtccctcaccgatcaatcaaccacggaccacgctttcatcagtgaccagtcatcaccgcagcgcctggcttcacatcacagtgatgttatggcatggtcaccgacgtgaccatgcaactaccagttcccctgtgcctctactctaacagcggtggcagcttggcagttagcaccagcgcggcagcgccaccgccacgtactggtcaccactgacacgtgagcggttgcgtatgcatgatgcaggagcccacacggtggggcaagcgcagtgccagaactaccaggccaggatctacaacgacgccaacatcaacgcggccttcgcggcgtcgctgagggccggctgcccggcgtccggagggggcggcgccaacgcgccgctggacgcgtccacgccgaacgcgttcgacaacgcgtactacggcgatctggtcgcgcagcagggcctgctgcactccgatcaagagctcttcaacggtggctccacggacgcactggtcaggagctacgcggccagctcggcgcggtttagtagcgacttcgccgcagccatggtcaggatgggcgccattggtgtcctgaccgggagcagcggacaggtgcggcgcaactgccggaaggtgaactagccagctcgcagaatactgcattgtatgcatcacactggtggaagaaattgtgtgtgctgagttatccaaccatggttgaacgaagttgtaaagattaaagggcaacgaagtcatatagcttgcattgatgttgtcattaaagaagtacaccctccatttttttctgcaaatacctagaacatttaggtatcactgtagctcaactttgagtataaatgtagcatataattatctctttcatatggccaacaataatatacaaatgtattctgtataagttacaattattataataaaattcaattcc

SEQ ID NO: 28635 - protein, 214 aa, Zea mays subsp. mays
  peptide (1)..(214): Ceres Seq. ID no. 12387043
  misc_feature (50)..(188): Pfam Name: Pfam Description:  Peroxidase
  misc_feature (17)..(191): NCBI GI NO: 34393249 NR Description: putative peroxidase precursor
  misc_feature (19)..(188): NCBI GI NO: 2117619 NR Description: peroxidase (EC 1.11.1.7) 4 precursor - wheat
  misc_feature (13)..(188): NCBI GI NO: 585662 NR Description: Peroxidase 2 precursor
  misc_feature (19)..(188): NCBI GI NO: 34393250 NR Description: peroxidase
  misc_feature (13)..(188): NCBI GI NO: 2429292 NR Description: peroxidase [Oryza sativa]
  misc_feature (13)..(188): NCBI GI NO: 6093671 NR Description: Cationic peroxidase 1 precursor (PNPC1)
  misc_feature (12)..(188): NCBI GI NO: 34393251 NR Description: peroxidase
  misc_feature (12)..(188): NCBI GI NO: 100694 NR Description: peroxidase (EC 1.11.1.7) precursor - rice
  misc_feature (13)..(188): NCBI GI NO: 99872 NR Description: peroxidase (EC 1
  misc_feature (19)..(188): NCBI GI NO: 2429288 NR Description: peroxidase [Oryza sativa]
MAAACISHRFRHSKLPVLVLALATVVAAARAQLSPPTFYASSCPAALVTINAAVRAAVLLDRRMGASLLRLHFHDCFVQGCDASVLLDDTGNFTGEKGAGPNAGSLRGFGVIDTVKALLEALCPRTVSCADILAVAARDSVVALGGPSWTVQLGRRDSTTASLSTANTDLPSPASSLSTLLAAFARKGGQQHRHGRSVWCVPHRSINHGPRFHQ

SEQ ID NO: 28636 - protein, 151 aa, Zea mays subsp. mays
  peptide (1)..(151): Ceres Seq. ID no. 12387044
  misc_feature (1)..(125): Pfam Name: Pfam Description:  Peroxidase
  misc_feature (1)..(128): NCBI GI NO: 34393249 NR Description: putative peroxidase precursor
  misc_feature (1)..(125): NCBI GI NO: 2117619 NR Description: peroxidase (EC 1.11.1.7) 4 precursor - wheat
  misc_feature (1)..(125): NCBI GI NO: 585662 NR Description: Peroxidase 2 precursor
  misc_feature (1)..(125): NCBI GI NO: 34393250 NR Description: peroxidase
  misc_feature (1)..(125): NCBI GI NO: 2429292 NR Description: peroxidase [Oryza sativa]
  misc_feature (1)..(125): NCBI GI NO: 6093671 NR Description: Cationic peroxidase 1 precursor (PNPC1)
  misc_feature (1)..(125): NCBI GI NO: 34393251 NR Description: peroxidase
  misc_feature (1)..(125): NCBI GI NO: 100694 NR Description: peroxidase (EC 1.11.1.7) precursor - rice
  misc_feature (1)..(125): NCBI GI NO: 99872 NR Description: peroxidase (EC 1
  misc_feature (1)..(125): NCBI GI NO: 2429288 NR Description: peroxidase [Oryza sativa]
MGASLLRLHFHDCFVQGCDASVLLDDTGNFTGEKGAGPNAGSLRGFGVIDTVKALLEALCPRTVSCADILAVAARDSVVALGGPSWTVQLGRRDSTTASLSTANTDLPSPASSLSTLLAAFARKGGQQHRHGRSVWCVPHRSINHGPRFHQ

SEQ ID NO: 28637 - protein, 132 aa, Zea mays subsp. mays
  peptide (1)..(132): Ceres Seq. ID no. 12387045
  misc_feature (4)..(96): Pfam Name: Pfam Description:  Peroxidase
  misc_feature (4)..(132): NCBI GI NO: 34393249 NR Description: putative peroxidase precursor
  misc_feature (4)..(132): NCBI GI NO: 2117619 NR Description: peroxidase (EC 1.11.1.7) 4 precursor - wheat
  misc_feature (4)..(132): NCBI GI NO: 585662 NR Description: Peroxidase 2 precursor
  misc_feature (4)..(132): NCBI GI NO: 34393250 NR Description: peroxidase
  misc_feature (4)..(132): NCBI GI NO: 2429292 NR Description: peroxidase [Oryza sativa]
  misc_feature (1)..(132): NCBI GI NO: 6093671 NR Description: Cationic peroxidase 1 precursor (PNPC1)
  misc_feature (4)..(132): NCBI GI NO: 34393251 NR Description: peroxidase
  misc_feature (1)..(132): NCBI GI NO: 99872 NR Description: peroxidase (EC 1
  misc_feature (4)..(132): NCBI GI NO: 100694 NR Description: peroxidase (EC 1.11.1.7) precursor - rice
  misc_feature (4)..(132): NCBI GI NO: 2429288 NR Description: peroxidase [Oryza sativa]
MHDAGAHTVGQAQCQNYQARIYNDANINAAFAASLRAGCPASGGGGANAPLDASTPNAFDNAYYGDLVAQQGLLHSDQELFNGGSTDALVRSYAASSARFSSDFAAAMVRMGAIGVLTGSSGQVRRNCRKVN

SEQ ID NO: 28638 - DNA, 1157 bp, Zea mays subsp. mays
  misc_feature (1)..(1157): Ceres Seq. ID no. 13496128
  misc_feature (100)..(100): n is a, c, t, g, unknown, or other
aaagcccagcacgaccaaaacccagaacctgagaatggcgcagttccttcgcggcaaggccgccgccgccgccaccggggcggcggcgctgcgcgcgtcntctccggcgccatggcggcggacggcctccgcgtcgtaccaccacacgatccaggctgtaccgcgggagacagccggcccgcgcgccgcggcgcgcgagcgccgccacggccgcgtcccggcggtcctgctcacgctcgcgggcgccgcgccagggaacggaattgcccaccggcacctccttaccgccgacaggaggcagctcgcggagatgctcaagcagtcgccctacttcctctccacccccgtccgcctccaggtccgcgcgggcgagcgatccaacgccatcctccacgccggcaccgtcctccccatcaaggtgcatagagatgaaaattctgggaatatactgaatttggtaatggtgaaggcagatgaaggaacaatgctgaaggtggatttgcctgtagagttcaagggagaggatgcttgccctgggttgaagaaaggaggctttttgcagaaaataaggaccagcctggtgtatctctgcccagctgagcacatccctccaaaaattgaggtggacctgacaaatcttgatgtcggagatagggtattgatgcatgacattcccgtccatccatcgctcaagttgctgagtaaaaacgagaccatgcccgtctgcaagatcttggcctcaaagccagacgagtaggaggcgctgcaaatacttcagagctgataacattgtacctttaggtggtacagccctccagcagctccgtccctagttcttggcttgctttttggtcatctgtcccctaggtttcaatgtgatagtggattcagacaagctatgggcttcaagtaaagatacgaaggaacaaaatgaagaaatatcactggagagacattgtctgtaccaaccgctatagaataacatcctttctcattcagtttgggttcagggacacatgacatgtaagacgactatcctttgctgtggcctgggtgaattcattctctaagctactcttgcagcggctcacaattcatcgtcctgactgcatgcattgtactgtcatgattctacgtattgaatgttgtattcatgc

SEQ ID NO: 28639 - protein, 251 aa, Zea mays subsp. mays
  peptide (1)..(251): Ceres Seq. ID no. 13496129
  misc_feature (12)..(251): NCBI GI NO: 15240108 NR Description: expressed protein [Arabidopsis thaliana]
  misc_feature (49)..(248): NCBI GI NO: 15236554 NR Description: expressed protein [Arabidopsis thaliana]
  misc_feature (37)..(210): NCBI GI NO: 34912284 NR Description: P0451D05.2
  misc_feature (49)..(248): NCBI GI NO: 15644375 NR Description: general stress protein Ctc [Thermotoga maritima]
  misc_feature (49)..(241): NCBI GI NO: 22998879 NR Description: hypothetical protein [Magnetococcus sp. MC-1]
  misc_feature (67)..(234): NCBI GI NO: 37519968 NR Description: 50S ribosomal protein L25 [Gloeobacter violaceus]
  misc_feature (135)..(251): NCBI GI NO: 13472406 NR Description: 50S ribosomal protein L25 [Mesorhizobium loti]
  misc_feature (154)..(231): NCBI GI NO: 16124740 NR Description: ribosomal 5S rRNA E-loop binding proteinCtc/L25/TL5
  misc_feature (49)..(246): NCBI GI NO: 22965584 NR Description: hypothetical protein [Rhodospirillum rubrum]
  misc_feature (97)..(251): NCBI GI NO: 29375409 NR Description: ribosomal protein L25 [Enterococcus faecalis V583]
  misc_feature (33)..(33): Xaa is any aa, unknown or other
KPSTTKTQNLRMAQFLRGKAAAAATGAAALRAXSPAPWRRTASASYHHTIQAVPRETAGPRAAARERRHGRVPAVLLTLAGAAPGNGIAHRHLLTADRRQLAEMLKQSPYFLSTPVRLQVRAGERSNAILHAGTVLPIKVHRDENSGNILNLVMVKADEGTMLKVDLPVEFKGEDACPGLKKGGFLQKIRTSLVYLCPAEHIPPKIEVDLTNLDVGDRVLMHDIPVHPSLKLLSKNETMPVCKILASKPDE

SEQ ID NO: 28640 - protein, 240 aa, Zea mays subsp. mays
  peptide (1)..(240): Ceres Seq. ID no. 13496130
  misc_feature (1)..(240): NCBI GI NO: 15240108 NR Description: expressed protein [Arabidopsis thaliana]
  misc_feature (38)..(237): NCBI GI NO: 15236554 NR Description: expressed protein [Arabidopsis thaliana]
  misc_feature (26)..(199): NCBI GI NO: 34912284 NR Description: P0451D05.2
  misc_feature (38)..(237): NCBI GI NO: 15644375 NR Description: general stress protein Ctc [Thermotoga maritima]
  misc_feature (38)..(230): NCBI GI NO: 22998879 NR Description: hypothetical protein [Magnetococcus sp. MC-1]
  misc_feature (56)..(223): NCBI GI NO: 37519968 NR Description: 50S ribosomal protein L25 [Gloeobacter violaceus]
  misc_feature (124)..(240): NCBI GI NO: 13472406 NR Description: 50S ribosomal protein L25 [Mesorhizobium loti]
  misc_feature (143)..(220): NCBI GI NO: 16124740 NR Description: ribosomal 5S rRNA E-loop binding proteinCtc/L25/TL5
  misc_feature (38)..(235): NCBI GI NO: 22965584 NR Description: hypothetical protein [Rhodospirillum rubrum]
  misc_feature (86)..(240): NCBI GI NO: 29375409 NR Description: ribosomal protein L25 [Enterococcus faecalis V583]
  misc_feature (22)..(22): Xaa is any aa, unknown or other
MAQFLRGKAAAAATGAAALRAXSPAPWRRTASASYHHTIQAVPRETAGPRAAARERRHGRVPAVLLTLAGAAPGNGIAHRHLLTADRRQLAEMLKQSPYFLSTPVRLQVRAGERSNAILHAGTVLPIKVHRDENSGNILNLVMVKADEGTMLKVDLPVEFKGEDACPGLKKGGFLQKIRTSLVYLCPAEHIPPKIEVDLTNLDVGDRVLMHDIPVHPSLKLLSKNETMPVCKILASKPDE

SEQ ID NO: 28641 - protein, 148 aa, Zea mays subsp. mays
  peptide (1)..(148): Ceres Seq. ID no. 13496131
  misc_feature (1)..(148): NCBI GI NO: 15240108 NR Description: expressed protein [Arabidopsis thaliana]
  misc_feature (1)..(145): NCBI GI NO: 15236554 NR Description: expressed protein [Arabidopsis thaliana]
  misc_feature (1)..(107): NCBI GI NO: 34912284 NR Description: P0451D05.2
  misc_feature (1)..(145): NCBI GI NO: 15644375 NR Description: general stress protein Ctc [Thermotoga maritima]
  misc_feature (1)..(138): NCBI GI NO: 22998879 NR Description: hypothetical protein [Magnetococcus sp. MC-1]
  misc_feature (1)..(131): NCBI GI NO: 37519968 NR Description: 50S ribosomal protein L25 [Gloeobacter violaceus]
  misc_feature (32)..(148): NCBI GI NO: 13472406 NR Description: 50S ribosomal protein L25 [Mesorhizobium loti]
  misc_feature (51)..(128): NCBI GI NO: 16124740 NR Description: ribosomal 5S rRNA E-loop binding proteinCtc/L25/TL5
  misc_feature (1)..(143): NCBI GI NO: 22965584 NR Description: hypothetical protein [Rhodospirillum rubrum]
  misc_feature (1)..(148): NCBI GI NO: 29375409 NR Description: ribosomal protein L25 [Enterococcus faecalis V583]
MLKQSPYFLSTPVRLQVRAGERSNAILHAGTVLPIKVHRDENSGNILNLVMVKADEGTMLKVDLPVEFKGEDACPGLKKGGFLQKIRTSLVYLCPAEHIPPKIEVDLTNLDVGDRVLMHDIPVHPSLKLLSKNETMPVCKILASKPDE

SEQ ID NO: 28642 - DNA, 1620 bp, Zea mays subsp. mays
  misc_feature (1)..(1620): Ceres Seq. ID no. 12408990
  misc_feature (1106)..(1106): n is a, c, t, g, unknown, or other
actgtactaaaccgcgaggaaaagtagcaaagaaattacaagggggtggacgcgcggggggcaagtcgtctccttcgatttcgttcttgcctctttgcctctctcaaggtctgctcaaactcaaagtggattcggcagaacacgcatggcgtagagcgcggggagcaagagatttcctagcttcaagaacctggaagaacaagtcgaggatccgtcgtcgagcccgactgttctaagagaaagtaattagcaagcagctctcgattatactgtattatttatcgaaaccctatctaagctagtagcaagctagctagctagaagaggaggaggaagctggcgaactggtggtgggacgaggggcggggcggcctgccggagccatcccttggcaagaaccaagaagaaatggcaccttcctccaaggacggcgccaccgccaccgagcagccgacgagcggcgacgacgaccgggagaacggcggcacgggcgagcccaaggaaggcgcggtggtggcgggcaaccggcggccccgcgggcggccgccggggtccaagaacaagcccaagccgcccatcttcgtgacgcgcgacagccccaacgcgctgcgcagccacgtgatggaggtggccggcggcgccgacgtggccgagtccatcgcccacttcgcgcgccgcaggcagcgcggcgtgtgcgtgctcagcggcgcgggcaccgtcgccgacgtggcgctccgccagcccgcggctccgggcgccgtggtcgccctccgcggccgcttcgagatcctctcgctcaccggcacgttcctgccgggccccgcgccgccgggctccacggggctcaccgtgtacctcgcgggcggccaggggcaggtcgtcggcggcagcgtcgtcggcacgctcaccgcggcggggcccgtcatggtgatggcgtccacgttcgccaacgccacctacgagaggctgccgctggacgacgccgacgaggagcccgccgggcagcaggcggcgcagctgcctcccggaccgggcggagggcagcctatggtaatgggcgggatggccgacccctcagcggtgccaatgttcggcggcgccggcgntgtgccgccaagcctcatgccagcaggggccgcagccgcctcctccggtgcgggcctgcagctcgggcacgaccgacttgcatgggctcatgcacggccaccgccatactaggaagccggggaggatgcatcatccatgaccgaggaaattgatgaattagaaatggaggatcgttcagcgcaacaacagctagcagcagctcaaggacgactgccactcaccatcatatagtaactagaaccgaacgaagatcgaattaagcgctagcttccaggagctaataaaactctcttcgatcaattctacctattacagtactctgctaagaaggtaaactacttatagtgctatatatgtatgtatattactacactgctactgcatgcatgtgactgtgtggctgtgccaaatgtcagcgcaagatacgatggagcttgcattgttttttcccattgtaatgtttgatttatattaattattagatacagcatgataaatagatgatggatgatt

SEQ ID NO: 28643 - protein, 269 aa, Zea mays subsp. mays
  peptide (1)..(269): Ceres Seq. ID no. 12408991
  misc_feature (1)..(267): NCBI GI NO: 18414224 NR Description: Expressed protein; protein id: At4g14465
  misc_feature (1)..(267): NCBI GI NO: 21593180 NR Description: putative DNA-binding protein
  misc_feature (17)..(265): NCBI GI NO: 18396925 NR Description: expressed protein; protein id: At3g04570
  misc_feature (3)..(267): NCBI GI NO: 38346718 NR Description: OSJNBa0086O06.16
  misc_feature (17)..(232): NCBI GI NO: 34902080 NR Description: unknown protein
  misc_feature (1)..(267): NCBI GI NO: 15235815 NR Description: putative DNA binding protein; protein id:At4g22810
  misc_feature (7)..(252): NCBI GI NO: 34905212 NR Description: P0672D01.8
  misc_feature (1)..(267): NCBI GI NO: 15234404 NR Description: putative DNA-binding protein; protein id:At4g12050
  misc_feature (17)..(251): NCBI GI NO: 15236657 NR Description: hypothetical protein; protein id: At4g17800
  misc_feature (13)..(211): NCBI GI NO: 15225475 NR Description: putative AT-hook DNA-binding protein
  misc_feature (233)..(233): Xaa is any aa, unknown or other
MAPSSKDGATATEQPTSGDDDRENGGTGEPKEGAVVAGNRRPRGRPPGSKNKPKPPIFVTRDSPNALRSHVMEVAGGADVAESIAHFARRRQRGVCVLSGAGTVADVALRQPAAPGAVVALRGRFEILSLTGTFLPGPAPPGSTGLTVYLAGGQGQVVGGSVVGTLTAAGPVMVMASTFANATYERLPLDDADEEPAGQQAAQLPPGPGGGQPMVMGGMADPSAVPMFGGAGXVPPSLMPAGAAAASSGAGLQLGHDRLAWAHARPPPY

SEQ ID NO: 28644 - protein, 198 aa, Zea mays subsp. mays
  peptide (1)..(198): Ceres Seq. ID no. 12408992
  misc_feature (1)..(196): NCBI GI NO: 18414224 NR Description: Expressed protein; protein id: At4g14465
  misc_feature (1)..(196): NCBI GI NO: 21593180 NR Description: putative DNA-binding protein
  misc_feature (1)..(194): NCBI GI NO: 18396925 NR Description: expressed protein; protein id: At3g04570
  misc_feature (1)..(196): NCBI GI NO: 38346718 NR Description: OSJNBa0086O06.16
  misc_feature (1)..(161): NCBI GI NO: 34902080 NR Description: unknown protein
  misc_feature (1)..(196): NCBI GI NO: 15235815 NR Description: putative DNA binding protein; protein id:At4g22810
  misc_feature (1)..(181): NCBI GI NO: 34905212 NR Description: P0672D01.8
  misc_feature (1)..(196): NCBI GI NO: 15234404 NR Description: putative DNA-binding protein; protein id:At4g12050
  misc_feature (1)..(180): NCBI GI NO: 15236657 NR Description: hypothetical protein; protein id: At4g17800
  misc_feature (1)..(140): NCBI GI NO: 15225475 NR Description: putative AT-hook DNA-binding protein
  misc_feature (162)..(162): Xaa is any aa, unknown or other
MEVAGGADVAESIAHFARRRQRGVCVLSGAGTVADVALRQPAAPGAVVALRGRFEILSLTGTFLPGPAPPGSTGLTVYLAGGQGQVVGGSVVGTLTAAGPVMVMASTFANATYERLPLDDADEEPAGQQAAQLPPGPGGGQPMVMGGMADPSAVPMFGGAGXVPPSLMPAGAAAASSGAGLQLGHDRLAWAHARPPPY

SEQ ID NO: 28645 - DNA, 1555 bp, Zea mays subsp. mays
  misc_feature (1)..(1555): Ceres Seq. ID no. 12408986
ttctgcaagccttgctccatttgcgactcgcgagctcaccttccacaccctacctactcctccactctgagctcacaccaaacagcccgtgcaccaaggccaccattcacctccaccaacaacaaacgggaactcttcacagcttcgcacctcgcgtcacaacaccaagacgcacgtaggagggaacctcaagcttcagtcgtccatggctcagcagcaaacaaatcctgaagaggtggtcctcgggcaggaggtcggggccgcgagggtggccactctcaaccgcccgcgccagctcaacggcatctccgacagagtggtgtacctcctcgcacagtttctggagaaatgggagaaggatgagaacgccaaattcgtcatctttaagggtgctgggcgtgcattttctgctggtggggacctaaagatgttttatgaagggaaatcaaatgattcctgcctcgaggttgtgtatagaatgtattggctttgctaccacattcacacgtacaagaaaaccatggttgctcttgttaatgggcttgtcatgggtggtggcgctgcaatggttgcgccactaaagtttgcagttgtcacagagaaaacaatctttgctactcctgaggctagtgttggattgcacacagattgtagcttttcctacatccattcccggctccctggatatttaggcgagtatctggctttaactggtgctagactgaatgcgaaggaaatgatttctgctggtcttgctactcattttgtcagttctgaaaaattggaagaacttgaaaaacgtctactggatttggacacaggtgctgagtctgcagtccgagctgttattgaagaattttcaacagatgttcaaactgatgaagatagtatattgaataagctttcaactatcaacaaatgcttctctgcagagactgttgaggatatcataaaagcatttgaatcagaagcgagcatagacggaaaccaatggatagctccagtcctaaagggtctgagaagatcatctccaactgcactgaagatcaccctgagatcgatcagagaaggtcgaaaacagagtttgcctgaatgtttgactaaggaatttaggcttacaatgaatatactgcggtctgttgtcaatggggatgtttatgagggcattagagctcttagcatcgataaagacaatgcccctaagtggaatcccactacccttgaggaggtgaagtacgaggacatcgaccgtctgttccagccgttcagtccggagctggaacttcaggtcccatctgatgattccaacaggtggagcggcaaatacgagaacacggtctatggcagagcttcccagtgactgtatacaagatcccccagccttttgttattttcatccgaaccactgcattacggaatattcagtttgcggcacgtgtgtatttcgagtgtttgtgtagcgcgacgttccaatgtatgaactgttgcaaaggttacacgatgacatgaagtttgatccaacaccaaaaccatctattagatgggaaagttctgc

SEQ ID NO: 28646 - protein, 384 aa, Zea mays subsp. mays
  peptide (1)..(384): Ceres Seq. ID no. 12408987
  misc_feature (62)..(188): Pfam Name: Pfam Description:  Enoyl-CoA hydratase/isomerase family
  misc_feature (1)..(379): NCBI GI NO: 30679729 NR Description: 3-hydroxyisobutyryl-coenzyme A hydrolase
  misc_feature (62)..(379): NCBI GI NO: 6692680 NR Description: F12K11.12 [Arabidopsis thaliana]
  misc_feature (10)..(38): NCBI GI NO: 6692680 NR Description: F12K11.12 [Arabidopsis thaliana]
  misc_feature (1)..(367): NCBI GI NO: 37536724 NR Description: putative enoyl-CoA-hydratase
  misc_feature (1)..(363): NCBI GI NO: 15239206 NR Description: 3-hydroxyisobutyryl-coenzyme A hydrolase
  misc_feature (9)..(364): NCBI GI NO: 22329062 NR Description: enoyl-CoA hydratase - like protein
  misc_feature (12)..(357): NCBI GI NO: 15224549 NR Description: 3-hydroxyisobutyryl-coenzyme A hydrolase
  misc_feature (12)..(357): NCBI GI NO: 15224539 NR Description: 3-hydroxyisobutyryl-coenzyme A hydrolase
  misc_feature (38)..(364): NCBI GI NO: 6014701 NR Description: enoyl-CoA-hydratase [Avicennia marina]
  misc_feature (1)..(352): NCBI GI NO: 37594471 NR Description: 3-hydroxyisobutyryl-Coenzyme A hydrolase isoform 1
MAQQQTNPEEVVLGQEVGAARVATLNRPRQLNGISDRVVYLLAQFLEKWEKDENAKFVIFKGAGRAFSAGGDLKMFYEGKSNDSCLEVVYRMYWLCYHIHTYKKTMVALVNGLVMGGGAAMVAPLKFAVVTEKTIFATPEASVGLHTDCSFSYIHSRLPGYLGEYLALTGARLNAKEMISAGLATHFVSSEKLEELEKRLLDLDTGAESAVRAVIEEFSTDVQTDEDSILNKLSTINKCFSAETVEDIIKAFESEASIDGNQWIAPVLKGLRRSSPTALKITLRSIREGRKQSLPECLTKEFRLTMNILRSVVNGDVYEGIRALSIDKDNAPKWNPTTLEEVKYEDIDRLFQPFSPELELQVPSDDSNRWSGKYENTVYGRASQ

SEQ ID NO: 28647 - protein, 310 aa, Zea mays subsp. mays
  peptide (1)..(310): Ceres Seq. ID no. 12408988
  misc_feature (1)..(114): Pfam Name: Pfam Description:  Enoyl-CoA hydratase/isomerase family
  misc_feature (1)..(305): NCBI GI NO: 30679729 NR Description: 3-hydroxyisobutyryl-coenzyme A hydrolase
  misc_feature (1)..(305): NCBI GI NO: 6692680 NR Description: F12K11.12 [Arabidopsis thaliana]
  misc_feature (1)..(293): NCBI GI NO: 37536724 NR Description: putative enoyl-CoA-hydratase
  misc_feature (1)..(289): NCBI GI NO: 15239206 NR Description: 3-hydroxyisobutyryl-coenzyme A hydrolase
  misc_feature (1)..(290): NCBI GI NO: 22329062 NR Description: enoyl-CoA hydratase - like protein
  misc_feature (1)..(283): NCBI GI NO: 15224549 NR Description: 3-hydroxyisobutyryl-coenzyme A hydrolase
  misc_feature (1)..(283): NCBI GI NO: 15224539 NR Description: 3-hydroxyisobutyryl-coenzyme A hydrolase
  misc_feature (1)..(290): NCBI GI NO: 6014701 NR Description: enoyl-CoA-hydratase [Avicennia marina]
  misc_feature (1)..(278): NCBI GI NO: 37594471 NR Description: 3-hydroxyisobutyryl-Coenzyme A hydrolase isoform 1
  misc_feature (1)..(278): NCBI GI NO: 22122625 NR Description: RIKEN cDNA 2610509I15 [Mus musculus]
MFYEGKSNDSCLEVVYRMYWLCYHIHTYKKTMVALVNGLVMGGGAAMVAPLKFAVVTEKTIFATPEASVGLHTDCSFSYIHSRLPGYLGEYLALTGARLNAKEMISAGLATHFVSSEKLEELEKRLLDLDTGAESAVRAVIEEFSTDVQTDEDSILNKLSTINKCFSAETVEDIIKAFESEASIDGNQWIAPVLKGLRRSSPTALKITLRSIREGRKQSLPECLTKEFRLTMNILRSVVNGDVYEGIRALSIDKDNAPKWNPTTLEEVKYEDIDRLFQPFSPELELQVPSDDSNRWSGKYENTVYGRASQ

SEQ ID NO: 28648 - protein, 293 aa, Zea mays subsp. mays
  peptide (1)..(293): Ceres Seq. ID no. 12408989
  misc_feature (1)..(97): Pfam Name: Pfam Description:  Enoyl-CoA hydratase/isomerase family
  misc_feature (1)..(288): NCBI GI NO: 30679729 NR Description: 3-hydroxyisobutyryl-coenzyme A hydrolase
  misc_feature (1)..(288): NCBI GI NO: 6692680 NR Description: F12K11.12 [Arabidopsis thaliana]
  misc_feature (1)..(276): NCBI GI NO: 37536724 NR Description: putative enoyl-CoA-hydratase
  misc_feature (1)..(272): NCBI GI NO: 15239206 NR Description: 3-hydroxyisobutyryl-coenzyme A hydrolase
  misc_feature (1)..(273): NCBI GI NO: 22329062 NR Description: enoyl-CoA hydratase - like protein
  misc_feature (1)..(266): NCBI GI NO: 15224549 NR Description: 3-hydroxyisobutyryl-coenzyme A hydrolase
  misc_feature (1)..(266): NCBI GI NO: 15224539 NR Description: 3-hydroxyisobutyryl-coenzyme A hydrolase
  misc_feature (1)..(273): NCBI GI NO: 6014701 NR Description: enoyl-CoA-hydratase [Avicennia marina]
  misc_feature (1)..(261): NCBI GI NO: 37594471 NR Description: 3-hydroxyisobutyryl-Coenzyme A hydrolase isoform 1
  misc_feature (1)..(261): NCBI GI NO: 22122625 NR Description: RIKEN cDNA 2610509I15 [Mus musculus]
MYWLCYHIHTYKKTMVALVNGLVMGGGAAMVAPLKFAVVTEKTIFATPEASVGLHTDCSFSYIHSRLPGYLGEYLALTGARLNAKEMISAGLATHFVSSEKLEELEKRLLDLDTGAESAVRAVIEEFSTDVQTDEDSILNKLSTINKCFSAETVEDIIKAFESEASIDGNQWIAPVLKGLRRSSPTALKITLRSIREGRKQSLPECLTKEFRLTMNILRSVVNGDVYEGIRALSIDKDNAPKWNPTTLEEVKYEDIDRLFQPFSPELELQVPSDDSNRWSGKYENTVYGRASQ

SEQ ID NO: 28649 - DNA, 1274 bp, Zea mays subsp. mays
  misc_feature (1)..(1274): Ceres Seq. ID no. 12352466
ctacaaatatatggctgcagctgaggtccgacaccacacaaacagcacatctgtttagccaagctgtggccaacctctgcgaggaatggagatggagtcgactcctctcttgacaccatacaagatgggcgatttcaacctggcacacagggttgtgctggcgccgctgacgaggtgccgggcgttcgggaacgtgccgcagccggagcacatggctctctactaccgccagcgggcgacgcccggcggcttcctcatcgccgaggcctgcgccgtgtcggagagcgcgcgcgggtacccggacgttccggggctgtggacccaccaacaggtcgtggcctggaagccgatcgtcgacgccgtccacgccagcggtgccgtcttcttcgcccagctctggcacaccggccgggcctccccctcagaattccaaccaaatgggcaggcaccgatctctagcacggacaagcaaatcccagcacaggtgaaccattccggtgacgtcaacacgttcgcggtgcctcggagactagagacagaggagataccacacgtcgtcaatgacttccgggttgccgccagaaacgccatcaaagcaggctttgatggagtggagatccacgcggcaaacgggtacctgttcgatcagttcatgaaggacagcaccaatgaccgagacgactcctacgggggcagcttggagaaccggtgccgtttcacagccgaggtgatggcagccgtcgcggacgaggtcggtgccaaccgcctcggtgtgcgcctctctccgttcgcggattatatggactgccacgactccaacccagaggcgctcgcgcttcatgtcatcgacgagacgctgaacccgctcggcgtgctttactgccacatggtagagccaaggatgcgggtgaacccagacgacggtattatgactctcgagcacatgctgctaccgttcaggagggcgtttcgcgggacgttcattgctaatggaggctacgaccgtgaggaaggcaatgacgccattgcccgtggccgtggctatgcagatctcatcgcatacggccggatattccttgccaacccggaccttccgatgcgttttgccaagaatgccccgctgaacaagtatgataggagcaccttctatacctctgatccggtggttgggtacacagattatccatttctcgatcaactctaggatgattggcttataaacaatttccccacctggagtactatcttgaccttaaaataaaatgagtgtcact

SEQ ID NO: 28650 - protein, 372 aa, Zea mays subsp. mays
  peptide (1)..(372): Ceres Seq. ID no. 12352467
  misc_feature (7)..(347): Pfam Name: Pfam Description:  NADH:flavin oxidoreductase / NADH oxidase family
  misc_feature (1)..(372): NCBI GI NO: 23495288 NR Description: 12-oxophytodienoic acid reductase [Oryza sativa]
  misc_feature (1)..(370): NCBI GI NO: 15223138 NR Description: 12-oxophytodienoate reductase
  misc_feature (1)..(370): NCBI GI NO: 21593388 NR Description: 12-oxophytodienoate reductase (OPR1)
  misc_feature (4)..(370): NCBI GI NO: 15223140 NR Description: 12-oxophytodienoate reductase
  misc_feature (4)..(370): NCBI GI NO: 26450549 NR Description: putative 12-oxophytodienoate reductase OPR2
  misc_feature (1)..(370): NCBI GI NO: 2765083 NR Description: 12-oxophytodienoate reductase
  misc_feature (7)..(370): NCBI GI NO: 40645347 NR Description: hypothetical protein [Pisum sativum]
  misc_feature (4)..(370): NCBI GI NO: 40645353 NR Description: hypothetical protein [Pisum sativum]
  misc_feature (2)..(370): NCBI GI NO: 40645459 NR Description: LEDI-5c protein [Lithospermum erythrorhizon]
  misc_feature (7)..(370): NCBI GI NO: 40645345 NR Description: hypothetical protein [Pisum sativum]
MEMESTPLLTPYKMGDFNLAHRVVLAPLTRCRAFGNVPQPEHMALYYRQRATPGGFLIAEACAVSESARGYPDVPGLWTHQQVVAWKPIVDAVHASGAVFFAQLWHTGRASPSEFQPNGQAPISSTDKQIPAQVNHSGDVNTFAVPRRLETEEIPHVVNDFRVAARNAIKAGFDGVEIHAANGYLFDQFMKDSTNDRDDSYGGSLENRCRFTAEVMAAVADEVGANRLGVRLSPFADYMDCHDSNPEALALHVIDETLNPLGVLYCHMVEPRMRVNPDDGIMTLEHMLLPFRRAFRGTFIANGGYDREEGNDAIARGRGYADLIAYGRIFLANPDLPMRFAKNAPLNKYDRSTFYTSDPVVGYTDYPFLDQL

SEQ ID NO: 28651 - protein, 370 aa, Zea mays subsp. mays
  peptide (1)..(370): Ceres Seq. ID no. 12352468
  misc_feature (5)..(345): Pfam Name: Pfam Description:  NADH:flavin oxidoreductase / NADH oxidase family
  misc_feature (1)..(370): NCBI GI NO: 23495288 NR Description: 12-oxophytodienoic acid reductase [Oryza sativa]
  misc_feature (1)..(368): NCBI GI NO: 15223138 NR Description: 12-oxophytodienoate reductase
  misc_feature (1)..(368): NCBI GI NO: 21593388 NR Description: 12-oxophytodienoate reductase (OPR1)
  misc_feature (2)..(368): NCBI GI NO: 15223140 NR Description: 12-oxophytodienoate reductase
  misc_feature (2)..(368): NCBI GI NO: 26450549 NR Description: putative 12-oxophytodienoate reductase OPR2
  misc_feature (1)..(368): NCBI GI NO: 2765083 NR Description: 12-oxophytodienoate reductase
  misc_feature (5)..(368): NCBI GI NO: 40645347 NR Description: hypothetical protein [Pisum sativum]
  misc_feature (2)..(368): NCBI GI NO: 40645353 NR Description: hypothetical protein [Pisum sativum]
  misc_feature (1)..(368): NCBI GI NO: 40645459 NR Description: LEDI-5c protein [Lithospermum erythrorhizon]
  misc_feature (5)..(368): NCBI GI NO: 40645345 NR Description: hypothetical protein [Pisum sativum]
MESTPLLTPYKMGDFNLAHRVVLAPLTRCRAFGNVPQPEHMALYYRQRATPGGFLIAEACAVSESARGYPDVPGLWTHQQVVAWKPIVDAVHASGAVFFAQLWHTGRASPSEFQPNGQAPISSTDKQIPAQVNHSGDVNTFAVPRRLETEEIPHVVNDFRVAARNAIKAGFDGVEIHAANGYLFDQFMKDSTNDRDDSYGGSLENRCRFTAEVMAAVADEVGANRLGVRLSPFADYMDCHDSNPEALALHVIDETLNPLGVLYCHMVEPRMRVNPDDGIMTLEHMLLPFRRAFRGTFIANGGYDREEGNDAIARGRGYADLIAYGRIFLANPDLPMRFAKNAPLNKYDRSTFYTSDPVVGYTDYPFLDQL

SEQ ID NO: 28652 - protein, 359 aa, Zea mays subsp. mays
  peptide (1)..(359): Ceres Seq. ID no. 12352469
  misc_feature (1)..(334): Pfam Name: Pfam Description:  NADH:flavin oxidoreductase / NADH oxidase family
  misc_feature (1)..(359): NCBI GI NO: 23495288 NR Description: 12-oxophytodienoic acid reductase [Oryza sativa]
  misc_feature (1)..(357): NCBI GI NO: 15223138 NR Description: 12-oxophytodienoate reductase
  misc_feature (1)..(357): NCBI GI NO: 21593388 NR Description: 12-oxophytodienoate reductase (OPR1)
  misc_feature (1)..(357): NCBI GI NO: 15223140 NR Description: 12-oxophytodienoate reductase
  misc_feature (1)..(357): NCBI GI NO: 26450549 NR Description: putative 12-oxophytodienoate reductase OPR2
  misc_feature (1)..(357): NCBI GI NO: 2765083 NR Description: 12-oxophytodienoate reductase
  misc_feature (1)..(357): NCBI GI NO: 40645347 NR Description: hypothetical protein [Pisum sativum]
  misc_feature (1)..(357): NCBI GI NO: 40645353 NR Description: hypothetical protein [Pisum sativum]
  misc_feature (1)..(357): NCBI GI NO: 40645459 NR Description: LEDI-5c protein [Lithospermum erythrorhizon]
  misc_feature (1)..(357): NCBI GI NO: 40645345 NR Description: hypothetical protein [Pisum sativum]
MGDFNLAHRVVLAPLTRCRAFGNVPQPEHMALYYRQRATPGGFLIAEACAVSESARGYPDVPGLWTHQQVVAWKPIVDAVHASGAVFFAQLWHTGRASPSEFQPNGQAPISSTDKQIPAQVNHSGDVNTFAVPRRLETEEIPHVVNDFRVAARNAIKAGFDGVEIHAANGYLFDQFMKDSTNDRDDSYGGSLENRCRFTAEVMAAVADEVGANRLGVRLSPFADYMDCHDSNPEALALHVIDETLNPLGVLYCHMVEPRMRVNPDDGIMTLEHMLLPFRRAFRGTFIANGGYDREEGNDAIARGRGYADLIAYGRIFLANPDLPMRFAKNAPLNKYDRSTFYTSDPVVGYTDYPFLDQL

SEQ ID NO: 28653 - DNA, 1177 bp, Zea mays subsp. mays
  misc_feature (1)..(1177): Ceres Seq. ID no. 12408979
atagcgtatcacaaatagaatacaaccaatggctagtcgtccgagcacattccgatttgccgtcgtggccgtgctgtcgaccctgccacttgttgccagctctgcctccggccacgagaaccccgagcccgtggtcagggactcgccgcagaacggcaccaacaggaggtacctgtgggcgtcgtcgtcggcgcgaggctacggcggctggtcctccggcggcgcgacgtggtacgggagccctaacggcgccggcaccgacggtggcgcttgtggttatcacggtgacgtcagccagcgcccattcaagtcgatgatcgcggccggcggcccttccctcttcaagaacggcaaaggatgcggcgcatgctaccaaattaggtgcacgggcaacagagcctgctccggccggccagtgaccgtcaccgtcaccgactcgtgccccggcggtgcctgcctcgccgagtcggcgcacttcgacatgagcggcacggccttcggcgccatggccaacaaccgaggcatggccgaccgcctccgctccgccggaatcctcaagatccaatacaggagggtggcctgcaactacaacggcaggaccgtcagcttcaaggtggacgcggggtctaacccgtactacctcgccgttctcatcgagtacgtggccggcgacggcgacatctccgcggcggacatcatgcaagccggctgcgactcgtgggcgccgatgcagcagtcatggggcgccgtgtggcgcgtcaactccaacaacggccagccactccgtgcgcccttctcggtccgcgtcacctcgggctccggcaaggtcctcgtcgtcaggaacgccatccccgccgggtggaccgccgggaggacctaccggtccaccgtgaactacggctactgaggcagtgcgtgcgtgcgtatctcttcttcggtcttgggttttataagtgcgtccggaaaacgcgagaggccgatctggaagaggaggtttaggtatattcgtacgcgttcgatgtaacgacgtcttggtgcctccctccacacagaccgcagtgtgttttccttgtgatgtactaatgtttttatattagtatcggttgctctaacccgacagtaatatcaaacatcacttcatgttattcttctaaaccgataatgatatctttatttg

SEQ ID NO: 28654 - protein, 292 aa, Zea mays subsp. mays
  peptide (1)..(292): Ceres Seq. ID no. 12408980
  misc_feature (192)..(275): Pfam Name: Pfam Description:  Pollen allergen
  misc_feature (1)..(290): NCBI GI NO: 16303229 NR Description: beta-expansin 5 [Oryza sativa]
  misc_feature (1)..(290): NCBI GI NO: 8118428 NR Description: beta-expansin [Oryza sativa]
  misc_feature (61)..(290): NCBI GI NO: 34101047 NR Description: beta-expansin 1 precursor [Hordeum vulgare]
  misc_feature (3)..(290): NCBI GI NO: 16517013 NR Description: beta-expansin [Oryza sativa]
  misc_feature (56)..(290): NCBI GI NO: 21666630 NR Description: beta-expansin [Oryza sativa]
  misc_feature (1)..(290): NCBI GI NO: 40363749 NR Description: putative beta-expansin [Triticum aestivum]
  misc_feature (27)..(290): NCBI GI NO: 14193767 NR Description: beta-expansin 4 [Zea mays]
  misc_feature (56)..(285): NCBI GI NO: 16303233 NR Description: beta-expansin [Oryza sativa]
  misc_feature (56)..(285): NCBI GI NO: 16517017 NR Description: beta-expansin [Oryza sativa]
  misc_feature (52)..(290): NCBI GI NO: 20138423 NR Description: Putative beta-expansin 2 precursor
MASRPSTFRFAVVAVLSTLPLVASSASGHENPEPVVRDSPQNGTNRRYLWASSSARGYGGWSSGGATWYGSPNGAGTDGGACGYHGDVSQRPFKSMIAAGGPSLFKNGKGCGACYQIRCTGNRACSGRPVTVTVTDSCPGGACLAESAHFDMSGTAFGAMANNRGMADRLRSAGILKIQYRRVACNYNGRTVSFKVDAGSNPYYLAVLIEYVAGDGDISAADIMQAGCDSWAPMQQSWGAVWRVNSNNGQPLRAPFSVRVTSGSGKVLVVRNAIPAGWTAGRTYRSTVNYGY

SEQ ID NO: 28655 - protein, 197 aa, Zea mays subsp. mays
  peptide (1)..(197): Ceres Seq. ID no. 12408981
  misc_feature (97)..(180): Pfam Name: Pfam Description:  Pollen allergen
  misc_feature (1)..(195): NCBI GI NO: 16303229 NR Description: beta-expansin 5 [Oryza sativa]
  misc_feature (1)..(195): NCBI GI NO: 8118428 NR Description: beta-expansin [Oryza sativa]
  misc_feature (1)..(195): NCBI GI NO: 34101047 NR Description: beta-expansin 1 precursor [Hordeum vulgare]
  misc_feature (1)..(195): NCBI GI NO: 16517013 NR Description: beta-expansin [Oryza sativa]
  misc_feature (1)..(195): NCBI GI NO: 21666630 NR Description: beta-expansin [Oryza sativa]
  misc_feature (1)..(195): NCBI GI NO: 40363749 NR Description: putative beta-expansin [Triticum aestivum]
  misc_feature (1)..(195): NCBI GI NO: 14193767 NR Description: beta-expansin 4 [Zea mays]
  misc_feature (1)..(190): NCBI GI NO: 16303233 NR Description: beta-expansin [Oryza sativa]
  misc_feature (1)..(190): NCBI GI NO: 16517017 NR Description: beta-expansin [Oryza sativa]
  misc_feature (1)..(195): NCBI GI NO: 20138423 NR Description: Putative beta-expansin 2 precursor
MIAAGGPSLFKNGKGCGACYQIRCTGNRACSGRPVTVTVTDSCPGGACLAESAHFDMSGTAFGAMANNRGMADRLRSAGILKIQYRRVACNYNGRTVSFKVDAGSNPYYLAVLIEYVAGDGDISAADIMQAGCDSWAPMQQSWGAVWRVNSNNGQPLRAPFSVRVTSGSGKVLVVRNAIPAGWTAGRTYRSTVNYGY

SEQ ID NO: 28656 - DNA, 1092 bp, Zea mays subsp. mays
  misc_feature (1)..(1092): Ceres Seq. ID no. 12408975
ctgatggcacaggcacaccaccctcttctcctactaattcttttgctcttcctctcctccactgccattccttcctccaagagaacccagccgaagttctcggccgtcttctacttcggcgactcggttctcgacaccggcaacaacaaccatctccccacggtagctgtggcgaaccatgctccttacggaagggacttcccagggaagaaaccgacggggaggttttccgacggccggcttatcccagacctcctcaacgagaggctgcagctcaaagagttctcgccgccgtttctggacgcaaggctgccgaacaacgatgtcgcgacgggggtgaacttcgcttcggctgggtcaggattcgacgaccagacgtcgcggctgtccaacactctgccgatgtcgaaacaggtggacctcttcgaggactacctgctccggctcagaggcatcgttggggacaaggaggcttccaggatcgttgccagatctctgatctttatcagctcggggaccaacgatttctcacattactaccgttcgccaaagaagaggaagatggagattggtgactaccaggatattgttctccagatggtacaggtttatgtcaaggaattgtatgaccttggggggcgacagttctgtttggcaggccttccgccgtttggctgcacacctatccaaatcacgttgagcggagaccctggcagggcatgtgtggatgagcaaaactgggatgctcatgtctacaactctaaacttcaaagactgcttgcgaagttgcaaggctcactccatgggagcagaattgtgtacgtggacgcatacagagctctcgtggagatcctggagaacccggccaaatatggatttacagagacatcacgaggatgttgtgggactgggctcagagaggtcgctctgttttgcaatgcattcactcctatctgcaaaaatgtgtcatcctatgtattttacgatgctgtgcacccaacagagagggtttacatgttagtaaacgattacatagtcaacgatgttattccacagttttaattaatcaaatacccagataaggttttctcg

SEQ ID NO: 28657 - protein, 353 aa, Zea mays subsp. mays
  peptide (1)..(353): Ceres Seq. ID no. 12408976
  misc_feature (36)..(345): Pfam Name: Pfam Description:  GDSL-like Lipase/Acylhydrolase
  misc_feature (7)..(353): NCBI GI NO: 34907922 NR Description: putative GDSL-motif lipase/hydrolase
  misc_feature (11)..(345): NCBI GI NO: 15217963 NR Description: proline-rich protein, putative
  misc_feature (11)..(345): NCBI GI NO: 25336283 NR Description: hypothetical protein RXF26
  misc_feature (13)..(345): NCBI GI NO: 21592974 NR Description: proline-rich protein, putative
  misc_feature (12)..(345): NCBI GI NO: 15225096 NR Description: putative GDSL-motif lipase/hydrolase
  misc_feature (12)..(343): NCBI GI NO: 21537117 NR Description: putative GDSL-motif lipase/hydrolase
  misc_feature (12)..(345): NCBI GI NO: 15227734 NR Description: putative GDSL-motif lipase/hydrolase
  misc_feature (33)..(349): NCBI GI NO: 18390708 NR Description: expressed protein; protein id: At1g06990
  misc_feature (33)..(349): NCBI GI NO: 25336267 NR Description: hypothetical protein
  misc_feature (11)..(345): NCBI GI NO: 15227723 NR Description: putative GDSL-motif lipase hydrolase
LMAQAHHPLLLLILLLFLSSTAIPSSKRTQPKFSAVFYFGDSVLDTGNNNHLPTVAVANHAPYGRDFPGKKPTGRFSDGRLIPDLLNERLQLKEFSPPFLDARLPNNDVATGVNFASAGSGFDDQTSRLSNTLPMSKQVDLFEDYLLRLRGIVGDKEASRIVARSLIFISSGTNDFSHYYRSPKKRKMEIGDYQDIVLQMVQVYVKELYDLGGRQFCLAGLPPFGCTPIQITLSGDPGRACVDEQNWDAHVYNSKLQRLLAKLQGSLHGSRIVYVDAYRALVEILENPAKYGFTETSRGCCGTGLREVALFCNAFTPICKNVSSYVFYDAVHPTERVYMLVNDYIVNDVIPQF

SEQ ID NO: 28658 - protein, 352 aa, Zea mays subsp. mays
  peptide (1)..(352): Ceres Seq. ID no. 12408977
  misc_feature (35)..(344): Pfam Name: Pfam Description:  GDSL-like Lipase/Acylhydrolase
  misc_feature (6)..(352): NCBI GI NO: 34907922 NR Description: putative GDSL-motif lipase/hydrolase
  misc_feature (10)..(344): NCBI GI NO: 15217963 NR Description: proline-rich protein, putative
  misc_feature (10)..(344): NCBI GI NO: 25336283 NR Description: hypothetical protein RXF26
  misc_feature (12)..(344): NCBI GI NO: 21592974 NR Description: proline-rich protein, putative
  misc_feature (11)..(344): NCBI GI NO: 15225096 NR Description: putative GDSL-motif lipase/hydrolase
  misc_feature (11)..(342): NCBI GI NO: 21537117 NR Description: putative GDSL-motif lipase/hydrolase
  misc_feature (11)..(344): NCBI GI NO: 15227734 NR Description: putative GDSL-motif lipase/hydrolase
  misc_feature (32)..(348): NCBI GI NO: 18390708 NR Description: expressed protein; protein id: At1g06990
  misc_feature (32)..(348): NCBI GI NO: 25336267 NR Description: hypothetical protein
  misc_feature (10)..(344): NCBI GI NO: 15227723 NR Description: putative GDSL-motif lipase hydrolase
MAQAHHPLLLLILLLFLSSTAIPSSKRTQPKFSAVFYFGDSVLDTGNNNHLPTVAVANHAPYGRDFPGKKPTGRFSDGRLIPDLLNERLQLKEFSPPFLDARLPNNDVATGVNFASAGSGFDDQTSRLSNTLPMSKQVDLFEDYLLRLRGIVGDKEASRIVARSLIFISSGTNDFSHYYRSPKKRKMEIGDYQDIVLQMVQVYVKELYDLGGRQFCLAGLPPFGCTPIQITLSGDPGRACVDEQNWDAHVYNSKLQRLLAKLQGSLHGSRIVYVDAYRALVEILENPAKYGFTETSRGCCGTGLREVALFCNAFTPICKNVSSYVFYDAVHPTERVYMLVNDYIVNDVIPQF

SEQ ID NO: 28659 - protein, 219 aa, Zea mays subsp. mays
  peptide (1)..(219): Ceres Seq. ID no. 12408978
  misc_feature (1)..(211): Pfam Name: Pfam Description:  GDSL-like Lipase/Acylhydrolase
  misc_feature (1)..(219): NCBI GI NO: 34907922 NR Description: putative GDSL-motif lipase/hydrolase
  misc_feature (1)..(211): NCBI GI NO: 15217963 NR Description: proline-rich protein, putative
  misc_feature (1)..(211): NCBI GI NO: 25336283 NR Description: hypothetical protein RXF26
  misc_feature (1)..(211): NCBI GI NO: 21592974 NR Description: proline-rich protein, putative
  misc_feature (1)..(211): NCBI GI NO: 15225096 NR Description: putative GDSL-motif lipase/hydrolase
  misc_feature (1)..(209): NCBI GI NO: 21537117 NR Description: putative GDSL-motif lipase/hydrolase
  misc_feature (1)..(211): NCBI GI NO: 15227734 NR Description: putative GDSL-motif lipase/hydrolase
  misc_feature (1)..(215): NCBI GI NO: 18390708 NR Description: expressed protein; protein id: At1g06990
  misc_feature (1)..(215): NCBI GI NO: 25336267 NR Description: hypothetical protein
  misc_feature (1)..(211): NCBI GI NO: 15227723 NR Description: putative GDSL-motif lipase hydrolase
MSKQVDLFEDYLLRLRGIVGDKEASRIVARSLIFISSGTNDFSHYYRSPKKRKMEIGDYQDIVLQMVQVYVKELYDLGGRQFCLAGLPPFGCTPIQITLSGDPGRACVDEQNWDAHVYNSKLQRLLAKLQGSLHGSRIVYVDAYRALVEILENPAKYGFTETSRGCCGTGLREVALFCNAFTPICKNVSSYVFYDAVHPTERVYMLVNDYIVNDVIPQF

SEQ ID NO: 28660 - DNA, 1727 bp, Zea mays subsp. mays
  misc_feature (1)..(1727): Ceres Seq. ID no. 12349196
aacctaaacctcgtctcgcctccttcagtccatcccctcaaccccggcggccaaaagccggcacaccgaagcggcggccatggcggagctaaagcggctgtcagagagccgggacctgacgcggatcgagcgcatcggcgcgcactcccacatccgggggctagggctggactcctccatggaggcgcgcgacgcctcggagggcatggtcgggcagctgcccgcgcgccgcgccgcggggctcatactccagctcatccgccagggcaagatcgccggccgcgccgttctcctcgcgggccagcccggcaccggcaagaccgcgctcgccatgggcatcgccaagtcgctcggcgcggagacgcccttcgcctccgtcgcagcctcggagctcttctcgctcgacctctccaagacggaggcgctcacgcaggccttccgccgcgccatcggcgtgcgcatcaaggaggagacggaaatcatcgagggcgaggtcgtggagatcttgatcgaccgccctttgtcggcctctgccgctggcggcagctcggctgcccctacaggtgctactgcggctggtaagtcggggcggctcacgctgaagaccacggacatggaaacggtgtacgagctcgggggaaagatgattgaggctcttgggaaggagaaggtgcagagcggggatgtgattgcacttgacaaggcctccgggaaggtcaccaagcttggacgctccattgggaggtcgcgggattatgatgccgttggcccgcacaccaagtttgtcaagtgtcctgatggcgagctccagaagcgcaaggagatcgtgcactgtgttaccttacatgagattgatgtcattaatagcaggacacagggttttcttgcactgttcactggtgacaccggtgaaattcgtgcagaggttcgggaacagatcgacacaaaagtcgcagagtggagagaggaaggaaaagctgatattgtccctggtgttctgttcatcgatgaagttcacatgctagacattgagtgcttctccttcctcaaccgagcattggaaaatgacatggctccgatcctagtaatcgcaacaaacagagggatcacatccattcgtgggacaaactaccgctcgccacacgggatcccgccagacttccttgaccggttactgatcatcacgacgcagccctacacggaggatgagatcaggaagatcctggacatccggtgcgatgaggaggatgtggagatgtccgcggacgccaaggtcctgctcaccaaaatcggcgtggagacctcgctgcggtacgccatcaaccttatcacatctgccgcattagcctgccagaggcgcaaggggaaggtggttgacatggaggacattagccgggtgtaccagttgttcctggacgtgaagcggtcgacgcagtacctgatggagtaccagagccagtacatgttcaacgaagtgcccggggaagcagatggagaggacgcgatgcaatcctagatgaacttttcttcaccaggtgtctgtgttagtatgtactgcgtgtctgcgtcgtctatttctggtgcatcttgcttgtttagttgctgttatatcctgacaaggcgtggtgtgtgcgatgggctgcctgtaagctgatttaggtaactatatatgcaattcagatgtatcttagtaaaattcaccccagttggagtgagattgtttgttt

SEQ ID NO: 28661 - protein, 478 aa, Zea mays subsp. mays
  peptide (1)..(478): Ceres Seq. ID no. 12349197
  misc_feature (121)..(447): Pfam Name: Pfam Description:  TIP49 C-terminus
  misc_feature (1)..(477): NCBI GI NO: 15240788 NR Description: RuvB DNA helicase-like protein
  misc_feature (1)..(467): NCBI GI NO: 15229623 NR Description: RuvB DNA helicase - like protein
  misc_feature (1)..(469): NCBI GI NO: 6755382 NR Description: RuvB-like protein 2 [Mus musculus]
  misc_feature (1)..(466): NCBI GI NO: 29126859 NR Description: Similar to RuvB-like protein 2 [Xenopus laevis]
  misc_feature (1)..(469): NCBI GI NO: 5730023 NR Description: RuvB-like 2
  misc_feature (1)..(465): NCBI GI NO: 27819634 NR Description: RuvB-like protein 2 [Danio rerio]
  misc_feature (1)..(475): NCBI GI NO: 17737635 NR Description: reptin CG9750-PA
  misc_feature (1)..(411): NCBI GI NO: 4929561 NR Description: CGI-46 protein [Homo sapiens]
  misc_feature (6)..(478): NCBI GI NO: 23480914 NR Description: Arabidopsis thaliana At5g67630/K9I9_20
  misc_feature (7)..(465): NCBI GI NO: 38105112 NR Description: hypothetical protein MG03173.4
MAELKRLSESRDLTRIERIGAHSHIRGLGLDSSMEARDASEGMVGQLPARRAAGLILQLIRQGKIAGRAVLLAGQPGTGKTALAMGIAKSLGAETPFASVAASELFSLDLSKTEALTQAFRRAIGVRIKEETEIIEGEVVEILIDRPLSASAAGGSSAAPTGATAAGKSGRLTLKTTDMETVYELGGKMIEALGKEKVQSGDVIALDKASGKVTKLGRSIGRSRDYDAVGPHTKFVKCPDGELQKRKEIVHCVTLHEIDVINSRTQGFLALFTGDTGEIRAEVREQIDTKVAEWREEGKADIVPGVLFIDEVHMLDIECFSFLNRALENDMAPILVIATNRGITSIRGTNYRSPHGIPPDFLDRLLIITTQPYTEDEIRKILDIRCDEEDVEMSADAKVLLTKIGVETSLRYAINLITSAALACQRRKGKVVDMEDISRVYQLFLDVKRSTQYLMEYQSQYMFNEVPGEADGEDAMQS

SEQ ID NO: 28662 - protein, 445 aa, Zea mays subsp. mays
  peptide (1)..(445): Ceres Seq. ID no. 12349198
  misc_feature (88)..(414): Pfam Name: Pfam Description:  TIP49 C-terminus
  misc_feature (1)..(444): NCBI GI NO: 15240788 NR Description: RuvB DNA helicase-like protein
  misc_feature (1)..(434): NCBI GI NO: 15229623 NR Description: RuvB DNA helicase - like protein
  misc_feature (1)..(436): NCBI GI NO: 6755382 NR Description: RuvB-like protein 2 [Mus musculus]
  misc_feature (1)..(433): NCBI GI NO: 29126859 NR Description: Similar to RuvB-like protein 2 [Xenopus laevis]
  misc_feature (1)..(436): NCBI GI NO: 5730023 NR Description: RuvB-like 2
  misc_feature (1)..(432): NCBI GI NO: 27819634 NR Description: RuvB-like protein 2 [Danio rerio]
  misc_feature (1)..(442): NCBI GI NO: 17737635 NR Description: reptin CG9750-PA
  misc_feature (1)..(378): NCBI GI NO: 4929561 NR Description: CGI-46 protein [Homo sapiens]
  misc_feature (1)..(445): NCBI GI NO: 23480914 NR Description: Arabidopsis thaliana At5g67630/K9I9_20
  misc_feature (1)..(432): NCBI GI NO: 38105112 NR Description: hypothetical protein MG03173.4
MEARDASEGMVGQLPARRAAGLILQLIRQGKIAGRAVLLAGQPGTGKTALAMGIAKSLGAETPFASVAASELFSLDLSKTEALTQAFRRAIGVRIKEETEIIEGEVVEILIDRPLSASAAGGSSAAPTGATAAGKSGRLTLKTTDMETVYELGGKMIEALGKEKVQSGDVIALDKASGKVTKLGRSIGRSRDYDAVGPHTKFVKCPDGELQKRKEIVHCVTLHEIDVINSRTQGFLALFTGDTGEIRAEVREQIDTKVAEWREEGKADIVPGVLFIDEVHMLDIECFSFLNRALENDMAPILVIATNRGITSIRGTNYRSPHGIPPDFLDRLLIITTQPYTEDEIRKILDIRCDEEDVEMSADAKVLLTKIGVETSLRYAINLITSAALACQRRKGKVVDMEDISRVYQLFLDVKRSTQYLMEYQSQYMFNEVPGEADGEDAMQS

SEQ ID NO: 28663 - protein, 436 aa, Zea mays subsp. mays
  peptide (1)..(436): Ceres Seq. ID no. 12349199
  misc_feature (79)..(405): Pfam Name: Pfam Description:  TIP49 C-terminus
  misc_feature (1)..(435): NCBI GI NO: 15240788 NR Description: RuvB DNA helicase-like protein
  misc_feature (1)..(425): NCBI GI NO: 15229623 NR Description: RuvB DNA helicase - like protein
  misc_feature (1)..(427): NCBI GI NO: 6755382 NR Description: RuvB-like protein 2 [Mus musculus]
  misc_feature (1)..(424): NCBI GI NO: 29126859 NR Description: Similar to RuvB-like protein 2 [Xenopus laevis]
  misc_feature (1)..(427): NCBI GI NO: 5730023 NR Description: RuvB-like 2
  misc_feature (1)..(423): NCBI GI NO: 27819634 NR Description: RuvB-like protein 2 [Danio rerio]
  misc_feature (1)..(433): NCBI GI NO: 17737635 NR Description: reptin CG9750-PA
  misc_feature (1)..(369): NCBI GI NO: 4929561 NR Description: CGI-46 protein [Homo sapiens]
  misc_feature (1)..(436): NCBI GI NO: 23480914 NR Description: Arabidopsis thaliana At5g67630/K9I9_20
  misc_feature (1)..(423): NCBI GI NO: 38105112 NR Description: hypothetical protein MG03173.4
MVGQLPARRAAGLILQLIRQGKIAGRAVLLAGQPGTGKTALAMGIAKSLGAETPFASVAASELFSLDLSKTEALTQAFRRAIGVRIKEETEIIEGEVVEILIDRPLSASAAGGSSAAPTGATAAGKSGRLTLKTTDMETVYELGGKMIEALGKEKVQSGDVIALDKASGKVTKLGRSIGRSRDYDAVGPHTKFVKCPDGELQKRKEIVHCVTLHEIDVINSRTQGFLALFTGDTGEIRAEVREQIDTKVAEWREEGKADIVPGVLFIDEVHMLDIECFSFLNRALENDMAPILVIATNRGITSIRGTNYRSPHGIPPDFLDRLLIITTQPYTEDEIRKILDIRCDEEDVEMSADAKVLLTKIGVETSLRYAINLITSAALACQRRKGKVVDMEDISRVYQLFLDVKRSTQYLMEYQSQYMFNEVPGEADGEDAMQS

SEQ ID NO: 28664 - DNA, 1743 bp, Zea mays subsp. mays
  misc_feature (1)..(1743): Ceres Seq. ID no. 12353879
aaacccacagagacagccagacaccaggcaactagtgtgtgctctctccagatctttctcgtagtttctcacacgacgacgacgagtccatgtccgccgcggtgatgacggcgccgccctgccacaggcagccgtcccctctcaaccccaactcgagggccacgcagtcgccgatcagcaacggcaagcccaacgcggtctccacgacaaggaggcacctcgccaacctcgaccgcctcctcgtcaagccgccaccgctcccgctcccgctcccgccgcagcccaggaaactgccagccgatgaggtaccaggcgacggggaggccacccccgacgaccgcagcggccacggcgggctcctcaacgcgctgaacctgtccacgtttctgcccttcacgcggaaggcagccgtggacgagatgtccccgagcagcctggcgtacatgcagcgcctcctcacgctctccccgcggctgtcgcccaagggctccatcgcgggcgagtggcggaggtaccacggcgaaggcaggtgggagggcctcctcgacccgctcgaccagaacctgcgccgcgagctcctccgctacggcgacttcgtgcaggccgcgtacacggcgttccactccatgccgtcggcggcggaggcagcctccagcggtcagcagcgcaccctcgtgctcccggaccgctcgtaccacccgacccgcagcctgttcgcctcgtcgtcgctgtccatcccgccgtgggcgcagcggcggtcggcgcccagctggctcacgcagcgcaccagcttcgtcggctacgtcgccgtctgtgaaaacgagcgggaggtccgtcgcatgggccgccgcgacatagccatcgtgctacgtggcaccgccacgtgccccgagtgggccgagaacctccgcgccggcctcgtgccgctcacggcggacgacgacgcgtccgcgcccaaggtggcgaaggggttcctgagcctatacaggacgccaggagaccatgcgcccagcctctcgaccgccatagtggaggaggtgaagcgtctcgtgcaggtgtacaggggggaggagctcagcatcacagtcgtgggccacagccttggcgcgtcgctggccctcctcgccgccgacgagctcagcccctgcctggctgctcaaacagacggcaccgcggaccaccagccgccgccgatcgcggtggtctccttcggaggccccaagaccggaaaccgcgcgttcgcagagcgtctgcagcgcgagcgcggtgtgaacgtcttgcgggtggtgaacgcgggcgacgtggtgacgcgcgtgccggcgccgatcgcgcgggaagggtatgtgcacgcgggtggcgctgagctgagactgcacaacagcgactcgccgtgcctgcgtcccgacgcgggtccagcgtgctgccacgacctggaggcgtacctacaccttctggatgggttcgccggctccgggcggccgttccgccccgacgcgagccgcagcgtggcgcggctgctgacataccagcggcccaacgtgaagcgtgcgtacgtggagcacgcgcggatgctcgggttcgagccggcctcaccgaacgccagcgccaatggcgccaccgccgacggccagtacggctacctggccagccctacatgactctactttgtagctacaaagcaagcaagcaaacatgcatgcatgcaaactccattcttaacaaaggatatggacgtgtttcttg

SEQ ID NO: 28665 - protein, 522 aa, Zea mays subsp. mays
  peptide (1)..(522): Ceres Seq. ID no. 12353880
  misc_feature (1)..(522): NCBI GI NO: 37536870 NR Description: putative lipase
  misc_feature (8)..(522): NCBI GI NO: 14140134 NR Description: lipase-like protein [Oryza sativa]
  misc_feature (71)..(488): NCBI GI NO: 7488220 NR Description: probable triacylglycerol lipase - Arabidopsisthaliana
  misc_feature (71)..(488): NCBI GI NO: 18414755 NR Description: triacylglycerol lipase like protein
  misc_feature (126)..(413): NCBI GI NO: 24898901 NR Description: DAD1 [Brassica rapa]
  misc_feature (130)..(413): NCBI GI NO: 16215706 NR Description: DEFECTIVE IN ANTHER DEHISCENCE1
  misc_feature (418)..(475): NCBI GI NO: 16215706 NR Description: DEFECTIVE IN ANTHER DEHISCENCE1
  misc_feature (418)..(475): NCBI GI NO: 24898901 NR Description: DAD1 [Brassica rapa]
  misc_feature (142)..(413): NCBI GI NO: 15224963 NR Description: putative triacylglycerol lipase
  misc_feature (418)..(475): NCBI GI NO: 15224963 NR Description: putative triacylglycerol lipase
MSAAVMTAPPCHRQPSPLNPNSRATQSPISNGKPNAVSTTRRHLANLDRLLVKPPPLPLPLPPQPRKLPADEVPGDGEATPDDRSGHGGLLNALNLSTFLPFTRKAAVDEMSPSSLAYMQRLLTLSPRLSPKGSIAGEWRRYHGEGRWEGLLDPLDQNLRRELLRYGDFVQAAYTAFHSMPSAAEAASSGQQRTLVLPDRSYHPTRSLFASSSLSIPPWAQRRSAPSWLTQRTSFVGYVAVCENEREVRRMGRRDIAIVLRGTATCPEWAENLRAGLVPLTADDDASAPKVAKGFLSLYRTPGDHAPSLSTAIVEEVKRLVQVYRGEELSITVVGHSLGASLALLAADELSPCLAAQTDGTADHQPPPIAVVSFGGPKTGNRAFAERLQRERGVNVLRVVNAGDVVTRVPAPIAREGYVHAGGAELRLHNSDSPCLRPDAGPACCHDLEAYLHLLDGFAGSGRPFRPDASRSVARLLTYQRPNVKRAYVEHARMLGFEPASPNASANGATADGQYGYLASPT

SEQ ID NO: 28666 - protein, 517 aa, Zea mays subsp. mays
  peptide (1)..(517): Ceres Seq. ID no. 12353881
  misc_feature (1)..(517): NCBI GI NO: 37536870 NR Description: putative lipase
  misc_feature (3)..(517): NCBI GI NO: 14140134 NR Description: lipase-like protein [Oryza sativa]
  misc_feature (66)..(483): NCBI GI NO: 7488220 NR Description: probable triacylglycerol lipase - Arabidopsisthaliana
  misc_feature (66)..(483): NCBI GI NO: 18414755 NR Description: triacylglycerol lipase like protein
  misc_feature (121)..(408): NCBI GI NO: 24898901 NR Description: DAD1 [Brassica rapa]
  misc_feature (125)..(408): NCBI GI NO: 16215706 NR Description: DEFECTIVE IN ANTHER DEHISCENCE1
  misc_feature (413)..(470): NCBI GI NO: 16215706 NR Description: DEFECTIVE IN ANTHER DEHISCENCE1
  misc_feature (413)..(470): NCBI GI NO: 24898901 NR Description: DAD1 [Brassica rapa]
  misc_feature (137)..(408): NCBI GI NO: 15224963 NR Description: putative triacylglycerol lipase
  misc_feature (413)..(470): NCBI GI NO: 15224963 NR Description: putative triacylglycerol lipase
MTAPPCHRQPSPLNPNSRATQSPISNGKPNAVSTTRRHLANLDRLLVKPPPLPLPLPPQPRKLPADEVPGDGEATPDDRSGHGGLLNALNLSTFLPFTRKAAVDEMSPSSLAYMQRLLTLSPRLSPKGSIAGEWRRYHGEGRWEGLLDPLDQNLRRELLRYGDFVQAAYTAFHSMPSAAEAASSGQQRTLVLPDRSYHPTRSLFASSSLSIPPWAQRRSAPSWLTQRTSFVGYVAVCENEREVRRMGRRDIAIVLRGTATCPEWAENLRAGLVPLTADDDASAPKVAKGFLSLYRTPGDHAPSLSTAIVEEVKRLVQVYRGEELSITVVGHSLGASLALLAADELSPCLAAQTDGTADHQPPPIAVVSFGGPKTGNRAFAERLQRERGVNVLRVVNAGDVVTRVPAPIAREGYVHAGGAELRLHNSDSPCLRPDAGPACCHDLEAYLHLLDGFAGSGRPFRPDASRSVARLLTYQRPNVKRAYVEHARMLGFEPASPNASANGATADGQYGYLASPT

SEQ ID NO: 28667 - protein, 412 aa, Zea mays subsp. mays
  peptide (1)..(412): Ceres Seq. ID no. 12353882
  misc_feature (1)..(412): NCBI GI NO: 37536870 NR Description: putative lipase
  misc_feature (1)..(412): NCBI GI NO: 14140134 NR Description: lipase-like protein [Oryza sativa]
  misc_feature (1)..(378): NCBI GI NO: 7488220 NR Description: probable triacylglycerol lipase - Arabidopsisthaliana
  misc_feature (1)..(378): NCBI GI NO: 18414755 NR Description: triacylglycerol lipase like protein
  misc_feature (16)..(303): NCBI GI NO: 24898901 NR Description: DAD1 [Brassica rapa]
  misc_feature (20)..(303): NCBI GI NO: 16215706 NR Description: DEFECTIVE IN ANTHER DEHISCENCE1
  misc_feature (308)..(365): NCBI GI NO: 16215706 NR Description: DEFECTIVE IN ANTHER DEHISCENCE1
  misc_feature (308)..(365): NCBI GI NO: 24898901 NR Description: DAD1 [Brassica rapa]
  misc_feature (32)..(303): NCBI GI NO: 15224963 NR Description: putative triacylglycerol lipase
  misc_feature (308)..(365): NCBI GI NO: 15224963 NR Description: putative triacylglycerol lipase
MSPSSLAYMQRLLTLSPRLSPKGSIAGEWRRYHGEGRWEGLLDPLDQNLRRELLRYGDFVQAAYTAFHSMPSAAEAASSGQQRTLVLPDRSYHPTRSLFASSSLSIPPWAQRRSAPSWLTQRTSFVGYVAVCENEREVRRMGRRDIAIVLRGTATCPEWAENLRAGLVPLTADDDASAPKVAKGFLSLYRTPGDHAPSLSTAIVEEVKRLVQVYRGEELSITVVGHSLGASLALLAADELSPCLAAQTDGTADHQPPPIAVVSFGGPKTGNRAFAERLQRERGVNVLRVVNAGDVVTRVPAPIAREGYVHAGGAELRLHNSDSPCLRPDAGPACCHDLEAYLHLLDGFAGSGRPFRPDASRSVARLLTYQRPNVKRAYVEHARMLGFEPASPNASANGATADGQYGYLASPT

SEQ ID NO: 28668 - DNA, 1353 bp, Zea mays subsp. mays
  misc_feature (1)..(1353): Ceres Seq. ID no. 12402491
acgctcatgactttgaagagtgtcccttggcttgggtccagccttcagacttcagaggcaaaccgccggccggcatgcagtagaggcaggctagctgcaagagagttcatctagctagctagctagtgtgtgtttagggtacctagctagctagcttcaacatatatatcttagttgcacacagagctcaaagaaaggaaccatcgatcgatcggcagggagcggggatggggctgagggagatcgagtccacattgccgccggggttcaggttctatcccagcgacgaggagctggtgtgccactacctctacaagaaggtggccaacgagcgcgccgcgcaggggacgctggtggaggtcgacctgcacgcgcgagagccatgggagcttccagacgcggccaagctgacggcgagcgagtggtacttcttcagcttccgggaccgcaagtacgccacggggtcgcgcaccaaccgcgccaccaagacggggtactggaaggccaccggcaaggaccgcgaggtgcgcagcccggccacccgcgccgtcgtcggcatgaggaagacgctcgtcttctaccagggccgcgcacccaacggcgtcaagtcctgctgggtcatgcacgagttccgcctcgactcgccgcatacgccaccaaaggaggactgggtgctctgcagggtgttccagaagcggaaagacagcgagcaagacaacggcggcggctcctcctcgccgacgacctttgccggcgcgtcgtcgcagggggtcgttctagatctgccggacgaccagcccagcatgacgatggccggcgcgtacgtagcagcggaccaccagccgggctcttccgccgccgtcgggttcgcactgccgccgcatgcgcaggacaacggcctcggcgatggcggcctggacgcgttgctgatgaacggagcgacgatgtggcagtacagctcagcatcggccctcgccgatcacttcccgccggaggaagtgaccgccgcgcccatgatggggctaggctccaggggaggaggaggtgacgggtgcagcttcttctacgacagcggcttcgacgacatggggttcccgcagggatggatgggctgaggaggcaaggcaccaactgcaacaacgccatgggatgatggattctgaaggaaacgattgaattgattccattagtggtagtattgtacagtaggtacgtagtgtgaggttaggttattggaaattattagagtgcacctccccaatccaaaacaacggaatgaaaagtagagcgcatgacgacaattgtatgtatccattcactcctactactatgcttgtacattaattaattagt

SEQ ID NO: 28669 - protein, 295 aa, Zea mays subsp. mays
  peptide (1)..(295): Ceres Seq. ID no. 12402492
  misc_feature (10)..(138): Pfam Name: NAM Pfam Description: No apical meristem
  misc_feature (1)..(215): NCBI GI NO: 32482946 NR Description: OSJNBb0072M01.11
  misc_feature (2)..(288): NCBI GI NO: 37535380 NR Description: putative NAM (no apical meristem) protein
  misc_feature (1)..(164): NCBI GI NO: 18417214 NR Description: NAM / CUC2 -like protein; protein id: At4g28530
  misc_feature (1)..(164): NCBI GI NO: 21593065 NR Description: NAM / CUC2-like protein [Arabidopsis thaliana]
  misc_feature (1)..(220): NCBI GI NO: 15224139 NR Description: NAM
  misc_feature (1)..(278): NCBI GI NO: 11994506 NR Description: contains similarity to NAM
  misc_feature (1)..(254): NCBI GI NO: 15232511 NR Description: NAM-like protein; protein id: At3g15170
  misc_feature (6)..(185): NCBI GI NO: 15148912 NR Description: NAC domain protein NAC1 [Phaseolus vulgaris]
  misc_feature (6)..(277): NCBI GI NO: 40737029 NR Description: putative OsNAC1 protein
  misc_feature (7)..(174): NCBI GI NO: 1279640 NR Description: NAM [Petunia x hybrida]
MGLREIESTLPPGFRFYPSDEELVCHYLYKKVANERAAQGTLVEVDLHAREPWELPDAAKLTASEWYFFSFRDRKYATGSRTNRATKTGYWKATGKDREVRSPATRAVVGMRKTLVFYQGRAPNGVKSCWVMHEFRLDSPHTPPKEDWVLCRVFQKRKDSEQDNGGGSSSPTTFAGASSQGVVLDLPDDQPSMTMAGAYVAADHQPGSSAAVGFALPPHAQDNGLGDGGLDALLMNGATMWQYSSASALADHFPPEEVTAAPMMGLGSRGGGGDGCSFFYDSGFDDMGFPQGWMG

SEQ ID NO: 28670 - protein, 221 aa, Zea mays subsp. mays
  peptide (1)..(221): Ceres Seq. ID no. 12402493
MGASRRGQADGERVVLLQLPGPQVRHGVAHQPRHQDGVLEGHRQGPRGAQPGHPRRRRHEEDARLLPGPRTQRRQVLLGHARVPPRLAAYATKGGLGALQGVPEAERQRARQRRRLLLADDLCRRVVAGGRSRSAGRPAQHDDGRRVRSSGPPAGLFRRRRVRTAAACAGQRPRRWRPGRVADERSDDVAVQLSIGPRRSLPAGGSDRRAHDGARLQGRRR

SEQ ID NO: 28671 - protein, 185 aa, Zea mays subsp. mays
  peptide (1)..(185): Ceres Seq. ID no. 12402494
  misc_feature (1)..(105): NCBI GI NO: 32482946 NR Description: OSJNBb0072M01.11
  misc_feature (1)..(178): NCBI GI NO: 37535380 NR Description: putative NAM (no apical meristem) protein
  misc_feature (1)..(54): NCBI GI NO: 18417214 NR Description: NAM / CUC2 -like protein; protein id: At4g28530
  misc_feature (1)..(54): NCBI GI NO: 21593065 NR Description: NAM / CUC2-like protein [Arabidopsis thaliana]
  misc_feature (1)..(110): NCBI GI NO: 15224139 NR Description: NAM
  misc_feature (1)..(168): NCBI GI NO: 11994506 NR Description: contains similarity to NAM
  misc_feature (1)..(144): NCBI GI NO: 15232511 NR Description: NAM-like protein; protein id: At3g15170
  misc_feature (1)..(75): NCBI GI NO: 15148912 NR Description: NAC domain protein NAC1 [Phaseolus vulgaris]
  misc_feature (1)..(167): NCBI GI NO: 40737029 NR Description: putative OsNAC1 protein
  misc_feature (1)..(64): NCBI GI NO: 1279640 NR Description: NAM [Petunia x hybrida]
MRKTLVFYQGRAPNGVKSCWVMHEFRLDSPHTPPKEDWVLCRVFQKRKDSEQDNGGGSSSPTTFAGASSQGVVLDLPDDQPSMTMAGAYVAADHQPGSSAAVGFALPPHAQDNGLGDGGLDALLMNGATMWQYSSASALADHFPPEEVTAAPMMGLGSRGGGGDGCSFFYDSGFDDMGFPQGWMG

SEQ ID NO: 28672 - DNA, 906 bp, Zea mays subsp. mays
  misc_feature (1)..(906): Ceres Seq. ID no. 12401209
aatgatattcagcttagtattcgtatgcccagtggaaatagactggagatcaaactaacaaaacaagatgttttaaggaaagtgaagaatttcgtggatgaaaaccaaggcaatgggcttggctcatatgacctttctctggtttatcctaaaagagttttctctgaacaagatatggaagcaacactatccgagctgggtattcaaaaccgtcatgcaatgattgttgttccacatcggcagtctggtcaggtatcaaggcgtcactcctcggcatcttatgatatgggtgtcaattcaggtgcggatgatgttggtggcaattcaggtgcggggggatactttggttacctgagaaccgtcctgtcttatgtgaatccactctcctacctgaggggaaataccaactcatcaaatacagagctacagtcaaatgaaggcctgcggcagcttagacatggatctggtccatggagtgagccacggcctcttggcaataggggccatgaagtgactgatgcagactctgcaaacacgctgcgaaggcggcctagaccatttggtgccaatatccacactctggggagcgaggatcatggtccgtctgatgaaagaaatgttttctggaacgggaactcgacagagtttggaggcgacgacagaaaataggttgtggcgtggctggcagggcctgggacgacactatcagacagaatcaaagttgggaatagacagctgaaacaaatgcctcgacaggcttattgaggaataagtattgagattatagtgctgaaataatcgctgaattgtgatgtttacatttgtggaaacatacggtcgctggatccgtatactcgttgtatagtacatagccacagatatattaaatccgaactgcttggttcc

SEQ ID NO: 28673 - protein, 222 aa, Zea mays subsp. mays
  peptide (1)..(222): Ceres Seq. ID no. 12401210
  misc_feature (1)..(78): Pfam Name: Pfam Description:  UBX domain
  misc_feature (1)..(218): NCBI GI NO: 30689298 NR Description: expressed protein [Arabidopsis thaliana]
  misc_feature (1)..(218): NCBI GI NO: 20147205 NR Description: MFL8.1/MFL8.1 [Arabidopsis thaliana]
  misc_feature (1)..(146): NCBI GI NO: 25408846 NR Description: hypothetical protein At2g43210
NDIQLSIRMPSGNRLEIKLTKQDVLRKVKNFVDENQGNGLGSYDLSLVYPKRVFSEQDMEATLSELGIQNRHAMIVVPHRQSGQVSRRHSSASYDMGVNSGADDVGGNSGAGGYFGYLRTVLSYVNPLSYLRGNTNSSNTELQSNEGLRQLRHGSGPWSEPRPLGNRGHEVTDADSANTLRRRPRPFGANIHTLGSEDHGPSDERNVFWNGNSTEFGGDDRK

SEQ ID NO: 28674 - protein, 214 aa, Zea mays subsp. mays
  peptide (1)..(214): Ceres Seq. ID no. 12401211
  misc_feature (1)..(70): Pfam Name: Pfam Description:  UBX domain
  misc_feature (1)..(210): NCBI GI NO: 30689298 NR Description: expressed protein [Arabidopsis thaliana]
  misc_feature (1)..(210): NCBI GI NO: 20147205 NR Description: MFL8.1/MFL8.1 [Arabidopsis thaliana]
  misc_feature (1)..(138): NCBI GI NO: 25408846 NR Description: hypothetical protein At2g43210
MPSGNRLEIKLTKQDVLRKVKNFVDENQGNGLGSYDLSLVYPKRVFSEQDMEATLSELGIQNRHAMIVVPHRQSGQVSRRHSSASYDMGVNSGADDVGGNSGAGGYFGYLRTVLSYVNPLSYLRGNTNSSNTELQSNEGLRQLRHGSGPWSEPRPLGNRGHEVTDADSANTLRRRPRPFGANIHTLGSEDHGPSDERNVFWNGNSTEFGGDDRK

SEQ ID NO: 28675 - protein, 164 aa, Zea mays subsp. mays
  peptide (1)..(164): Ceres Seq. ID no. 12401212
  misc_feature (1)..(160): NCBI GI NO: 30689298 NR Description: expressed protein [Arabidopsis thaliana]
  misc_feature (1)..(160): NCBI GI NO: 20147205 NR Description: MFL8.1/MFL8.1 [Arabidopsis thaliana]
  misc_feature (1)..(88): NCBI GI NO: 25408846 NR Description: hypothetical protein At2g43210
MEATLSELGIQNRHAMIVVPHRQSGQVSRRHSSASYDMGVNSGADDVGGNSGAGGYFGYLRTVLSYVNPLSYLRGNTNSSNTELQSNEGLRQLRHGSGPWSEPRPLGNRGHEVTDADSANTLRRRPRPFGANIHTLGSEDHGPSDERNVFWNGNSTEFGGDDRK

SEQ ID NO: 28676 - DNA, 1107 bp, Zea mays subsp. mays
  misc_feature (1)..(1107): Ceres Seq. ID no. 12412322
accagaaagatagacacgcacgtccgccgtctctgctccggttttcgctgtctcgctgccgtcctaggtttggagccaggtcaccggcgctaggagggcgtgaaatcgagtcgacggtcggcacccggcactcacgcgttctccacctactgctggcgctcctgtgaggcgacgccggaccggccaccccgcatgcgaacagcgcacggaccggccaccggtgtgactcctccatccaaggcttcagctccagaccgagccgccccgccaatcgccgtccgccgaaccaggcctaggaatttgttttcctcatcgaaagttactgcattgtattccatagaaatggctatggggttgattaatgctaatcctataatccatgagaaaaaagaaagacgcatccgacaggcaccagagaccacagatgaaaatgcggcagagtccatagaccagctggaaatatttgatcacattagagatataaaggatccagagcacccatactcactggaacagctgaatgtggtaactgaagactcaattgaactcaatgatgaaagcaatcatgtcagggttattttcaccccaacagtggagcactgcagtatggcaactattattggcctttgcatacgggtgaaacttgtacggagtctccctccttattacaaggtggacataagggttgcccctggatcacacgcaactgaagctgctgtgaataagcaactgaatgacaaagaacgtgttgcggctgcattggaaaacccaaacctactggacatggttgaagagtgcttatcaccaacattcgattgaggtctcagttgttgcacatctgggagccatggtgtttcatgttcagaagccacacaagcttattgccataggaattcactcctgaatattatatctgagggccatggtgtttcatgtgcatgatttttttttttgtcctccgtccctttgagttaatacaattgttatctttttggacatttgttggtgcttgtgacctccctgggcaaagggacctgtaatcagatcttgtgtagtagctttcagagcgtttccagtgccacgccattttgtggctgttgtaccccc

SEQ ID NO: 28677 - protein, 208 aa, Zea mays subsp. mays
  peptide (1)..(208): Ceres Seq. ID no. 12412323
  misc_feature (86)..(165): Pfam Name: Pfam Description:  Domain of unknown function DUF59
  misc_feature (51)..(207): NCBI GI NO: 38347077 NR Description: OSJNBa0006A01.18
  misc_feature (51)..(203): NCBI GI NO: 28973748 NR Description: unknown protein [Arabidopsis thaliana]
  misc_feature (51)..(203): NCBI GI NO: 15221347 NR Description: unknown protein; protein id: At1g68310.1
  misc_feature (90)..(207): NCBI GI NO: 38567963 NR Description: OSJNBa0093F12.4
  misc_feature (51)..(203): NCBI GI NO: 34896898 NR Description: hypothetical protein
  misc_feature (57)..(204): NCBI GI NO: 24662341 NR Description: CG7949-PA [Drosophila melanogaster]
  misc_feature (54)..(204): NCBI GI NO: 21312046 NR Description: RIKEN cDNA 1110019N10 [Mus musculus]
  misc_feature (54)..(204): NCBI GI NO: 27658356 NR Description: similar to RIKEN cDNA 1110019N10
  misc_feature (54)..(204): NCBI GI NO: 7706343 NR Description: CGI-128 protein [Homo sapiens]
  misc_feature (55)..(203): NCBI GI NO: 39586567 NR Description: Hypothetical protein CBG21205
MRTAHGPATGVTPPSKASAPDRAAPPIAVRRTRPRNLFSSSKVTALYSIEMAMGLINANPIIHEKKERRIRQAPETTDENAAESIDQLEIFDHIRDIKDPEHPYSLEQLNVVTEDSIELNDESNHVRVIFTPTVEHCSMATIIGLCIRVKLVRSLPPYYKVDIRVAPGSHATEAAVNKQLNDKERVAAALENPNLLDMVEECLSPTFD

SEQ ID NO: 28678 - protein, 158 aa, Zea mays subsp. mays
  peptide (1)..(158): Ceres Seq. ID no. 12412324
  misc_feature (36)..(115): Pfam Name: Pfam Description:  Domain of unknown function DUF59
  misc_feature (1)..(157): NCBI GI NO: 38347077 NR Description: OSJNBa0006A01.18
  misc_feature (1)..(153): NCBI GI NO: 28973748 NR Description: unknown protein [Arabidopsis thaliana]
  misc_feature (1)..(153): NCBI GI NO: 15221347 NR Description: unknown protein; protein id: At1g68310.1
  misc_feature (40)..(157): NCBI GI NO: 38567963 NR Description: OSJNBa0093F12.4
  misc_feature (1)..(153): NCBI GI NO: 34896898 NR Description: hypothetical protein
  misc_feature (7)..(154): NCBI GI NO: 24662341 NR Description: CG7949-PA [Drosophila melanogaster]
  misc_feature (4)..(154): NCBI GI NO: 21312046 NR Description: RIKEN cDNA 1110019N10 [Mus musculus]
  misc_feature (4)..(154): NCBI GI NO: 27658356 NR Description: similar to RIKEN cDNA 1110019N10
  misc_feature (4)..(154): NCBI GI NO: 7706343 NR Description: CGI-128 protein [Homo sapiens]
  misc_feature (5)..(153): NCBI GI NO: 39586567 NR Description: Hypothetical protein CBG21205
MAMGLINANPIIHEKKERRIRQAPETTDENAAESIDQLEIFDHIRDIKDPEHPYSLEQLNVVTEDSIELNDESNHVRVIFTPTVEHCSMATIIGLCIRVKLVRSLPPYYKVDIRVAPGSHATEAAVNKQLNDKERVAAALENPNLLDMVEECLSPTFD

SEQ ID NO: 28679 - protein, 156 aa, Zea mays subsp. mays
  peptide (1)..(156): Ceres Seq. ID no. 12412325
  misc_feature (34)..(113): Pfam Name: Pfam Description:  Domain of unknown function DUF59
  misc_feature (1)..(155): NCBI GI NO: 38347077 NR Description: OSJNBa0006A01.18
  misc_feature (1)..(151): NCBI GI NO: 28973748 NR Description: unknown protein [Arabidopsis thaliana]
  misc_feature (1)..(151): NCBI GI NO: 15221347 NR Description: unknown protein; protein id: At1g68310.1
  misc_feature (38)..(155): NCBI GI NO: 38567963 NR Description: OSJNBa0093F12.4
  misc_feature (1)..(151): NCBI GI NO: 34896898 NR Description: hypothetical protein
  misc_feature (5)..(152): NCBI GI NO: 24662341 NR Description: CG7949-PA [Drosophila melanogaster]
  misc_feature (2)..(152): NCBI GI NO: 21312046 NR Description: RIKEN cDNA 1110019N10 [Mus musculus]
  misc_feature (2)..(152): NCBI GI NO: 27658356 NR Description: similar to RIKEN cDNA 1110019N10
  misc_feature (2)..(152): NCBI GI NO: 7706343 NR Description: CGI-128 protein [Homo sapiens]
  misc_feature (3)..(151): NCBI GI NO: 39586567 NR Description: Hypothetical protein CBG21205
MGLINANPIIHEKKERRIRQAPETTDENAAESIDQLEIFDHIRDIKDPEHPYSLEQLNVVTEDSIELNDESNHVRVIFTPTVEHCSMATIIGLCIRVKLVRSLPPYYKVDIRVAPGSHATEAAVNKQLNDKERVAAALENPNLLDMVEECLSPTFD

SEQ ID NO: 28680 - DNA, 1701 bp, Zea mays subsp. mays
  misc_feature (1)..(1701): Ceres Seq. ID no. 12412318
ctctctcgtgattctcccgtgccccggtctctgtctctagtggcgacgactgcgctgcgccgccgccctacccaggtgcccaagtgtctatcttcgggactgcgccggcgacgagcacccaccagagattgttggacctgggtctgcccctggattcgagcttggggccaagctaattcgagctctgagcatttgatttctagcatcttacatgcaaaaggctagtacttggaatccgagcaagatctaacccagacagtgcagtggcaggtcttttcagttcagcgcagcatatcaagattgtctctgttaatttgtgtatgagatcagttaactgataaggatatgtaaagaaccaatggtcagtaatttttacactccagattgtagtatcctctaagatggacggaagagaatcagtcttatggtaaatcctggtgaatattcatgggaggtcagcaagttctggcctgactaagtctggtaaaaaaagttgcttcatctcagatcatcaatgattcctggtggatgggcagcacagagaataggaggcagacgtgttctgctactgtcgtttgtattgtggtctatgatatgtggtttaatcccactcgaccccaacagatgggtgccaccgcaggagcgctctcgctcggtatctctcactacctcggggatgtatcttggtgcagctggtggcatgcttttcttcccaagtctggtgaagcacacgggaccccagtcagttttctttgtcgaagcagtgctgggagtagcatggtctgtcatatggttgaaattttccagcgacccacctcgtaccgatcttccaaaggtatcgatgccgaaagtggcatctcgggacatgattaaggcacaagcaggaggggttgttgcacctcgcacagtaaagatcccgtggcgaaggataatattcagtctacctgtttgggcaatcgttgtaaacaacttcaccttccactatgccctgtatgttcttatgaactggctccctacctattttgagcttggcctcaagcttagcctccaggacatgggttcctcaaagatgctcccttatttcaacatgttcattttctccaacatcggtggtgtgatcgccgatcacttgattacaaggaggattctgtctgttaccaagacgaggaagcttctgaacaccatcggattcatcatctcagcatttgcactcatggcccttcctttattcagcacaccctcaggcactgtaacgtgttcggcgatatccctcggttttcttgccctgggaagagcagggtttgccgtaaaccacatggatgttgctccgaagtttgcagggatagtgatgggcgtctctaacacggcggggacactggctgggattgttggtgtcggcctcactggtaatatcctggaggcggcgaaggcttctaacaaggatctaacggactcggaaacctggaaaacagtcttctttgttccggcatacctttgtatcttcagctctgtcatttttttaatcttttcgactggcgaaaagatattcgagtagaggatgattatatttttttgtttctcatttacagtgaggcaggatagcagaacgggaatctcacatgtacccgtagcatttttacaaaatttcatactgtatcatacacatgatctaaagctatgtcaggaaatctcacatttttc

SEQ ID NO: 28681 - protein, 346 aa, Zea mays subsp. mays
  peptide (1)..(346): Ceres Seq. ID no. 12412319
  misc_feature (37)..(345): Pfam Name: and other Pfam Description: Sugar
  misc_feature (37)..(346): NCBI GI NO: 15241475 NR Description: Na+-dependent inorganic phosphate cotransporter-like
  misc_feature (1)..(73): NCBI GI NO: 15241475 NR Description: Na+-dependent inorganic phosphate cotransporter-like
  misc_feature (36)..(346): NCBI GI NO: 30678625 NR Description: expressed protein [Arabidopsis thaliana]
  misc_feature (36)..(346): NCBI GI NO: 15227589 NR Description: putative Na+-dependent inorganic phosphatecotransporter
  misc_feature (36)..(346): NCBI GI NO: 17064976 NR Description: putative Na+-dependent inorganic phosphatecotransporter
  misc_feature (36)..(346): NCBI GI NO: 34903342 NR Description: unnamed protein product
  misc_feature (36)..(343): NCBI GI NO: 23503776 NR Description: SI:PACKT73
  misc_feature (36)..(343): NCBI GI NO: 9945322 NR Description: solute carrier family 17, member 7
  misc_feature (36)..(343): NCBI GI NO: 9966811 NR Description: differentiation-associated Na-dependent inorganicphosphate cotr
  misc_feature (36)..(343): NCBI GI NO: 21322234 NR Description: vesicular glutamate transporter 3 [Homo sapiens]
MIPGGWAAQRIGGRRVLLLSFVLWSMICGLIPLDPNRWVPPQERSRSVSLTTSGMYLGAAGGMLFFPSLVKHTGPQSVFFVEAVLGVAWSVIWLKFSSDPPRTDLPKVSMPKVASRDMIKAQAGGVVAPRTVKIPWRRIIFSLPVWAIVVNNFTFHYALYVLMNWLPTYFELGLKLSLQDMGSSKMLPYFNMFIFSNIGGVIADHLITRRILSVTKTRKLLNTIGFIISAFALMALPLFSTPSGTVTCSAISLGFLALGRAGFAVNHMDVAPKFAGIVMGVSNTAGTLAGIVGVGLTGNILEAAKASNKDLTDSETWKTVFFVPAYLCIFSSVIFLIFSTGEKIFE

SEQ ID NO: 28682 - protein, 321 aa, Zea mays subsp. mays
  peptide (1)..(321): Ceres Seq. ID no. 12412320
  misc_feature (12)..(320): Pfam Name: and other Pfam Description: Sugar
  misc_feature (12)..(321): NCBI GI NO: 15241475 NR Description: Na+-dependent inorganic phosphate cotransporter-like
  misc_feature (1)..(48): NCBI GI NO: 15241475 NR Description: Na+-dependent inorganic phosphate cotransporter-like
  misc_feature (11)..(321): NCBI GI NO: 30678625 NR Description: expressed protein [Arabidopsis thaliana]
  misc_feature (11)..(321): NCBI GI NO: 15227589 NR Description: putative Na+-dependent inorganic phosphatecotransporter
  misc_feature (11)..(321): NCBI GI NO: 17064976 NR Description: putative Na+-dependent inorganic phosphatecotransporter
  misc_feature (11)..(321): NCBI GI NO: 34903342 NR Description: unnamed protein product
  misc_feature (11)..(318): NCBI GI NO: 23503776 NR Description: SI:PACKT73
  misc_feature (11)..(318): NCBI GI NO: 9945322 NR Description: solute carrier family 17, member 7
  misc_feature (11)..(318): NCBI GI NO: 9966811 NR Description: differentiation-associated Na-dependent inorganicphosphate cotr
  misc_feature (11)..(318): NCBI GI NO: 21322234 NR Description: vesicular glutamate transporter 3 [Homo sapiens]
MICGLIPLDPNRWVPPQERSRSVSLTTSGMYLGAAGGMLFFPSLVKHTGPQSVFFVEAVLGVAWSVIWLKFSSDPPRTDLPKVSMPKVASRDMIKAQAGGVVAPRTVKIPWRRIIFSLPVWAIVVNNFTFHYALYVLMNWLPTYFELGLKLSLQDMGSSKMLPYFNMFIFSNIGGVIADHLITRRILSVTKTRKLLNTIGFIISAFALMALPLFSTPSGTVTCSAISLGFLALGRAGFAVNHMDVAPKFAGIVMGVSNTAGTLAGIVGVGLTGNILEAAKASNKDLTDSETWKTVFFVPAYLCIFSSVIFLIFSTGEKIFE

SEQ ID NO: 28683 - protein, 292 aa, Zea mays subsp. mays
  peptide (1)..(292): Ceres Seq. ID no. 12412321
  misc_feature (1)..(291): Pfam Name: and other Pfam Description: Sugar
  misc_feature (1)..(292): NCBI GI NO: 15241475 NR Description: Na+-dependent inorganic phosphate cotransporter-like
  misc_feature (1)..(19): NCBI GI NO: 15241475 NR Description: Na+-dependent inorganic phosphate cotransporter-like
  misc_feature (1)..(292): NCBI GI NO: 30678625 NR Description: expressed protein [Arabidopsis thaliana]
  misc_feature (1)..(292): NCBI GI NO: 15227589 NR Description: putative Na+-dependent inorganic phosphatecotransporter
  misc_feature (1)..(292): NCBI GI NO: 17064976 NR Description: putative Na+-dependent inorganic phosphatecotransporter
  misc_feature (1)..(292): NCBI GI NO: 34903342 NR Description: unnamed protein product
  misc_feature (1)..(289): NCBI GI NO: 23503776 NR Description: SI:PACKT73
  misc_feature (1)..(289): NCBI GI NO: 9945322 NR Description: solute carrier family 17, member 7
  misc_feature (1)..(289): NCBI GI NO: 9966811 NR Description: differentiation-associated Na-dependent inorganicphosphate cotr
  misc_feature (1)..(289): NCBI GI NO: 21322234 NR Description: vesicular glutamate transporter 3 [Homo sapiens]
MYLGAAGGMLFFPSLVKHTGPQSVFFVEAVLGVAWSVIWLKFSSDPPRTDLPKVSMPKVASRDMIKAQAGGVVAPRTVKIPWRRIIFSLPVWAIVVNNFTFHYALYVLMNWLPTYFELGLKLSLQDMGSSKMLPYFNMFIFSNIGGVIADHLITRRILSVTKTRKLLNTIGFIISAFALMALPLFSTPSGTVTCSAISLGFLALGRAGFAVNHMDVAPKFAGIVMGVSNTAGTLAGIVGVGLTGNILEAAKASNKDLTDSETWKTVFFVPAYLCIFSSVIFLIFSTGEKIFE

SEQ ID NO: 28684 - DNA, 1248 bp, Zea mays subsp. mays
  misc_feature (1)..(1248): Ceres Seq. ID no. 12412314
ctccatccccaatctcgggccttgactccttgagcacagcacaccgagtccaagccccgaagcctcctgaccttggttactgggtagcttctgcttggtactccatgcgaggacgacaatggcgatcgccgccgtccccgcctccctccccttcgtcctcctccctccgaggctgttccgcgggagggcggtgaggtggccgcgcccgattagggcttcggcgtcgaccaacgccgggtgacgttgcaggcggagagcggaagtttggggctctggtgagcagggtgggagatctgagggcgctcgtagcctccgtgcctcctgctgttgcttcgatgcagaaaaacattggcccaaattttgttgctggtttctgtgttagcatggcatttgtggctgctgctgcaagacagatctccttaagaagtcgagagcatgttagtaaaggttctgttgctgatcttgtaaggcgtggccagttaaaatcagggcaacgagggattgcaaagctccgtacatacgatgatcctttcaataacccgttagtaaagattgatgagggtacatctactgcacaaatgtttggcaaggagtaccgtttggctcctgttaggcttacgaaagagcagcaagaaatgcaccagaacaggagatcgcgtgcatatcagtggaaaaggccaaccgtgtttctcagggaaggtgattccttacctccagatgttgatccggatacagttagatggattccagcaaaccatcccttttctgctgcttcaagtgaagtggatgaggagaccgccaaacaaaatgtctaccaaaaggatggcatcccatcccgtgtcaaggctgagcatgaagctttgcgggcaaggctagaggcctcaaacgatgttgccagactcccttcggatccaaggagtattcagcgtaatgagagaccaatgagattgtcaggcgagccatctgaacatcttcagagctccaagtttgagaaccaagatagacaactggctactgagtctggtaaacatagctctgatggatgtttacaatcaaacgagccggaagggcaataaaaacgtgtgtatttcagctcttcgaagatatttgctttgttacgtagtgttatcagcttttaggttgtagctgtagatagagaagttttggaacagtgagcttatacggcttactggtttacatagtgagcagttaatatgcgagttgcttgacgtgttgggatcgaatggt

SEQ ID NO: 28685 - protein, 246 aa, Zea mays subsp. mays
  peptide (1)..(246): Ceres Seq. ID no. 12412315
  misc_feature (1)..(234): NCBI GI NO: 15218043 NR Description: hypothetical protein; protein id: At1g20830.1
  misc_feature (1)..(234): NCBI GI NO: 25373024 NR Description: protein F2D10.35 [imported] - Arabidopsis thaliana
MQKNIGPNFVAGFCVSMAFVAAAARQISLRSREHVSKGSVADLVRRGQLKSGQRGIAKLRTYDDPFNNPLVKIDEGTSTAQMFGKEYRLAPVRLTKEQQEMHQNRRSRAYQWKRPTVFLREGDSLPPDVDPDTVRWIPANHPFSAASSEVDEETAKQNVYQKDGIPSRVKAEHEALRARLEASNDVARLPSDPRSIQRNERPMRLSGEPSEHLQSSKFENQDRQLATESGKHSSDGCLQSNEPEGQ

SEQ ID NO: 28686 - protein, 230 aa, Zea mays subsp. mays
  peptide (1)..(230): Ceres Seq. ID no. 12412316
  misc_feature (1)..(218): NCBI GI NO: 15218043 NR Description: hypothetical protein; protein id: At1g20830.1
  misc_feature (1)..(218): NCBI GI NO: 25373024 NR Description: protein F2D10.35 [imported] - Arabidopsis thaliana
MAFVAAAARQISLRSREHVSKGSVADLVRRGQLKSGQRGIAKLRTYDDPFNNPLVKIDEGTSTAQMFGKEYRLAPVRLTKEQQEMHQNRRSRAYQWKRPTVFLREGDSLPPDVDPDTVRWIPANHPFSAASSEVDEETAKQNVYQKDGIPSRVKAEHEALRARLEASNDVARLPSDPRSIQRNERPMRLSGEPSEHLQSSKFENQDRQLATESGKHSSDGCLQSNEPEGQ

SEQ ID NO: 28687 - protein, 165 aa, Zea mays subsp. mays
  peptide (1)..(165): Ceres Seq. ID no. 12412317
  misc_feature (1)..(153): NCBI GI NO: 15218043 NR Description: hypothetical protein; protein id: At1g20830.1
  misc_feature (1)..(153): NCBI GI NO: 25373024 NR Description: protein F2D10.35 [imported] - Arabidopsis thaliana
MFGKEYRLAPVRLTKEQQEMHQNRRSRAYQWKRPTVFLREGDSLPPDVDPDTVRWIPANHPFSAASSEVDEETAKQNVYQKDGIPSRVKAEHEALRARLEASNDVARLPSDPRSIQRNERPMRLSGEPSEHLQSSKFENQDRQLATESGKHSSDGCLQSNEPEGQ

SEQ ID NO: 28688 - DNA, 1069 bp, Zea mays subsp. mays
  misc_feature (1)..(1069): Ceres Seq. ID no. 12408967
tccaagacccgcacgcgaacgccctccctgccgctccgccgtttcgcgtgggagtcgtttcgaaaaagtctgtttcgcgagcggtgaggactgaggagtgtggaggcctaaaaccatggcggcgagcatcgggatcatggacggcgcctacttcgtcggcaggggcgagatcctgcactggatcaatgcgaccctccagctctccctcgccaaggtcgaggaggcagcgtctggcgcagtgcagtgccagctcatggatatggttcaccctggagtgggtgcccatgcataaggtcaatttcgatgcgaagacagaatatgacatgatccagaactacaaggttcttcaggacgtgttcaacaagctgcggataggcaagaatattgaggtcaacaagcttgttaaaggacggccattggacaacttggagttccttcagtggttgaaaagatattgtgattctgtgaatggtggaattatgaacgaaaattacaaccctgtagaaaggaggtcaaagggatgcaaagaacgtgtctcaaagggttccaataagccatctaaatcattgcaagccaataggctttctggtgctgatccaacagatggaggccatggagttgggaaagtatgtaacactttttctgaagagcattacatagaacagattcagaagttgtctgaaaagattgcagacctgaaagtttctgtcgatagtactgaaaaagaaagagacttctacttctcgaagttgcgtgatattgagatactgtgtcaacggcctgagttagagcatctaccgatgactaaggcggtccggaagatactttatgcagctgatgcaaaggattcaccgctacctgaggcgaatgatataatcacaaagtcaccaagcttgttctcaaatgaaaccgagtgagatgtgcggctacatgagctaattttccatgattgatcgtcttagttctgagtctgtaaatgcgtaaaataacatttgacacaagtctttttgctgtcaaaaacagttttcctgtaagaacttgagtggggttaagtagttattacgcattc

SEQ ID NO: 28689 - protein, 304 aa, Zea mays subsp. mays
  peptide (1)..(304): Ceres Seq. ID no. 12408968
  misc_feature (240)..(285): Pfam Name: Pfam Description:  EB1-like C-terminal motif
  misc_feature (93)..(302): NCBI GI NO: 38344911 NR Description: OSJNBb0079B02.14
  misc_feature (93)..(304): NCBI GI NO: 32815913 NR Description: At3g47690 [Arabidopsis thaliana]
  misc_feature (93)..(304): NCBI GI NO: 15241860 NR Description: microtubule-associated protein EB1-like protein
  misc_feature (93)..(294): NCBI GI NO: 37535740 NR Description: putative microtubule-associated protein
  misc_feature (93)..(194): NCBI GI NO: 26450360 NR Description: putative microtubule-associated protein EB1
  misc_feature (93)..(200): NCBI GI NO: 15240262 NR Description: putative protein; protein id: At5g67270
  misc_feature (93)..(282): NCBI GI NO: 29124955 NR Description: microtubule-associated protein EB1
  misc_feature (93)..(291): NCBI GI NO: 12751131 NR Description: EBF3-S [Homo sapiens]
  misc_feature (228)..(304): NCBI GI NO: 30692915 NR Description: expressed protein [Arabidopsis thaliana]
  misc_feature (93)..(279): NCBI GI NO: 33946394 NR Description: EB1 [Coturnix coturnix]
QDPHANALPAAPPFRVGVVSKKSVSRAVRTEECGGLKPWRRASGSWTAPTSSAGARSCTGSMRPSSSPSPRSRRQRLAQCSASSWIWFTLEWVPMHKVNFDAKTEYDMIQNYKVLQDVFNKLRIGKNIEVNKLVKGRPLDNLEFLQWLKRYCDSVNGGIMNENYNPVERRSKGCKERVSKGSNKPSKSLQANRLSGADPTDGGHGVGKVCNTFSEEHYIEQIQKLSEKIADLKVSVDSTEKERDFYFSKLRDIEILCQRPELEHLPMTKAVRKILYAADAKDSPLPEANDIITKSPSLFSNETE

SEQ ID NO: 28690 - protein, 243 aa, Zea mays subsp. mays
  peptide (1)..(243): Ceres Seq. ID no. 12408969
  misc_feature (179)..(224): Pfam Name: Pfam Description:  EB1-like C-terminal motif
  misc_feature (32)..(241): NCBI GI NO: 38344911 NR Description: OSJNBb0079B02.14
  misc_feature (32)..(243): NCBI GI NO: 32815913 NR Description: At3g47690 [Arabidopsis thaliana]
  misc_feature (32)..(243): NCBI GI NO: 15241860 NR Description: microtubule-associated protein EB1-like protein
  misc_feature (32)..(233): NCBI GI NO: 37535740 NR Description: putative microtubule-associated protein
  misc_feature (32)..(133): NCBI GI NO: 26450360 NR Description: putative microtubule-associated protein EB1
  misc_feature (32)..(139): NCBI GI NO: 15240262 NR Description: putative protein; protein id: At5g67270
  misc_feature (32)..(221): NCBI GI NO: 29124955 NR Description: microtubule-associated protein EB1
  misc_feature (32)..(230): NCBI GI NO: 12751131 NR Description: EBF3-S [Homo sapiens]
  misc_feature (167)..(243): NCBI GI NO: 30692915 NR Description: expressed protein [Arabidopsis thaliana]
  misc_feature (32)..(218): NCBI GI NO: 33946394 NR Description: EB1 [Coturnix coturnix]
MRPSSSPSPRSRRQRLAQCSASSWIWFTLEWVPMHKVNFDAKTEYDMIQNYKVLQDVFNKLRIGKNIEVNKLVKGRPLDNLEFLQWLKRYCDSVNGGIMNENYNPVERRSKGCKERVSKGSNKPSKSLQANRLSGADPTDGGHGVGKVCNTFSEEHYIEQIQKLSEKIADLKVSVDSTEKERDFYFSKLRDIEILCQRPELEHLPMTKAVRKILYAADAKDSPLPEANDIITKSPSLFSNETE

SEQ ID NO: 28691 - protein, 210 aa, Zea mays subsp. mays
  peptide (1)..(210): Ceres Seq. ID no. 12408970
  misc_feature (146)..(191): Pfam Name: Pfam Description:  EB1-like C-terminal motif
  misc_feature (1)..(208): NCBI GI NO: 38344911 NR Description: OSJNBb0079B02.14
  misc_feature (1)..(210): NCBI GI NO: 32815913 NR Description: At3g47690 [Arabidopsis thaliana]
  misc_feature (1)..(210): NCBI GI NO: 15241860 NR Description: microtubule-associated protein EB1-like protein
  misc_feature (1)..(200): NCBI GI NO: 37535740 NR Description: putative microtubule-associated protein
  misc_feature (1)..(100): NCBI GI NO: 26450360 NR Description: putative microtubule-associated protein EB1
  misc_feature (1)..(106): NCBI GI NO: 15240262 NR Description: putative protein; protein id: At5g67270
  misc_feature (1)..(188): NCBI GI NO: 29124955 NR Description: microtubule-associated protein EB1
  misc_feature (1)..(197): NCBI GI NO: 12751131 NR Description: EBF3-S [Homo sapiens]
  misc_feature (134)..(210): NCBI GI NO: 30692915 NR Description: expressed protein [Arabidopsis thaliana]
  misc_feature (1)..(185): NCBI GI NO: 33946394 NR Description: EB1 [Coturnix coturnix]
MHKVNFDAKTEYDMIQNYKVLQDVFNKLRIGKNIEVNKLVKGRPLDNLEFLQWLKRYCDSVNGGIMNENYNPVERRSKGCKERVSKGSNKPSKSLQANRLSGADPTDGGHGVGKVCNTFSEEHYIEQIQKLSEKIADLKVSVDSTEKERDFYFSKLRDIEILCQRPELEHLPMTKAVRKILYAADAKDSPLPEANDIITKSPSLFSNETE

SEQ ID NO: 28692 - DNA, 1233 bp, Zea mays subsp. mays; identical to SEQ ID NO: 24242
  misc_feature (1)..(1233): Ceres Seq. ID no. 13564187

SEQ ID NO: 28693 - protein, 267 aa, Zea mays subsp. mays; identical to SEQ ID NO: 24243
  peptide (1)..(267): Ceres Seq. ID no. 13564188
  misc_feature (1)..(267): NCBI GI NO: 11385533 NR Description: glutathione S-transferase GST 41 [Zea mays]
  misc_feature (18)..(235): NCBI GI NO: 23978432 NR Description: glutathione S-transferase [Cucurbita maxima]
  misc_feature (12)..(235): NCBI GI NO: 11385523 NR Description: glutathione S-transferase GST 36 [Zea mays]
  misc_feature (20)..(235): NCBI GI NO: 11385497 NR Description: glutathione S-transferase GST 23 [Zea mays]
  misc_feature (18)..(235): NCBI GI NO: 15430731 NR Description: putative glutathione S-transferase OsGSTU17
  misc_feature (15)..(226): NCBI GI NO: 4468798 NR Description: GST7 protein [Zea mays]
  misc_feature (18)..(226): NCBI GI NO: 11385441 NR Description: glutathione S-transferase GST 13 [Glycine max]
  misc_feature (16)..(243): NCBI GI NO: 37536280 NR Description: putative glutathione S-transferase
  misc_feature (11)..(234): NCBI GI NO: 11177837 NR Description: putative glutathione S-transferase OsGSTU2
  misc_feature (12)..(234): NCBI GI NO: 37536338 NR Description: putative glutathione S-transferase

SEQ ID NO: 28694 - protein, 251 aa, Zea mays subsp. mays; identical to SEQ ID NO: 24244
  peptide (1)..(251): Ceres Seq. ID no. 13564189
  misc_feature (1)..(251): NCBI GI NO: 11385533 NR Description: glutathione S-transferase GST 41 [Zea mays]
  misc_feature (2)..(219): NCBI GI NO: 23978432 NR Description: glutathione S-transferase [Cucurbita maxima]
  misc_feature (1)..(219): NCBI GI NO: 11385523 NR Description: glutathione S-transferase GST 36 [Zea mays]
  misc_feature (4)..(219): NCBI GI NO: 11385497 NR Description: glutathione S-transferase GST 23 [Zea mays]
  misc_feature (2)..(219): NCBI GI NO: 15430731 NR Description: putative glutathione S-transferase OsGSTU17
  misc_feature (1)..(210): NCBI GI NO: 4468798 NR Description: GST7 protein [Zea mays]
  misc_feature (2)..(210): NCBI GI NO: 11385441 NR Description: glutathione S-transferase GST 13 [Glycine max]
  misc_feature (1)..(227): NCBI GI NO: 37536280 NR Description: putative glutathione S-transferase
  misc_feature (1)..(218): NCBI GI NO: 11177837 NR Description: putative glutathione S-transferase OsGSTU2
  misc_feature (1)..(218): NCBI GI NO: 37536338 NR Description: putative glutathione S-transferase

SEQ ID NO: 28695 - DNA, 1356 bp, Zea mays subsp. mays
  misc_feature (1)..(1356): Ceres Seq. ID no. 12344215
ctcagctcggtggaggccctcaagtccgacgcgctccgttcccctttccctttccgaagcttctcgaccccccatcccctccctgacatggccgacaacgcgaaggccgcggcggcgcatgcgaggccggagtcgtcgcaggaggaggaggaggactggaaggaggccgagggggacgtcgccgaagtcgaccgcgccgctaccaatggcgccggcgaggggggcgtgcccacagacaggccgatccgggtctacgccgacggcatctacgacctcttccacttcggccacgccaagtcgctggagcaggccaagaagtcgtttccaaacacatatcttcttgttggatgctgcaatgatgagttgacacataaattcaaaggaagaactgttatgactgaggatgagcgatatgagtcacttcgtcattgcaagtgggttgatgaagtcattccagatgctccatgggtggtgacagaagagttcttggataagcataacattgattttgttgctcatgattctctgccgtatgctgatgctagtggagctggtaacgatgtttatgaacatgtaaaaaagcttggtaagtttaaggagactcagcgcactgatgggatatcaacatcggacattataatgcggattgttaaagattataatgagtatgttatgcggaatctggccaggggctacactagaaaggatcttggtgttagttatgtcaaggaaaaacgactgcgagtgaacatgggacttaaaaacctgcgtgacagagtgaaacagcaccaagaaaaagtaggggagaagtggagcacggttgcaaaactccaggaagagtgggtggaaaatgcagaccgctgggtggctggtttcttagagaagtttgaggaagggtgccactcaatggggacagccatcaaggagaggatccaggagaggctcatcaaggcacaatccagcgactttggcagcctcctacagtacgacagctacgattctgatgaagccaaagaaaacgacgaggacgaagacgaagatgaactctttgaagacgtcaaggaatagcacctccgtacatatacaatggttttgtagctgcaaattgtgttgtgagtcagttgcctctctctggttggtgatctttatatatggtctcaaaggtaggtcaggttgcaatgtttgtagctgctcttggtgtttgttcaggcaacgcatggttgtaaaagctgtggaaagactcttgtgcagtcaaggatacagattccgatggttacctttgggttagaacatatacggctgtaaaattggaagtcgaggtggttaaaactctgatatcttgtctgttttctttcc

SEQ ID NO: 28696 - protein, 355 aa, Zea mays subsp. mays
  peptide (1)..(355): Ceres Seq. ID no. 12344216
  misc_feature (56)..(355): NCBI GI NO: 7488484 NR Description: probable choline-phosphate cytidylyltransferase
  misc_feature (69)..(355): NCBI GI NO: 7488483 NR Description: probable choline-phosphate cytidylyltransferase
  misc_feature (66)..(355): NCBI GI NO: 15225218 NR Description: putative phospholipid cytidylyltransferase
  misc_feature (73)..(355): NCBI GI NO: 7488446 NR Description: choline-phosphate cytidylyltransferase (EC2
  misc_feature (79)..(352): NCBI GI NO: 7488791 NR Description: choline-phosphate cytidylyltransferase (EC2
  misc_feature (73)..(355): NCBI GI NO: 7488485 NR Description: probable choline-phosphate cytidylyltransferase
  misc_feature (58)..(355): NCBI GI NO: 1236978 NR Description: CTP:phosphocholine cytidylyltransferase
  misc_feature (71)..(348): NCBI GI NO: 21668498 NR Description: CTP:phosphorylcholine cytidylyltransferase
  misc_feature (78)..(328): NCBI GI NO: 37537166 NR Description: putative cholinephosphate cytidylyltransferase
  misc_feature (75)..(320): NCBI GI NO: 3153239 NR Description: CTP:phosphocholine cytidylyltransferase b
LSSVEALKSDALRSPFPFRSFSTPHPLPDMADNAKAAAAHARPESSQEEEEDWKEAEGDVAEVDRAATNGAGEGGVPTDRPIRVYADGIYDLFHFGHAKSLEQAKKSFPNTYLLVGCCNDELTHKFKGRTVMTEDERYESLRHCKWVDEVIPDAPWVVTEEFLDKHNIDFVAHDSLPYADASGAGNDVYEHVKKLGKFKETQRTDGISTSDIIMRIVKDYNEYVMRNLARGYTRKDLGVSYVKEKRLRVNMGLKNLRDRVKQHQEKVGEKWSTVAKLQEEWVENADRWVAGFLEKFEEGCHSMGTAIKERIQERLIKAQSSDFGSLLQYDSYDSDEAKENDEDEDEDELFEDVKE

SEQ ID NO: 28697 - protein, 326 aa, Zea mays subsp. mays
  peptide (1)..(326): Ceres Seq. ID no. 12344217
  misc_feature (27)..(326): NCBI GI NO: 7488484 NR Description: probable choline-phosphate cytidylyltransferase
  misc_feature (40)..(326): NCBI GI NO: 7488483 NR Description: probable choline-phosphate cytidylyltransferase
  misc_feature (37)..(326): NCBI GI NO: 15225218 NR Description: putative phospholipid cytidylyltransferase
  misc_feature (44)..(326): NCBI GI NO: 7488446 NR Description: choline-phosphate cytidylyltransferase (EC2
  misc_feature (50)..(323): NCBI GI NO: 7488791 NR Description: choline-phosphate cytidylyltransferase (EC2
  misc_feature (44)..(326): NCBI GI NO: 7488485 NR Description: probable choline-phosphate cytidylyltransferase
  misc_feature (29)..(326): NCBI GI NO: 1236978 NR Description: CTP:phosphocholine cytidylyltransferase
  misc_feature (42)..(319): NCBI GI NO: 21668498 NR Description: CTP:phosphorylcholine cytidylyltransferase
  misc_feature (49)..(299): NCBI GI NO: 37537166 NR Description: putative cholinephosphate cytidylyltransferase
  misc_feature (46)..(291): NCBI GI NO: 3153239 NR Description: CTP:phosphocholine cytidylyltransferase b
MADNAKAAAAHARPESSQEEEEDWKEAEGDVAEVDRAATNGAGEGGVPTDRPIRVYADGIYDLFHFGHAKSLEQAKKSFPNTYLLVGCCNDELTHKFKGRTVMTEDERYESLRHCKWVDEVIPDAPWVVTEEFLDKHNIDFVAHDSLPYADASGAGNDVYEHVKKLGKFKETQRTDGISTSDIIMRIVKDYNEYVMRNLARGYTRKDLGVSYVKEKRLRVNMGLKNLRDRVKQHQEKVGEKWSTVAKLQEEWVENADRWVAGFLEKFEEGCHSMGTAIKERIQERLIKAQSSDFGSLLQYDSYDSDEAKENDEDEDEDELFEDVKE

SEQ ID NO: 28698 - protein, 224 aa, Zea mays subsp. mays
  peptide (1)..(224): Ceres Seq. ID no. 12344218
  misc_feature (1)..(224): NCBI GI NO: 7488484 NR Description: probable choline-phosphate cytidylyltransferase
  misc_feature (1)..(224): NCBI GI NO: 7488483 NR Description: probable choline-phosphate cytidylyltransferase
  misc_feature (1)..(224): NCBI GI NO: 15225218 NR Description: putative phospholipid cytidylyltransferase
  misc_feature (1)..(224): NCBI GI NO: 7488446 NR Description: choline-phosphate cytidylyltransferase (EC2
  misc_feature (1)..(221): NCBI GI NO: 7488791 NR Description: choline-phosphate cytidylyltransferase (EC2
  misc_feature (1)..(224): NCBI GI NO: 7488485 NR Description: probable choline-phosphate cytidylyltransferase
  misc_feature (1)..(224): NCBI GI NO: 1236978 NR Description: CTP:phosphocholine cytidylyltransferase
  misc_feature (1)..(217): NCBI GI NO: 21668498 NR Description: CTP:phosphorylcholine cytidylyltransferase
  misc_feature (1)..(197): NCBI GI NO: 37537166 NR Description: putative cholinephosphate cytidylyltransferase
  misc_feature (1)..(189): NCBI GI NO: 3153239 NR Description: CTP:phosphocholine cytidylyltransferase b
MTEDERYESLRHCKWVDEVIPDAPWVVTEEFLDKHNIDFVAHDSLPYADASGAGNDVYEHVKKLGKFKETQRTDGISTSDIIMRIVKDYNEYVMRNLARGYTRKDLGVSYVKEKRLRVNMGLKNLRDRVKQHQEKVGEKWSTVAKLQEEWVENADRWVAGFLEKFEEGCHSMGTAIKERIQERLIKAQSSDFGSLLQYDSYDSDEAKENDEDEDEDELFEDVKE

SEQ ID NO: 28699 - DNA, 1596 bp, Zea mays subsp. mays
  misc_feature (1)..(1596): Ceres Seq. ID no. 12405494
gaccgtgctggaaacttctaaccaaaacccctaatgtctcgaggtggcgcaccccaacaaactggctccgcctccttcctcctcccctccggcctccgccgctgccttcttttccccgtgcgcatagtcgctcgcagaggcgccgacatcacttcgtccggaccggaaacacgcacgaagtgaggaccagcaccaaacaccgcgccgcttctcctatatttgttcctctcccggagccgcatcgtgtgtaagcgtgtggcggatccatggcagcggcggcggatacctcggaggcgtccgcggcaggaatcgcgctcgcagaggccaatatcaactgggagaggttggacaagacgaggtttcatgtgattggagctatcctgttcacggcccagcaaggtgctctgcacccaacagctgttgtgaagactaggatgcaggttgctgaaggtgggcttgcacatatgtctgggtttgctgtttttaggaggatattgagaagcgatggcatccctggcattttcagaggatttggcaccgctgctgttggagctctgcctgggcgagtgctagctctaacatcactggagatctctaaagaaatgacatttaagtattgtgaacattttgatctgtcagaggcgtcacaaattgctatagcaaatggcattgcaggtctaatgtcgagtatctgttcatgctcatactttgtgcctctagatgtgatttgccaaaggctcatggttcaaggattgccagggatggcaacatacaggggcccattcgatgtgataaataaggttgtcagaacagaagggatccgggggctttatcgaggttttggtatcactatgttgactcagtcgccagcttcagccctttggtggagtgcatatggtggtgctcaacatgctatttggaggagtttgggttatggaaatgactcacaaacaaaaccatctcaatcagaacttgttgttgtccaagtaacagcaggaacaattgctggtgcttgctcgtcgattatcaccactccagtagataccatcaagactcggcttcaggttatggacaactatggtaaaggcaggccttcagtcatgaaaactaccaggctgctgcttgatgaagatggctggaggggattctatagaggttttggaccgaggtttcttaacatgtctgtctggggcacatcaatgatcgtgacatatgagctcataaaaaggctatccgtgaagtctgaatgacacattttggtggattctcaactaaggtgatttactgttcaaaatcatctatacagatataggcaatcaagtcagtttgcctcgcgaagagtataggcgagtattatgatcgggtgggatgcagaattatggtttagttgcataggataacatgcttctgtatgacacttgcgatgtatatatttttgctaaagagccctcctttcaggatgtttgtagccagcttcttttggatgtaacagatggaggccaagacgcctgttctgtctaatgaggcacattatatgtagctgtactattcgtggtccaacaaaattttggcaaagaactctgcatccttttcgtt

SEQ ID NO: 28700 - protein, 327 aa, Zea mays subsp. mays
  peptide (1)..(327): Ceres Seq. ID no. 12405495
  misc_feature (74)..(327): NCBI GI NO: 34894824 NR Description: P0554D10.15
  misc_feature (6)..(322): NCBI GI NO: 21553961 NR Description: putative mitochondrial carrier protein
  misc_feature (6)..(322): NCBI GI NO: 18417739 NR Description: mitochondrial carrier protein family
  misc_feature (6)..(219): NCBI GI NO: 11358653 NR Description: probable mitochondrial carrier protein -Arabidopsis thaliana
  misc_feature (219)..(322): NCBI GI NO: 11358653 NR Description: probable mitochondrial carrier protein -Arabidopsis thaliana
  misc_feature (6)..(327): NCBI GI NO: 21326111 NR Description: putative mitochondrial carrier protein
  misc_feature (19)..(327): NCBI GI NO: 12061241 NR Description: 36I5.1 [Oryza sativa (japonica cultivar-group)]
  misc_feature (6)..(327): NCBI GI NO: 18496651 NR Description: putative mitochondrial carrier protein
  misc_feature (6)..(327): NCBI GI NO: 12278522 NR Description: putative mitochondrial carrier protein
  misc_feature (7)..(327): NCBI GI NO: 21594326 NR Description: mitochondrial carrier-like protein
MAAAADTSEASAAGIALAEANINWERLDKTRFHVIGAILFTAQQGALHPTAVVKTRMQVAEGGLAHMSGFAVFRRILRSDGIPGIFRGFGTAAVGALPGRVLALTSLEISKEMTFKYCEHFDLSEASQIAIANGIAGLMSSICSCSYFVPLDVICQRLMVQGLPGMATYRGPFDVINKVVRTEGIRGLYRGFGITMLTQSPASALWWSAYGGAQHAIWRSLGYGNDSQTKPSQSELVVVQVTAGTIAGACSSIITTPVDTIKTRLQVMDNYGKGRPSVMKTTRLLLDEDGWRGFYRGFGPRFLNMSVWGTSMIVTYELIKRLSVKSE

SEQ ID NO: 28701 - protein, 271 aa, Zea mays subsp. mays
  peptide (1)..(271): Ceres Seq. ID no. 12405496
  misc_feature (18)..(271): NCBI GI NO: 34894824 NR Description: P0554D10.15
  misc_feature (1)..(266): NCBI GI NO: 21553961 NR Description: putative mitochondrial carrier protein
  misc_feature (1)..(266): NCBI GI NO: 18417739 NR Description: mitochondrial carrier protein family
  misc_feature (1)..(163): NCBI GI NO: 11358653 NR Description: probable mitochondrial carrier protein -Arabidopsis thaliana
  misc_feature (163)..(266): NCBI GI NO: 11358653 NR Description: probable mitochondrial carrier protein -Arabidopsis thaliana
  misc_feature (1)..(271): NCBI GI NO: 21326111 NR Description: putative mitochondrial carrier protein
  misc_feature (1)..(271): NCBI GI NO: 12061241 NR Description: 36I5.1 [Oryza sativa (japonica cultivar-group)]
  misc_feature (1)..(271): NCBI GI NO: 18496651 NR Description: putative mitochondrial carrier protein
  misc_feature (1)..(271): NCBI GI NO: 12278522 NR Description: putative mitochondrial carrier protein
  misc_feature (1)..(271): NCBI GI NO: 21594326 NR Description: mitochondrial carrier-like protein
MQVAEGGLAHMSGFAVFRRILRSDGIPGIFRGFGTAAVGALPGRVLALTSLEISKEMTFKYCEHFDLSEASQIAIANGIAGLMSSICSCSYFVPLDVICQRLMVQGLPGMATYRGPFDVINKVVRTEGIRGLYRGFGITMLTQSPASALWWSAYGGAQHAIWRSLGYGNDSQTKPSQSELVVVQVTAGTIAGACSSIITTPVDTIKTRLQVMDNYGKGRPSVMKTTRLLLDEDGWRGFYRGFGPRFLNMSVWGTSMIVTYELIKRLSVKSE

SEQ ID NO: 28702 - protein, 261 aa, Zea mays subsp. mays
  peptide (1)..(261): Ceres Seq. ID no. 12405497
  misc_feature (8)..(261): NCBI GI NO: 34894824 NR Description: P0554D10.15
  misc_feature (1)..(256): NCBI GI NO: 21553961 NR Description: putative mitochondrial carrier protein
  misc_feature (1)..(256): NCBI GI NO: 18417739 NR Description: mitochondrial carrier protein family
  misc_feature (1)..(153): NCBI GI NO: 11358653 NR Description: probable mitochondrial carrier protein -Arabidopsis thaliana
  misc_feature (153)..(256): NCBI GI NO: 11358653 NR Description: probable mitochondrial carrier protein -Arabidopsis thaliana
  misc_feature (1)..(261): NCBI GI NO: 21326111 NR Description: putative mitochondrial carrier protein
  misc_feature (1)..(261): NCBI GI NO: 12061241 NR Description: 36I5.1 [Oryza sativa (japonica cultivar-group)]
  misc_feature (1)..(261): NCBI GI NO: 18496651 NR Description: putative mitochondrial carrier protein
  misc_feature (1)..(261): NCBI GI NO: 12278522 NR Description: putative mitochondrial carrier protein
  misc_feature (1)..(261): NCBI GI NO: 21594326 NR Description: mitochondrial carrier-like protein
MSGFAVFRRILRSDGIPGIFRGFGTAAVGALPGRVLALTSLEISKEMTFKYCEHFDLSEASQIAIANGIAGLMSSICSCSYFVPLDVICQRLMVQGLPGMATYRGPFDVINKVVRTEGIRGLYRGFGITMLTQSPASALWWSAYGGAQHAIWRSLGYGNDSQTKPSQSELVVVQVTAGTIAGACSSIITTPVDTIKTRLQVMDNYGKGRPSVMKTTRLLLDEDGWRGFYRGFGPRFLNMSVWGTSMIVTYELIKRLSVKSE

SEQ ID NO: 28703 - DNA, 1430 bp, Zea mays subsp. mays
  misc_feature (1)..(1430): Ceres Seq. ID no. 12405490
gatatttttttggttggatctagcgtgacggcaaagacggtgtatcgaagggtcgacaatggttacgacgatcggtagtccatagcagcggcgggcgcaacttcgacccggttttcttcccatatatctgtcaaatccttctccggttaccctccatcggcagcaatttccgccatagataccggcgatcgagggcctcggacaacccaatcgacggagcagcgcggcggcaggagagggcaaacccttttcttctcagtactctacttgtctgcgcctggatcccctccgcaggaagataagacatgggtcaagcactcggcttgattcaagtggatcaatcgacagtagccatcaaggaaacttttgggaagtttgacgaggtcctagagcctggatgccacttcttgccatggtgcatagggaagcaaattgctgggtatctgtcactgcgtgtgcagcagcttgatgtccgctgcgaaacaaagacaaaggataatgtcttcgtcaatgttgtggcatctgtgcaatatcgtgcccttgccgataaggcatctgatgcattttacaggcttagtaacaccagggagcaaatccagtcatatgtttttgatgtcatcagggcaagtgttccgaagatgaacttggatgatgcctttgagcagaagaatgaaatcgccaaagctgtagaaaatgaacttgaaaaggcaatgtctatgtatggatacgagattgtgcagactctgattgttgatattgagcctgatgagcatgtgaagagagctatgaatgagatcaatgcagctgctaggctgaggttggctgccagcgagaaagctgaggcagagaagatactgcagatcaagagagccgaaggtgatgcagaatccaagtacttggcgggtctgggtatcgcaagacagcgccaggctatagtggatgggctcagagacagtgttcttgctttctctgagaatgtgcctgggacctctgcaaaggatgtcatggacatggttctggttacccagtacttcgacaccatggaggagattggggccccgtccaagtccccgtcggttttcaccccccatggaccaggtgctgtcagagacatcgcagcgcagataagggatggtcagccccaggccagtctgctgtgagcacgttggaaaaggcatgcttttgacattcccatcagtaaagaagtacatatacatcatgaggagtaaaaaaaaacttactagcgataatgtgagtacagcttgttcgttctatctatatggtgcatgtgattattattatggagattaatgttaaataggttcgcatgtattgtgccagaacaaggctaaggaccagtttccgtaaaaaaatgtatgttcggaacttatctaagttttggagcctgaggaaacccctccatcctgtgc

SEQ ID NO: 28704 - protein, 284 aa, Zea mays subsp. mays
  peptide (1)..(284): Ceres Seq. ID no. 12405491
  misc_feature (1)..(284): NCBI GI NO: 9998903 NR Description: putative membrane protein [Zea mays]
  misc_feature (1)..(284): NCBI GI NO: 7716466 NR Description: hypersensitive-induced response protein [Zea mays]
  misc_feature (1)..(284): NCBI GI NO: 14150732 NR Description: hypersensitive-induced response protein
  misc_feature (1)..(284): NCBI GI NO: 23345042 NR Description: hypersensitive-induced reaction protein 1
  misc_feature (1)..(283): NCBI GI NO: 7716468 NR Description: hypersensitive-induced response protein [Zea mays]
  misc_feature (1)..(284): NCBI GI NO: 28476864 NR Description: hypersensitive-induced reaction protein 2
  misc_feature (1)..(282): NCBI GI NO: 13194676 NR Description: hypersensitivity-induced response-like protein
  misc_feature (1)..(282): NCBI GI NO: 15241939 NR Description: putative protein; protein id: At5g62740
  misc_feature (1)..(282): NCBI GI NO: 15222481 NR Description: unknown protein; protein id: At1g69840
  misc_feature (1)..(282): NCBI GI NO: 3928150 NR Description: hypothetical protein [Cicer arietinum]
MGQALGLIQVDQSTVAIKETFGKFDEVLEPGCHFLPWCIGKQIAGYLSLRVQQLDVRCETKTKDNVFVNVVASVQYRALADKASDAFYRLSNTREQIQSYVFDVIRASVPKMNLDDAFEQKNEIAKAVENELEKAMSMYGYEIVQTLIVDIEPDEHVKRAMNEINAAARLRLAASEKAEAEKILQIKRAEGDAESKYLAGLGIARQRQAIVDGLRDSVLAFSENVPGTSAKDVMDMVLVTQYFDTMEEIGAPSKSPSVFTPHGPGAVRDIAAQIRDGQPQASLL

SEQ ID NO: 28705 - protein, 173 aa, Zea mays subsp. mays
  peptide (1)..(173): Ceres Seq. ID no. 12405492
  misc_feature (1)..(173): NCBI GI NO: 9998903 NR Description: putative membrane protein [Zea mays]
  misc_feature (1)..(173): NCBI GI NO: 7716466 NR Description: hypersensitive-induced response protein [Zea mays]
  misc_feature (1)..(173): NCBI GI NO: 14150732 NR Description: hypersensitive-induced response protein
  misc_feature (1)..(173): NCBI GI NO: 23345042 NR Description: hypersensitive-induced reaction protein 1
  misc_feature (1)..(172): NCBI GI NO: 7716468 NR Description: hypersensitive-induced response protein [Zea mays]
  misc_feature (1)..(173): NCBI GI NO: 28476864 NR Description: hypersensitive-induced reaction protein 2
  misc_feature (1)..(171): NCBI GI NO: 13194676 NR Description: hypersensitivity-induced response-like protein
  misc_feature (1)..(171): NCBI GI NO: 15241939 NR Description: putative protein; protein id: At5g62740
  misc_feature (1)..(171): NCBI GI NO: 15222481 NR Description: unknown protein; protein id: At1g69840
  misc_feature (1)..(171): NCBI GI NO: 3928150 NR Description: hypothetical protein [Cicer arietinum]
MNLDDAFEQKNEIAKAVENELEKAMSMYGYEIVQTLIVDIEPDEHVKRAMNEINAAARLRLAASEKAEAEKILQIKRAEGDAESKYLAGLGIARQRQAIVDGLRDSVLAFSENVPGTSAKDVMDMVLVTQYFDTMEEIGAPSKSPSVFTPHGPGAVRDIAAQIRDGQPQASLL

SEQ ID NO: 28706 - protein, 149 aa, Zea mays subsp. mays
  peptide (1)..(149): Ceres Seq. ID no. 12405493
  misc_feature (1)..(149): NCBI GI NO: 9998903 NR Description: putative membrane protein [Zea mays]
  misc_feature (1)..(149): NCBI GI NO: 7716466 NR Description: hypersensitive-induced response protein [Zea mays]
  misc_feature (1)..(149): NCBI GI NO: 14150732 NR Description: hypersensitive-induced response protein
  misc_feature (1)..(149): NCBI GI NO: 23345042 NR Description: hypersensitive-induced reaction protein 1
  misc_feature (1)..(148): NCBI GI NO: 7716468 NR Description: hypersensitive-induced response protein [Zea mays]
  misc_feature (1)..(149): NCBI GI NO: 28476864 NR Description: hypersensitive-induced reaction protein 2
  misc_feature (1)..(147): NCBI GI NO: 13194676 NR Description: hypersensitivity-induced response-like protein
  misc_feature (1)..(147): NCBI GI NO: 15241939 NR Description: putative protein; protein id: At5g62740
  misc_feature (1)..(147): NCBI GI NO: 15222481 NR Description: unknown protein; protein id: At1g69840
  misc_feature (1)..(147): NCBI GI NO: 3928150 NR Description: hypothetical protein [Cicer arietinum]
MSMYGYEIVQTLIVDIEPDEHVKRAMNEINAAARLRLAASEKAEAEKILQIKRAEGDAESKYLAGLGIARQRQAIVDGLRDSVLAFSENVPGTSAKDVMDMVLVTQYFDTMEEIGAPSKSPSVFTPHGPGAVRDIAAQIRDGQPQASLL

SEQ ID NO: 28707 - DNA, 1959 bp, Zea mays subsp. mays; identical to SEQ ID NO: 23540
  misc_feature (1)..(1959): Ceres Seq. ID no. 12373566

SEQ ID NO: 28708 - protein, 466 aa, Zea mays subsp. mays; identical to SEQ ID NO: 23541
  peptide (1)..(466): Ceres Seq. ID no. 12373567
  misc_feature (227)..(428): Pfam Name: Pfam Description:  Protein phosphatase 2C
  misc_feature (205)..(463): NCBI GI NO: 25366932 NR Description: hypothetical protein dl4315c
  misc_feature (205)..(463): NCBI GI NO: 30683717 NR Description: expressed protein [Arabidopsis thaliana]
  misc_feature (178)..(463): NCBI GI NO: 15240071 NR Description: putative protein; protein id: At5g66720.1
  misc_feature (195)..(461): NCBI GI NO: 18418226 NR Description: putative protein; protein id: At4g33500
  misc_feature (195)..(459): NCBI GI NO: 7485658 NR Description: hypothetical protein F17M5
  misc_feature (232)..(463): NCBI GI NO: 37533570 NR Description: putative protein phosphatase 2C
  misc_feature (211)..(463): NCBI GI NO: 18402284 NR Description: expressed protein; protein id: At2g30170
  misc_feature (212)..(466): NCBI GI NO: 34896100 NR Description: B1189A09.35
  misc_feature (237)..(460): NCBI GI NO: 24640366 NR Description: CG15035-PA [Drosophila melanogaster]
  misc_feature (227)..(460): NCBI GI NO: 24655293 NR Description: CG12091-PA [Drosophila melanogaster]

SEQ ID NO: 28709 - protein, 383 aa, Zea mays subsp. mays; identical to SEQ ID NO: 23542
  peptide (1)..(383): Ceres Seq. ID no. 12373568
  misc_feature (144)..(345): Pfam Name: Pfam Description:  Protein phosphatase 2C
  misc_feature (122)..(380): NCBI GI NO: 25366932 NR Description: hypothetical protein dl4315c
  misc_feature (122)..(380): NCBI GI NO: 30683717 NR Description: expressed protein [Arabidopsis thaliana]
  misc_feature (95)..(380): NCBI GI NO: 15240071 NR Description: putative protein; protein id: At5g66720.1
  misc_feature (112)..(378): NCBI GI NO: 18418226 NR Description: putative protein; protein id: At4g33500
  misc_feature (112)..(376): NCBI GI NO: 7485658 NR Description: hypothetical protein F17M5
  misc_feature (149)..(380): NCBI GI NO: 37533570 NR Description: putative protein phosphatase 2C
  misc_feature (128)..(380): NCBI GI NO: 18402284 NR Description: expressed protein; protein id: At2g30170
  misc_feature (129)..(383): NCBI GI NO: 34896100 NR Description: B1189A09.35
  misc_feature (154)..(377): NCBI GI NO: 24640366 NR Description: CG15035-PA [Drosophila melanogaster]
  misc_feature (144)..(377): NCBI GI NO: 24655293 NR Description: CG12091-PA [Drosophila melanogaster]

SEQ ID NO: 28710 - protein, 347 aa, Zea mays subsp. mays; identical to SEQ ID NO: 23543
  peptide (1)..(347): Ceres Seq. ID no. 12373569
  misc_feature (108)..(309): Pfam Name: Pfam Description:  Protein phosphatase 2C
  misc_feature (86)..(344): NCBI GI NO: 25366932 NR Description: hypothetical protein dl4315c
  misc_feature (86)..(344): NCBI GI NO: 30683717 NR Description: expressed protein [Arabidopsis thaliana]
  misc_feature (59)..(344): NCBI GI NO: 15240071 NR Description: putative protein; protein id: At5g66720.1
  misc_feature (76)..(342): NCBI GI NO: 18418226 NR Description: putative protein; protein id: At4g33500
  misc_feature (76)..(340): NCBI GI NO: 7485658 NR Description: hypothetical protein F17M5
  misc_feature (113)..(344): NCBI GI NO: 37533570 NR Description: putative protein phosphatase 2C
  misc_feature (92)..(344): NCBI GI NO: 18402284 NR Description: expressed protein; protein id: At2g30170
  misc_feature (93)..(347): NCBI GI NO: 34896100 NR Description: B1189A09.35
  misc_feature (118)..(341): NCBI GI NO: 24640366 NR Description: CG15035-PA [Drosophila melanogaster]
  misc_feature (108)..(341): NCBI GI NO: 24655293 NR Description: CG12091-PA [Drosophila melanogaster]

SEQ ID NO: 28711 - DNA, 1442 bp, Zea mays subsp. mays
  misc_feature (1)..(1442): Ceres Seq. ID no. 12408959
  misc_feature (1047)..(1047): n is a, c, t, g, unknown, or other
  misc_feature (220)..(220): n is a, c, t, g, unknown, or other
  misc_feature (1177)..(1177): n is a, c, t, g, unknown, or other
  misc_feature (1179)..(1179): n is a, c, t, g, unknown, or other
acgaactcagcgtgctcataggttcctgacgtacgtatctcagttgcgttcgagcgttgtggacttgtggtggtttccttcctgcgccggagaaggtagacgatgggaaggggaagcgaacagtgccggacgcccgtcgagctgcgctgctcttgatcgtctgcttggcggctcgagcggcttctgcaatccaggatggcctgttgccgaacggcaactntcgaggaggcgccgcccaagtcgcagctcaacggcacgagggtgatggggcgcaacgcgataccgcactgggagatctccgggtacgtggagtacatcgggtcgggccagaagcagggcgacatgctgctgccggtgccggagggcgcctacgccgtgcggctggggaacgaggcatccatccagcagcgcctcgccgtgacgccgggcgcgcgctactccatcaccttcagcgcggcgcggacctgcgcccaggccgagcagctcaacgtgacggtcgcccccgagtcggacgtactcccgatccagacggtctacaccagcagcggctgggactcctactcctgggccttccaggccgcgggcagcgtcgtgaccctgatcgtccacaaccccggcgtcgccgaggacgcagcctgcggccccctcatcgatctgtttgccattaagaccatgccgactcctcggagcagcaagaataatatgctgaagaacggggacttcgaggacggcccgtacatcttccccaacacgcagtggggggtgctggtgccgccgatggacgaggacgactactccccgctggccccgtggatggtcctgtcgtccaccaagtcggtgaagtacgttgacgcgccgcaccacgccgtgccgcacggcgcccgcgccgtggagctggtgtccggcatggagacggcgctggtgcagaacgtgaccaccgttcccggacagctctacaggctccagttctcggccggggacgccggcaacggctgcgtgggctccatgaccgtccaggcgtacgccgcgcggggcagcgtcaaggtnccgtaccagtcccagggcaagggcggccacacgcgcggcgtgctggacttcgcggcggtcgcggaccagaccagggtggtgttcgtcagcatgggctacatcatgaagcccgacggcacgctgtgcggancnccgtcgtcgacgacgtctcgcttgtctccacgcggaaccatcctgctcgccgcttgcttctgtgatgctaccgacaagattcgttcatgggttaatgtgaatggctgtgagtgtgctcgaactcgaatgctcgggcttcatttaaccagatctgggtagagtccacggccatcacatgtatttgcatcgttgttttgtctttcttggccaaatgtacttgcttcgttgtagttgtatagactatgtatgcttcgacgggtgcc

SEQ ID NO: 28712 - protein, 380 aa, Zea mays subsp. mays
  peptide (1)..(380): Ceres Seq. ID no. 12408960
  misc_feature (18)..(327): Pfam Name: Pfam Description:  Protein of unknown function, DUF642
  misc_feature (10)..(327): NCBI GI NO: 38345427 NR Description: OSJNBb0091E11.18
  misc_feature (10)..(327): NCBI GI NO: 38345426 NR Description: OSJNBb0091E11.17
  misc_feature (10)..(339): NCBI GI NO: 38345428 NR Description: OSJNBb0091E11.19
  misc_feature (10)..(327): NCBI GI NO: 38345423 NR Description: OSJNBb0091E11.14
  misc_feature (10)..(327): NCBI GI NO: 34912572 NR Description: P0410E03.24
  misc_feature (1)..(339): NCBI GI NO: 7488898 NR Description: hypothetical protein - castor bean
  misc_feature (10)..(339): NCBI GI NO: 7488741 NR Description: hypothetical protein precursor - alfalfa
  misc_feature (10)..(339): NCBI GI NO: 15239049 NR Description: putative protein; protein id: At5g11420
  misc_feature (10)..(339): NCBI GI NO: 21554402 NR Description: unknown [Arabidopsis thaliana]
  misc_feature (10)..(327): NCBI GI NO: 30102997 NR Description: unknown protein
  misc_feature (9)..(9): Xaa is any aa, unknown or other
  misc_feature (284)..(284): Xaa is any aa, unknown or other
  misc_feature (328)..(328): Xaa is any aa, unknown or other
MACCRTATXEEAPPKSQLNGTRVMGRNAIPHWEISGYVEYIGSGQKQGDMLLPVPEGAYAVRLGNEASIQQRLAVTPGARYSITFSAARTCAQAEQLNVTVAPESDVLPIQTVYTSSGWDSYSWAFQAAGSVVTLIVHNPGVAEDAACGPLIDLFAIKTMPTPRSSKNNMLKNGDFEDGPYIFPNTQWGVLVPPMDEDDYSPLAPWMVLSSTKSVKYVDAPHHAVPHGARAVELVSGMETALVQNVTTVPGQLYRLQFSAGDAGNGCVGSMTVQAYAARGSVKXPYQSQGKGGHTRGVLDFAAVADQTRVVFVSMGYIMKPDGTLCGXPSSTTSRLSPRGTILLAACFCDATDKIRSWVNVNGCECARTRMLGLHLTRSG

SEQ ID NO: 28713 - protein, 357 aa, Zea mays subsp. mays
  peptide (1)..(357): Ceres Seq. ID no. 12408961
  misc_feature (1)..(304): Pfam Name: Pfam Description:  Protein of unknown function, DUF642
  misc_feature (1)..(304): NCBI GI NO: 38345427 NR Description: OSJNBb0091E11.18
  misc_feature (1)..(304): NCBI GI NO: 38345426 NR Description: OSJNBb0091E11.17
  misc_feature (1)..(316): NCBI GI NO: 38345428 NR Description: OSJNBb0091E11.19
  misc_feature (1)..(304): NCBI GI NO: 38345423 NR Description: OSJNBb0091E11.14
  misc_feature (1)..(304): NCBI GI NO: 34912572 NR Description: P0410E03.24
  misc_feature (1)..(316): NCBI GI NO: 7488898 NR Description: hypothetical protein - castor bean
  misc_feature (1)..(316): NCBI GI NO: 7488741 NR Description: hypothetical protein precursor - alfalfa
  misc_feature (1)..(316): NCBI GI NO: 15239049 NR Description: putative protein; protein id: At5g11420
  misc_feature (1)..(316): NCBI GI NO: 21554402 NR Description: unknown [Arabidopsis thaliana]
  misc_feature (1)..(304): NCBI GI NO: 30102997 NR Description: unknown protein
  misc_feature (261)..(261): Xaa is any aa, unknown or other
  misc_feature (305)..(305): Xaa is any aa, unknown or other
MGRNAIPHWEISGYVEYIGSGQKQGDMLLPVPEGAYAVRLGNEASIQQRLAVTPGARYSITFSAARTCAQAEQLNVTVAPESDVLPIQTVYTSSGWDSYSWAFQAAGSVVTLIVHNPGVAEDAACGPLIDLFAIKTMPTPRSSKNNMLKNGDFEDGPYIFPNTQWGVLVPPMDEDDYSPLAPWMVLSSTKSVKYVDAPHHAVPHGARAVELVSGMETALVQNVTTVPGQLYRLQFSAGDAGNGCVGSMTVQAYAARGSVKXPYQSQGKGGHTRGVLDFAAVADQTRVVFVSMGYIMKPDGTLCGXPSSTTSRLSPRGTILLAACFCDATDKIRSWVNVNGCECARTRMLGLHLTRSG

SEQ ID NO: 28714 - protein, 331 aa, Zea mays subsp. mays
  peptide (1)..(331): Ceres Seq. ID no. 12408962
  misc_feature (1)..(278): Pfam Name: Pfam Description:  Protein of unknown function, DUF642
  misc_feature (1)..(278): NCBI GI NO: 38345427 NR Description: OSJNBb0091E11.18
  misc_feature (1)..(278): NCBI GI NO: 38345426 NR Description: OSJNBb0091E11.17
  misc_feature (1)..(290): NCBI GI NO: 38345428 NR Description: OSJNBb0091E11.19
  misc_feature (1)..(278): NCBI GI NO: 38345423 NR Description: OSJNBb0091E11.14
  misc_feature (1)..(278): NCBI GI NO: 34912572 NR Description: P0410E03.24
  misc_feature (1)..(290): NCBI GI NO: 7488898 NR Description: hypothetical protein - castor bean
  misc_feature (1)..(290): NCBI GI NO: 7488741 NR Description: hypothetical protein precursor - alfalfa
  misc_feature (1)..(290): NCBI GI NO: 15239049 NR Description: putative protein; protein id: At5g11420
  misc_feature (1)..(290): NCBI GI NO: 21554402 NR Description: unknown [Arabidopsis thaliana]
  misc_feature (1)..(278): NCBI GI NO: 30102997 NR Description: unknown protein
  misc_feature (235)..(235): Xaa is any aa, unknown or other
  misc_feature (279)..(279): Xaa is any aa, unknown or other
MLLPVPEGAYAVRLGNEASIQQRLAVTPGARYSITFSAARTCAQAEQLNVTVAPESDVLPIQTVYTSSGWDSYSWAFQAAGSVVTLIVHNPGVAEDAACGPLIDLFAIKTMPTPRSSKNNMLKNGDFEDGPYIFPNTQWGVLVPPMDEDDYSPLAPWMVLSSTKSVKYVDAPHHAVPHGARAVELVSGMETALVQNVTTVPGQLYRLQFSAGDAGNGCVGSMTVQAYAARGSVKXPYQSQGKGGHTRGVLDFAAVADQTRVVFVSMGYIMKPDGTLCGXPSSTTSRLSPRGTILLAACFCDATDKIRSWVNVNGCECARTRMLGLHLTRSG

SEQ ID NO: 28715 - DNA, 1471 bp, Zea mays subsp. mays
  misc_feature (1)..(1471): Ceres Seq. ID no. 12373562
acggacatgcgatgctttatggatggtctagatcacgcgcttctactgacccgactcactctctctgaaaagtgaaaactaggaaccccactccccctcccgaaactaccgccgccgccgctgccgctgccgccgcgatccaggtctcccgcttcgcctgagctctcgacctcttcactcctcgccgccgctgctcgccctcccgcgtatcctcgtctcagctctcaggttttcagcctgatcaaaccggtgtaaccagccgtgcatgactgcattggttcggctcgccggaagagcagcttcgcggagtagggtcggcatagcggcggcggcggcaccccctcctgtcggcttgtccgtgcagcgccggagggcgttccagggcgtgagaatggagacggggggaagcaagggcggccgtggcgctctggtggtcctggaaggcctggaccggagcgggaaaacttcgcagtgtgcccggctgctgtccttcctcaaaggcaaaggctacaatgccgaaggatggagtttccccgatagggccaccagtgtggggcagatgatctcttcctacctcgcgaacgattcgcagcttgatgacaggacgattcatctgctcttcagcgccaaccgctgggagaaaagagctttgatggagagcaagctacttagtggaactactctcattgtagaccgctactcctattcgggagtggccttttcagctgctaagggccttgacattgagtggtgcaaggctccagaaaatggacttattgctccagaccttgtaatatatcttgatgtacagccagagaaagcggctgaaagaggaggctatggggatgagcgatatgaaaagatagagttccaaaagaaagttgcagagcattaccattcactctgtgattcgacatggaaggtggttgatggtttccttcccatggagactgttgaagaaagactgagagatttagctacgagctgtattcaggactgccaagggaacccacttaccaatctggcctggtgaagtgccttatgcacaaagtaatggcggccacacatcgtcttgtgtgatcaaccatggtcgggatagaattaggcatccggaagcattggcctttccatttgctctatcagtattccttgtgcttatttataatttcaaagcgtgttttttctttcctaaagttaggccccggttaaaacctctagagctaattgttagctaactaataagttgttagttggttttagctgggttgagacagctacaactaatgactatttgagaggtatagctaacaattagtcagtctattatctgatctgatccgtttaaaacctttcagttaattttagatgccaactattagttttagaggtttggaacaggacctagtctgtctgccggtgtacggattttgtgtaacgtgaaacatgtgagagtgcaaaacacttaaattgc

SEQ ID NO: 28716 - protein, 255 aa, Zea mays subsp. mays
  peptide (1)..(255): Ceres Seq. ID no. 12373563
  misc_feature (58)..(234): Pfam Name: Pfam Description:  Thymidylate kinase
  misc_feature (43)..(255): NCBI GI NO: 27261100 NR Description: putative thymidylate kinase
  misc_feature (40)..(255): NCBI GI NO: 21553651 NR Description: thymidylate kinase-like protein
  misc_feature (40)..(255): NCBI GI NO: 30697225 NR Description: thymidylate kinase - like protein
  misc_feature (40)..(255): NCBI GI NO: 30697228 NR Description: thymidylate kinase - like protein
  misc_feature (40)..(255): NCBI GI NO: 15912289 NR Description: AT5g59440/f2o15_100 [Arabidopsis thaliana]
  misc_feature (59)..(216): NCBI GI NO: 25288285 NR Description: dTMP kinase (EC 2.7.4.9)
  misc_feature (48)..(239): NCBI GI NO: 28573735 NR Description: CG5757-PA [Drosophila melanogaster]
  misc_feature (48)..(239): NCBI GI NO: 40215537 NR Description: RE69454p [Drosophila melanogaster]
  misc_feature (52)..(255): NCBI GI NO: 27686381 NR Description: similar to Thymidylate kinase (dTMP kinase)
  misc_feature (52)..(255): NCBI GI NO: 291900 NR Description: thymidylate kinase
MTALVRLAGRAASRSRVGIAAAAAPPPVGLSVQRRRAFQGVRMETGGSKGGRGALVVLEGLDRSGKTSQCARLLSFLKGKGYNAEGWSFPDRATSVGQMISSYLANDSQLDDRTIHLLFSANRWEKRALMESKLLSGTTLIVDRYSYSGVAFSAAKGLDIEWCKAPENGLIAPDLVIYLDVQPEKAAERGGYGDERYEKIEFQKKVAEHYHSLCDSTWKVVDGFLPMETVEERLRDLATSCIQDCQGNPLTNLAW

SEQ ID NO: 28717 - protein, 213 aa, Zea mays subsp. mays
  peptide (1)..(213): Ceres Seq. ID no. 12373564
  misc_feature (16)..(192): Pfam Name: Pfam Description:  Thymidylate kinase
  misc_feature (1)..(213): NCBI GI NO: 27261100 NR Description: putative thymidylate kinase
  misc_feature (1)..(213): NCBI GI NO: 21553651 NR Description: thymidylate kinase-like protein
  misc_feature (1)..(213): NCBI GI NO: 30697225 NR Description: thymidylate kinase - like protein
  misc_feature (1)..(213): NCBI GI NO: 30697228 NR Description: thymidylate kinase - like protein
  misc_feature (1)..(213): NCBI GI NO: 15912289 NR Description: AT5g59440/f2o15_100 [Arabidopsis thaliana]
  misc_feature (17)..(174): NCBI GI NO: 25288285 NR Description: dTMP kinase (EC 2.7.4.9)
  misc_feature (6)..(197): NCBI GI NO: 28573735 NR Description: CG5757-PA [Drosophila melanogaster]
  misc_feature (6)..(197): NCBI GI NO: 40215537 NR Description: RE69454p [Drosophila melanogaster]
  misc_feature (10)..(213): NCBI GI NO: 27686381 NR Description: similar to Thymidylate kinase (dTMP kinase)
  misc_feature (10)..(213): NCBI GI NO: 291900 NR Description: thymidylate kinase
METGGSKGGRGALVVLEGLDRSGKTSQCARLLSFLKGKGYNAEGWSFPDRATSVGQMISSYLANDSQLDDRTIHLLFSANRWEKRALMESKLLSGTTLIVDRYSYSGVAFSAAKGLDIEWCKAPENGLIAPDLVIYLDVQPEKAAERGGYGDERYEKIEFQKKVAEHYHSLCDSTWKVVDGFLPMETVEERLRDLATSCIQDCQGNPLTNLAW

SEQ ID NO: 28718 - protein, 157 aa, Zea mays subsp. mays
  peptide (1)..(157): Ceres Seq. ID no. 12373565
  misc_feature (1)..(136): Pfam Name: Pfam Description:  Thymidylate kinase
  misc_feature (1)..(157): NCBI GI NO: 27261100 NR Description: putative thymidylate kinase
  misc_feature (1)..(157): NCBI GI NO: 21553651 NR Description: thymidylate kinase-like protein
  misc_feature (1)..(157): NCBI GI NO: 30697225 NR Description: thymidylate kinase - like protein
  misc_feature (1)..(157): NCBI GI NO: 30697228 NR Description: thymidylate kinase - like protein
  misc_feature (1)..(157): NCBI GI NO: 15912289 NR Description: AT5g59440/f2o15_100 [Arabidopsis thaliana]
  misc_feature (1)..(118): NCBI GI NO: 25288285 NR Description: dTMP kinase (EC 2.7.4.9)
  misc_feature (1)..(141): NCBI GI NO: 28573735 NR Description: CG5757-PA [Drosophila melanogaster]
  misc_feature (1)..(141): NCBI GI NO: 40215537 NR Description: RE69454p [Drosophila melanogaster]
  misc_feature (1)..(157): NCBI GI NO: 27686381 NR Description: similar to Thymidylate kinase (dTMP kinase)
  misc_feature (1)..(157): NCBI GI NO: 291900 NR Description: thymidylate kinase
MISSYLANDSQLDDRTIHLLFSANRWEKRALMESKLLSGTTLIVDRYSYSGVAFSAAKGLDIEWCKAPENGLIAPDLVIYLDVQPEKAAERGGYGDERYEKIEFQKKVAEHYHSLCDSTWKVVDGFLPMETVEERLRDLATSCIQDCQGNPLTNLAW

SEQ ID NO: 28719 - DNA, 1738 bp, Zea mays subsp. mays
  misc_feature (1)..(1738): Ceres Seq. ID no. 12381225
ccattacctagaacatcctaatcgaaaaattataagcaagcaaagcgcagacttgcataagcaaaccccagccgtcgcagacttgcataagcaagcaaagcgcaggcctcgctcggcctctcgccagttcttcctctcttcttcccgcgacgtacgtcacactgcagcctgcttgctactcttgatttatcatccctcttggtgccgagcaggcagacgtagctgctgcatctcctagctgcctgcctccgttgattatccgatcgacctgttcgacaacaacaagtgaggacgaaccaggcgatccaggtggggcccggccggcaatcaggtgaaaagttgagctgtgttgtcaagacagactgacagagacatcagtttctcgctcgcatcacatgcgtgcattctacgcgggcaagaagggcgatgagagcagtccgtcagctgatgtattagcaaccacaagagagagagggaagagaagagaacaatgagtatttattatccagcaaagagtccaaagggcccagtagcagcgttccctctacggtctgctctcgtcttcttcgtcacatcgttcggcttctacgtctgctacttctcctcacgtcagataatagccctggaaaccgaagcagaaacgacggccagcggaggcggagcagaacccacagagacccgttgcacaaataggcccgcgatcattccacatgggccacagacgcggtacgtgcacttcccgaggcccgccacctacgacaggggcgaatgcgtttgtaacccggtgcgcttcttcgtgatcgtgtcgacgcagaggtcggggagcgggtgggtggaggccttgctcaacagccaccccaacgtcagctccaacggcgaggtgttctccatgagggagaggagacagaacctctcctctgttctggggactcttgacaggctgtacggcatggactggctcaccagcgcggccaagaacgagtgcacggcggcgttcgggttcaagtggatgctcaaccagggactgatggaaaaccatcgcgacatcgtgaactatttgaacaggaagggtgcgatggtggtgttcctcttcaggaggaacacgctgcggaggctcatctctgtggtggccaacaactacgacaggagagcgaggcagctcaacggcgtccacaaatcacacgttcattccaaagaggaggctgaggtcctcgcaaggttcaggccggagctggacgcgccggctctgattccgagcatcagaaccgcccagcgcgccgtgagagcctgcctgcgccgcttcggcagcacgcgccacatggtcctctactacgaggacgtggtccgggacagcaggaaggcgttgtcccgggtgcaggagttcctcggggttccggcgagggagctgtccagcaagcatgtcaagatccacaccaggcccctcccggacctcgtcggcaactgggaggaggtgaggcggacgctcgcgggacagagtacagccgattcctagatgatgatgcagagtaggtcaagtgtcgagtttctatggaggtaatacaagacaaacagtcaagcggagagatggagaaagcgatgggagttttatctccgcctttacattcctgtgtaggtatactggtttaaactcatcattgctgcttgggtagtggggtgccgcgtgggatagcaaaaggtaatgtattggttcaagtgcattacataaaccaaagtcttg

SEQ ID NO: 28720 - protein, 340 aa, Zea mays subsp. mays
  peptide (1)..(340): Ceres Seq. ID no. 12381226
  misc_feature (102)..(334): Pfam Name: Pfam Description:  Sulfotransferase domain
  misc_feature (5)..(338): NCBI GI NO: 33146729 NR Description: unknown protein
  misc_feature (8)..(334): NCBI GI NO: 40823013 NR Description: At2g15730 [Arabidopsis thaliana]
  misc_feature (9)..(334): NCBI GI NO: 29824462 NR Description: unknown protein
  misc_feature (8)..(334): NCBI GI NO: 22329158 NR Description: hypothetical protein; protein id: At4g34420.1
  misc_feature (93)..(313): NCBI GI NO: 15229813 NR Description: hypothetical protein; protein id: At3g50620.1
  misc_feature (9)..(237): NCBI GI NO: 14029013 NR Description: Unknown protein [Oryza sativa]
  misc_feature (285)..(334): NCBI GI NO: 14029013 NR Description: Unknown protein [Oryza sativa]
  misc_feature (110)..(338): NCBI GI NO: 34904786 NR Description: contains ESTsAU096411
  misc_feature (5)..(180): NCBI GI NO: 34904786 NR Description: contains ESTsAU096411
  misc_feature (237)..(334): NCBI GI NO: 25411661 NR Description: hypothetical protein At2g15730
MSIYYPAKSPKGPVAAFPLRSALVFFVTSFGFYVCYFSSRQIIALETEAETTASGGGAEPTETRCTNRPAIIPHGPQTRYVHFPRPATYDRGECVCNPVRFFVIVSTQRSGSGWVEALLNSHPNVSSNGEVFSMRERRQNLSSVLGTLDRLYGMDWLTSAAKNECTAAFGFKWMLNQGLMENHRDIVNYLNRKGAMVVFLFRRNTLRRLISVVANNYDRRARQLNGVHKSHVHSKEEAEVLARFRPELDAPALIPSIRTAQRAVRACLRRFGSTRHMVLYYEDVVRDSRKALSRVQEFLGVPARELSSKHVKIHTRPLPDLVGNWEEVRRTLAGQSTADS

SEQ ID NO: 28721 - protein, 207 aa, Zea mays subsp. mays
  peptide (1)..(207): Ceres Seq. ID no. 12381227
  misc_feature (1)..(201): Pfam Name: Pfam Description:  Sulfotransferase domain
  misc_feature (1)..(205): NCBI GI NO: 33146729 NR Description: unknown protein
  misc_feature (1)..(201): NCBI GI NO: 40823013 NR Description: At2g15730 [Arabidopsis thaliana]
  misc_feature (1)..(201): NCBI GI NO: 29824462 NR Description: unknown protein
  misc_feature (1)..(201): NCBI GI NO: 22329158 NR Description: hypothetical protein; protein id: At4g34420.1
  misc_feature (1)..(180): NCBI GI NO: 15229813 NR Description: hypothetical protein; protein id: At3g50620.1
  misc_feature (1)..(104): NCBI GI NO: 14029013 NR Description: Unknown protein [Oryza sativa]
  misc_feature (152)..(201): NCBI GI NO: 14029013 NR Description: Unknown protein [Oryza sativa]
  misc_feature (1)..(205): NCBI GI NO: 34904786 NR Description: contains ESTsAU096411
  misc_feature (1)..(47): NCBI GI NO: 34904786 NR Description: contains ESTsAU096411
  misc_feature (104)..(201): NCBI GI NO: 25411661 NR Description: hypothetical protein At2g15730
MRERRQNLSSVLGTLDRLYGMDWLTSAAKNECTAAFGFKWMLNQGLMENHRDIVNYLNRKGAMVVFLFRRNTLRRLISVVANNYDRRARQLNGVHKSHVHSKEEAEVLARFRPELDAPALIPSIRTAQRAVRACLRRFGSTRHMVLYYEDVVRDSRKALSRVQEFLGVPARELSSKHVKIHTRPLPDLVGNWEEVRRTLAGQSTADS

SEQ ID NO: 28722 - protein, 187 aa, Zea mays subsp. mays
  peptide (1)..(187): Ceres Seq. ID no. 12381228
  misc_feature (1)..(181): Pfam Name: Pfam Description:  Sulfotransferase domain
  misc_feature (1)..(185): NCBI GI NO: 33146729 NR Description: unknown protein
  misc_feature (1)..(181): NCBI GI NO: 40823013 NR Description: At2g15730 [Arabidopsis thaliana]
  misc_feature (1)..(181): NCBI GI NO: 29824462 NR Description: unknown protein
  misc_feature (1)..(181): NCBI GI NO: 22329158 NR Description: hypothetical protein; protein id: At4g34420.1
  misc_feature (1)..(160): NCBI GI NO: 15229813 NR Description: hypothetical protein; protein id: At3g50620.1
  misc_feature (1)..(84): NCBI GI NO: 14029013 NR Description: Unknown protein [Oryza sativa]
  misc_feature (132)..(181): NCBI GI NO: 14029013 NR Description: Unknown protein [Oryza sativa]
  misc_feature (1)..(185): NCBI GI NO: 34904786 NR Description: contains ESTsAU096411
  misc_feature (1)..(27): NCBI GI NO: 34904786 NR Description: contains ESTsAU096411
  misc_feature (84)..(181): NCBI GI NO: 25411661 NR Description: hypothetical protein At2g15730
MDWLTSAAKNECTAAFGFKWMLNQGLMENHRDIVNYLNRKGAMVVFLFRRNTLRRLISVVANNYDRRARQLNGVHKSHVHSKEEAEVLARFRPELDAPALIPSIRTAQRAVRACLRRFGSTRHMVLYYEDVVRDSRKALSRVQEFLGVPARELSSKHVKIHTRPLPDLVGNWEEVRRTLAGQSTADS

SEQ ID NO: 28723 - DNA, 1150 bp, Zea mays subsp. mays
  misc_feature (1)..(1150): Ceres Seq. ID no. 12353887
ctcgcccaaacagcagagcaagctatggcgcgcgcgcgtgacgccgccctccacctcctcctcctggcagcgggcgcactcctacttctagccgtggtgtctcaggccaccgtggtgccgccgagcgttccggcgggcgcccccgaggacccgcggtgccgcgcgctggcgccgcggcgtggcgcgctggcggtgtacccgagcgacatggagcaactgcagttccttctcaacgccaagttcgtggaggcggagtggttcctgcacgcggcgctgggacgtggcgtggacttcctggaccgcaacctgtccggcggcgggcctcggccgtccggggccaggaaggcggacctggacttccgcacaaccgaggtcgccgccgagctcgggtaccaggaggtgggccacatccgcgccatcaggcaggccgtgggcgggttcccgcggccgcccatcgacctcggcgccgaccgcttcgccatggtcatggacgacgccatgggcgtccgtctggacccgccgttcgacccgtacgccgggcccgtcaacttcctgctcgcctcctacgtgttcccgcacgtcaccgccgccgccgccatgggcatcggccccagcctcatgggctacgcctccaagcgcctccaggcgagcatcctggcggtggaggccgggcaggacgcggtgatccggctgctgctgtaccagcgcgccgacgatgccgtcccaccgtaccagggccacaccgtggccgacttcacgcgccggatctccgactggcgcaaccggatgtccgggtgcggcgccaaggacgaaggggtcaaggtgctggaccggcggcagggcgccgagcgccgcaccataagcaacatcctcggcgccggcgaggactcgctcgggttccaacgcacgcctgcggaggtgctccgcatcctctacggctcgcgcaacgagcagatccccggtgggttcctccccaggggtgccaatggaaccatcgctagaggtttcttccagctcgcgtagatcaaaagatactaacaacatcctagtctatcttgagacatcacaagctgatcgatggtagtaccaatcaacttgaaattaaaggtccaagaaatgtgataaaaaaacagaaaccattattattttg

SEQ ID NO: 28724 - protein, 340 aa, Zea mays subsp. mays
  peptide (1)..(340): Ceres Seq. ID no. 12353888
  misc_feature (38)..(200): NCBI GI NO: 12083528 NR Description: similar to Arabidopsis thaliana hypotheticalprotein
  misc_feature (192)..(340): NCBI GI NO: 12083528 NR Description: similar to Arabidopsis thaliana hypotheticalprotein
  misc_feature (69)..(336): NCBI GI NO: 18401988 NR Description: dessication-related protein, putative
  misc_feature (69)..(336): NCBI GI NO: 25357137 NR Description: hypothetical protein T2J15.11
  misc_feature (69)..(336): NCBI GI NO: 21593191 NR Description: dessication-related protein, putative
  misc_feature (68)..(336): NCBI GI NO: 15228845 NR Description: putative protein; protein id: At3g62730
  misc_feature (68)..(336): NCBI GI NO: 38346151 NR Description: OSJNBb0118P14.11
  misc_feature (68)..(330): NCBI GI NO: 118926 NR Description: Desiccation-related protein PCC13-62 precursor
  misc_feature (82)..(275): NCBI GI NO: 16263242 NR Description: Conserved hypothetical protein
  misc_feature (256)..(332): NCBI GI NO: 16263242 NR Description: Conserved hypothetical protein
LAQTAEQAMARARDAALHLLLLAAGALLLLAVVSQATVVPPSVPAGAPEDPRCRALAPRRGALAVYPSDMEQLQFLLNAKFVEAEWFLHAALGRGVDFLDRNLSGGGPRPSGARKADLDFRTTEVAAELGYQEVGHIRAIRQAVGGFPRPPIDLGADRFAMVMDDAMGVRLDPPFDPYAGPVNFLLASYVFPHVTAAAAMGIGPSLMGYASKRLQASILAVEAGQDAVIRLLLYQRADDAVPPYQGHTVADFTRRISDWRNRMSGCGAKDEGVKVLDRRQGAERRTISNILGAGEDSLGFQRTPAEVLRILYGSRNEQIPGGFLPRGANGTIARGFFQLA

SEQ ID NO: 28725 - protein, 332 aa, Zea mays subsp. mays
  peptide (1)..(332): Ceres Seq. ID no. 12353889
  misc_feature (30)..(192): NCBI GI NO: 12083528 NR Description: similar to Arabidopsis thaliana hypotheticalprotein
  misc_feature (184)..(332): NCBI GI NO: 12083528 NR Description: similar to Arabidopsis thaliana hypotheticalprotein
  misc_feature (61)..(328): NCBI GI NO: 18401988 NR Description: dessication-related protein, putative
  misc_feature (61)..(328): NCBI GI NO: 25357137 NR Description: hypothetical protein T2J15.11
  misc_feature (61)..(328): NCBI GI NO: 21593191 NR Description: dessication-related protein, putative
  misc_feature (60)..(328): NCBI GI NO: 15228845 NR Description: putative protein; protein id: At3g62730
  misc_feature (60)..(328): NCBI GI NO: 38346151 NR Description: OSJNBb0118P14.11
  misc_feature (60)..(322): NCBI GI NO: 118926 NR Description: Desiccation-related protein PCC13-62 precursor
  misc_feature (74)..(267): NCBI GI NO: 16263242 NR Description: Conserved hypothetical protein
  misc_feature (248)..(324): NCBI GI NO: 16263242 NR Description: Conserved hypothetical protein
MARARDAALHLLLLAAGALLLLAVVSQATVVPPSVPAGAPEDPRCRALAPRRGALAVYPSDMEQLQFLLNAKFVEAEWFLHAALGRGVDFLDRNLSGGGPRPSGARKADLDFRTTEVAAELGYQEVGHIRAIRQAVGGFPRPPIDLGADRFAMVMDDAMGVRLDPPFDPYAGPVNFLLASYVFPHVTAAAAMGIGPSLMGYASKRLQASILAVEAGQDAVIRLLLYQRADDAVPPYQGHTVADFTRRISDWRNRMSGCGAKDEGVKVLDRRQGAERRTISNILGAGEDSLGFQRTPAEVLRILYGSRNEQIPGGFLPRGANGTIARGFFQLA

SEQ ID NO: 28726 - protein, 271 aa, Zea mays subsp. mays
  peptide (1)..(271): Ceres Seq. ID no. 12353890
  misc_feature (1)..(131): NCBI GI NO: 12083528 NR Description: similar to Arabidopsis thaliana hypotheticalprotein
  misc_feature (123)..(271): NCBI GI NO: 12083528 NR Description: similar to Arabidopsis thaliana hypotheticalprotein
  misc_feature (1)..(267): NCBI GI NO: 18401988 NR Description: dessication-related protein, putative
  misc_feature (1)..(267): NCBI GI NO: 25357137 NR Description: hypothetical protein T2J15.11
  misc_feature (1)..(267): NCBI GI NO: 21593191 NR Description: dessication-related protein, putative
  misc_feature (1)..(267): NCBI GI NO: 15228845 NR Description: putative protein; protein id: At3g62730
  misc_feature (1)..(267): NCBI GI NO: 38346151 NR Description: OSJNBb0118P14.11
  misc_feature (1)..(261): NCBI GI NO: 118926 NR Description: Desiccation-related protein PCC13-62 precursor
  misc_feature (13)..(206): NCBI GI NO: 16263242 NR Description: Conserved hypothetical protein
  misc_feature (187)..(263): NCBI GI NO: 16263242 NR Description: Conserved hypothetical protein
MEQLQFLLNAKFVEAEWFLHAALGRGVDFLDRNLSGGGPRPSGARKADLDFRTTEVAAELGYQEVGHIRAIRQAVGGFPRPPIDLGADRFAMVMDDAMGVRLDPPFDPYAGPVNFLLASYVFPHVTAAAAMGIGPSLMGYASKRLQASILAVEAGQDAVIRLLLYQRADDAVPPYQGHTVADFTRRISDWRNRMSGCGAKDEGVKVLDRRQGAERRTISNILGAGEDSLGFQRTPAEVLRILYGSRNEQIPGGFLPRGANGTIARGFFQLA

SEQ ID NO: 28727 - DNA, 790 bp, Zea mays subsp. mays
  misc_feature (1)..(790): Ceres Seq. ID no. 12403482
aagagccaacagagcaacgcccaggcacacacgacacgaaccaggcagccagccgcggagggaggaaccctagcggaacaggtgacggcggcgcgctaccggtgacgggggatacggcggcatcgtcccctcctccatccccggcgcggcggcgccagcagccggcctgcaggctgtttgaagagctcgccatttaatctcaatggaagccaagtttttccgtttcctgaagctcgttggggtcggcttcaaagcgaggtcagagagccaaggccgtgagttgttccttaaactgggcttcagccatgaggtgcagttcaccgctcctccagctgtccgtgtcttctgcttcaaacccaacataatctgctgcaccggcatcgataaggacagggtgcaccagttcgccggcgccatccggagctctaaggctccagaggtgtacaaggggaaggggatcctgtacattgacgaggttatcaagctgaagcccggaaagaagcgaaaaaataagtgacgatccgaaggcgttacaactttttctgtcttttaaccccattcttcgcatttgtagtgatctggatctggggtctgctgtgttgtgttgtgtacttgcgttgtgctacacagatcaccattatcttacctttacctcagctgcatgtaggaccatgagtgggaataagttaccagtttgttgatatgagctggaacgttgctttgcgaattggattggattaccgagtgggatgttttgtttcaaacttgaagtctttcaatagattgttgc

SEQ ID NO: 28728 - protein, 104 aa, Zea mays subsp. mays
  peptide (1)..(104): Ceres Seq. ID no. 12403483
  misc_feature (12)..(88): Pfam Name: Pfam Description:  Ribosomal protein L6
  misc_feature (1)..(102): NCBI GI NO: 18398731 NR Description: putative ribosomal protein L6
  misc_feature (1)..(102): NCBI GI NO: 25411865 NR Description: probable ribosomal protein L6
  misc_feature (1)..(101): NCBI GI NO: 11467124 NR Description: rpl6 [Marchantia polymorpha]
  misc_feature (1)..(101): NCBI GI NO: 38638291 NR Description: ribosomal protein L6 [Chara vulgaris]
  misc_feature (1)..(101): NCBI GI NO: 22550351 NR Description: ribosomal protein L6 [Chaetosphaeridium globosum]
  misc_feature (1)..(101): NCBI GI NO: 11466518 NR Description: ribosomal protein L6 [Reclinomonas americana]
  misc_feature (1)..(101): NCBI GI NO: 22966107 NR Description: hypothetical protein [Rhodospirillum rubrum]
  misc_feature (1)..(99): NCBI GI NO: 23022259 NR Description: hypothetical protein
  misc_feature (1)..(104): NCBI GI NO: 28144880 NR Description: putative chloroplast 50S ribosomal protein L6
  misc_feature (6)..(101): NCBI GI NO: 6066163 NR Description: ribosomal protein L6 [Nephroselmis olivacea]
MEAKFFRFLKLVGVGFKARSESQGRELFLKLGFSHEVQFTAPPAVRVFCFKPNIICCTGIDKDRVHQFAGAIRSSKAPEVYKGKGILYIDEVIKLKPGKKRKNK

SEQ ID NO: 28729 - protein, 64 aa, Zea mays subsp. mays
  peptide (1)..(64): Ceres Seq. ID no. 12403484
EPTEQRPGTHDTNQAASRGGRNPSGTGDGGALPVTGDTAASSPPPSPARRRQQPACRLFEELAI

SEQ ID NO: 28730 - DNA, 838 bp, Zea mays subsp. mays
  misc_feature (1)..(838): Ceres Seq. ID no. 12336716
  misc_feature (516)..(516): n is a, c, t, g, unknown, or other
  misc_feature (586)..(586): n is a, c, t, g, unknown, or other
  misc_feature (433)..(433): n is a, c, t, g, unknown, or other
cgtggccgtagtggactacttcaatcgaagaggagtctctgcaatatttctcttcagaaggaatctgctccgccagttggtatcacagctagcgaataaccacgacagattcctgaagcagttaaacggaacacacaaggcgcatgtccacacagagcatgaggcccatatactcgcgagatacaagcccaggctgaacacgtcgtcgctaatacggaaactgaaacaggctgatgagtacacacgcgacgcccttgagaacctaaataacacccgccacatcactgtctactacgaggacatcgtccgcaacagaacaaggcttctcgacgccctggatttcctcggagtgccgaggagggagctggcgagtcggcacgtgaagatacacacgaagcccctgtcggagcagatcgagaactgggacgaagtntacagcgccctcaacggtacccagtacgagggcttcctgaatgccgctgactatacgtaatatgacgtcacggtctccacgtntcttgatgtagatgtaggtgtgtaggtatagcccccagctgtgactccttttgttcttgttttcgagtanccggccggccttctgcgtgcctgcctggcaggagttttgatgcgggggatggaggcgctttgccatggttgcgttcgagctcctggctagcccacccactagctttcctcatgtccatgtaacgaccctcgagcttctctcatctttggccgtccgcttgtaatgcttgtcgtcagtgatctcacccatgtcatgccatgccatgccttcgagggacaaagctgtgcacttgaacttgaggcttgtcttttc

SEQ ID NO: 28731 - protein, 163 aa, Zea mays subsp. mays
  peptide (1)..(163): Ceres Seq. ID no. 12336717
  misc_feature (3)..(162): NCBI GI NO: 29824462 NR Description: unknown protein
  misc_feature (3)..(162): NCBI GI NO: 33146729 NR Description: unknown protein
  misc_feature (3)..(162): NCBI GI NO: 34904786 NR Description: contains ESTsAU096411
  misc_feature (3)..(162): NCBI GI NO: 40823013 NR Description: At2g15730 [Arabidopsis thaliana]
  misc_feature (3)..(158): NCBI GI NO: 22329158 NR Description: hypothetical protein; protein id: At4g34420.1
  misc_feature (3)..(129): NCBI GI NO: 15229813 NR Description: hypothetical protein; protein id: At3g50620.1
  misc_feature (53)..(162): NCBI GI NO: 25411661 NR Description: hypothetical protein At2g15730
  misc_feature (53)..(162): NCBI GI NO: 30679514 NR Description: expressed protein [Arabidopsis thaliana]
  misc_feature (19)..(119): NCBI GI NO: 7485320 NR Description: hypothetical protein F10M10
  misc_feature (69)..(162): NCBI GI NO: 14029013 NR Description: Unknown protein [Oryza sativa]
  misc_feature (144)..(144): Xaa is any aa, unknown or other
VAVVDYFNRRGVSAIFLFRRNLLRQLVSQLANNHDRFLKQLNGTHKAHVHTEHEAHILARYKPRLNTSSLIRKLKQADEYTRDALENLNNTRHITVYYEDIVRNRTRLLDALDFLGVPRRELASRHVKIHTKPLSEQIENWDEXYSALNGTQYEGFLNAADYT

SEQ ID NO: 28732 - DNA, 1791 bp, Zea mays subsp. mays
  misc_feature (1)..(1791): Ceres Seq. ID no. 12407706
aggcctcccactgcgtgtggggccgagccagcttgctccatcaagccgagagcccactcttctttctcacctcgcatcgcactccctcaatctctcgtctctatcgccgcatcgcttctctgccggagctccaacaacctcgcctcgcgcagcactccgctgaccctccctgactccctccctgccgctgggatggccgggaaacgagttacgggccgcgatgggcaagacgagggcggcgccaaggtcgggctcccggcgatggacctctccctcgcgttcccgcaggccacacctgcctccattttcccgccgtccgcttcggattattacccgtctgatgatttgctgaccagtgaagagcgctctatcaggatgaaggtcaggggtattatggaaaaagaaattgctcccattatgtcagcgtactgggaaaaggcagagtttccatttaatgccattcctaaacttgcaagccttggtgttgctggtggtacaataaagggttatgggtgcccaggactttccattacagccagtgctgttactatgtcagaaattgcacgggtatatgcaagctgttccacatttatactggtgcactcctctcttgcgatggtgacaatagctctttgcggatccgaggctcagaagcagaagtacttgccatcccttgctcaacttactactgttggctgttgggcattgacagagccaaattatggaagtgatgcgagctctttgagaaccctagcgaccaaggcacctggtgggtggcacatagatggtcaaaaacgctggatcggtaacagtactttcgccgatgtcctcgtcgtgttagccaggaatgcagacacgcaacagctaaatgggttcattgtgcggaaaggagctcctggcctgaaagctacaaagatcgagaacaaaattggcctcaggatggttcagaacggtgacatagttttgaacaaggtgttcgtccctgacgaagaccggttgccaggcatcaactcgtttcaggacatcagcaaggtgctcgccatttcacgcattatggtggcatggcaaccggttggcatatcaatgggggtctttgacatgtgccaccggtatctgaaagaaaggaagcagttcggagtccctctggcggcgtttcagctgaaccaagagaagctcgcccggatgctcggtaacgtccagtcgatggtcctcgtcggctggcgtctctgcaagctctacgagtcggggaaaatgacgccgggccacgctagcctagggaaggcttggaactccaggacggcccgcgaggtggtctcccttggccgagagctgctgggtgggaacgggattttggccgacttccttgtagccaaggcgttctgcgacctggagcccatctactcgtacgagggcacgtacgacattaacagcctggtgaccggcagggaggtcaccgggatcgcgagcttcaggcccgccgcgccagcgaaagcccggctgtgacgtgataacctgtgtccccgtgttgcagggaactggaggcgaataaatcatgatcaggtcgtcgtcgtcgtcgccatcgaacaaactgagcacgttcctggaacccgcccggtcaacgttggctgctcacatggtgtaccgtagccgagtgcggatgggaacggattcctagatatatgtagtactatacgaagatatctgttgcgggtggattactgtaaaccgggtctaatctctgttgcggtgtttgccgtctttggtcagaaggtaaggggggaacgccaggcg

SEQ ID NO: 28733 - protein, 500 aa, Zea mays subsp. mays
  peptide (1)..(500): Ceres Seq. ID no. 12407707
  misc_feature (235)..(333): Pfam Name: Pfam Description:  Acyl-CoA dehydrogenase, middle domain
  misc_feature (65)..(500): NCBI GI NO: 34896018 NR Description: ESTs AU056822
  misc_feature (85)..(497): NCBI GI NO: 15231059 NR Description: acyl-coA dehydrogenase; protein id: At3g51840
  misc_feature (90)..(490): NCBI GI NO: 29827888 NR Description: putative glutaryl-CoA dehydrogenase
  misc_feature (105)..(499): NCBI GI NO: 28829336 NR Description: similar to Arabidopsis thaliana (Mouse-ear cress)
  misc_feature (108)..(490): NCBI GI NO: 25026880 NR Description: putative acyl-CoA dehydrogenase
  misc_feature (92)..(490): NCBI GI NO: 25027279 NR Description: putative glutaryl-CoA dehydrogenase precursor
  misc_feature (108)..(490): NCBI GI NO: 29827260 NR Description: putative glutaryl-CoA dehydrogenase
  misc_feature (102)..(490): NCBI GI NO: 15805578 NR Description: glutaryl-CoA dehydrogenase, putative
  misc_feature (109)..(491): NCBI GI NO: 11498596 NR Description: glutaryl-CoA dehydrogenase (gcdH)
  misc_feature (109)..(491): NCBI GI NO: 23135439 NR Description: hypothetical protein [Cytophaga hutchinsonii]
RPPTACGAEPACSIKPRAHSSFSPRIALPQSLVSIAASLLCRSSNNLASRSTPLTLPDSLPAAGMAGKRVTGRDGQDEGGAKVGLPAMDLSLAFPQATPASIFPPSASDYYPSDDLLTSEERSIRMKVRGIMEKEIAPIMSAYWEKAEFPFNAIPKLASLGVAGGTIKGYGCPGLSITASAVTMSEIARVYASCSTFILVHSSLAMVTIALCGSEAQKQKYLPSLAQLTTVGCWALTEPNYGSDASSLRTLATKAPGGWHIDGQKRWIGNSTFADVLVVLARNADTQQLNGFIVRKGAPGLKATKIENKIGLRMVQNGDIVLNKVFVPDEDRLPGINSFQDISKVLAISRIMVAWQPVGISMGVFDMCHRYLKERKQFGVPLAAFQLNQEKLARMLGNVQSMVLVGWRLCKLYESGKMTPGHASLGKAWNSRTAREVVSLGRELLGGNGILADFLVAKAFCDLEPIYSYEGTYDINSLVTGREVTGIASFRPAAPAKARL

SEQ ID NO: 28734 - protein, 436 aa, Zea mays subsp. mays
  peptide (1)..(436): Ceres Seq. ID no. 12407708
  misc_feature (171)..(269): Pfam Name: Pfam Description:  Acyl-CoA dehydrogenase, middle domain
  misc_feature (1)..(436): NCBI GI NO: 34896018 NR Description: ESTs AU056822
  misc_feature (21)..(433): NCBI GI NO: 15231059 NR Description: acyl-coA dehydrogenase; protein id: At3g51840
  misc_feature (26)..(426): NCBI GI NO: 29827888 NR Description: putative glutaryl-CoA dehydrogenase
  misc_feature (41)..(435): NCBI GI NO: 28829336 NR Description: similar to Arabidopsis thaliana (Mouse-ear cress)
  misc_feature (44)..(426): NCBI GI NO: 25026880 NR Description: putative acyl-CoA dehydrogenase
  misc_feature (28)..(426): NCBI GI NO: 25027279 NR Description: putative glutaryl-CoA dehydrogenase precursor
  misc_feature (44)..(426): NCBI GI NO: 29827260 NR Description: putative glutaryl-CoA dehydrogenase
  misc_feature (38)..(426): NCBI GI NO: 15805578 NR Description: glutaryl-CoA dehydrogenase, putative
  misc_feature (45)..(427): NCBI GI NO: 11498596 NR Description: glutaryl-CoA dehydrogenase (gcdH)
  misc_feature (45)..(427): NCBI GI NO: 23135439 NR Description: hypothetical protein [Cytophaga hutchinsonii]
MAGKRVTGRDGQDEGGAKVGLPAMDLSLAFPQATPASIFPPSASDYYPSDDLLTSEERSIRMKVRGIMEKEIAPIMSAYWEKAEFPFNAIPKLASLGVAGGTIKGYGCPGLSITASAVTMSEIARVYASCSTFILVHSSLAMVTIALCGSEAQKQKYLPSLAQLTTVGCWALTEPNYGSDASSLRTLATKAPGGWHIDGQKRWIGNSTFADVLVVLARNADTQQLNGFIVRKGAPGLKATKIENKIGLRMVQNGDIVLNKVFVPDEDRLPGINSFQDISKVLAISRIMVAWQPVGISMGVFDMCHRYLKERKQFGVPLAAFQLNQEKLARMLGNVQSMVLVGWRLCKLYESGKMTPGHASLGKAWNSRTAREVVSLGRELLGGNGILADFLVAKAFCDLEPIYSYEGTYDINSLVTGREVTGIASFRPAAPAKARL

SEQ ID NO: 28735 - protein, 413 aa, Zea mays subsp. mays
  peptide (1)..(413): Ceres Seq. ID no. 12407709
  misc_feature (148)..(246): Pfam Name: Pfam Description:  Acyl-CoA dehydrogenase, middle domain
  misc_feature (1)..(413): NCBI GI NO: 34896018 NR Description: ESTs AU056822
  misc_feature (1)..(410): NCBI GI NO: 15231059 NR Description: acyl-coA dehydrogenase; protein id: At3g51840
  misc_feature (3)..(403): NCBI GI NO: 29827888 NR Description: putative glutaryl-CoA dehydrogenase
  misc_feature (18)..(412): NCBI GI NO: 28829336 NR Description: similar to Arabidopsis thaliana (Mouse-ear cress)
  misc_feature (21)..(403): NCBI GI NO: 25026880 NR Description: putative acyl-CoA dehydrogenase
  misc_feature (5)..(403): NCBI GI NO: 25027279 NR Description: putative glutaryl-CoA dehydrogenase precursor
  misc_feature (21)..(403): NCBI GI NO: 29827260 NR Description: putative glutaryl-CoA dehydrogenase
  misc_feature (15)..(403): NCBI GI NO: 15805578 NR Description: glutaryl-CoA dehydrogenase, putative
  misc_feature (22)..(404): NCBI GI NO: 11498596 NR Description: glutaryl-CoA dehydrogenase (gcdH)
  misc_feature (22)..(404): NCBI GI NO: 23135439 NR Description: hypothetical protein [Cytophaga hutchinsonii]
MDLSLAFPQATPASIFPPSASDYYPSDDLLTSEERSIRMKVRGIMEKEIAPIMSAYWEKAEFPFNAIPKLASLGVAGGTIKGYGCPGLSITASAVTMSEIARVYASCSTFILVHSSLAMVTIALCGSEAQKQKYLPSLAQLTTVGCWALTEPNYGSDASSLRTLATKAPGGWHIDGQKRWIGNSTFADVLVVLARNADTQQLNGFIVRKGAPGLKATKIENKIGLRMVQNGDIVLNKVFVPDEDRLPGINSFQDISKVLAISRIMVAWQPVGISMGVFDMCHRYLKERKQFGVPLAAFQLNQEKLARMLGNVQSMVLVGWRLCKLYESGKMTPGHASLGKAWNSRTAREVVSLGRELLGGNGILADFLVAKAFCDLEPIYSYEGTYDINSLVTGREVTGIASFRPAAPAKARL

SEQ ID NO: 28736 - DNA, 1391 bp, Zea mays subsp. mays
  misc_feature (1)..(1391): Ceres Seq. ID no. 12406330
gcacgagaccattacctagaacatcctaatcgaaaaaagcagtcatgactcatgacactagaatggaatgggatggtgttcgtgcatcacgcgtcggcgagcttgggcgtgggtatgtggctgtcgacgaaggccttcatatcctgcagcaccttggtagcctcggggagctccgggaagccgtagaagccgtggaacatgcctgggtactcggccaccagcacctccttccccttccggcgcagcacgtcggcgtagcgtcgctgccagtccatgagcgggtcgaagccgccgatgatgaccatggcgggcgggaagtcgtcggcgaggtcggcgttgtcgtcggtgacgtgcgcggccgggtggtcgcgggtggcaccgtcgggcaggaacgcggtccacgagaagtcggagcgcctgaggttgaccacgggcgccacgccctctagctccagctccgacggcgtgcgctccacgccgccgaagtagggctgcacggggaagacgcccgcgacgcggagggcccgcgcggacggctgccacgccgccgcccagcggttggcgacgtggtgcacgatgtttccgcccgcgctctccccggccaggaagcagctgccgaggtcgacgggcacgccgtcgtccaggcccgggacgccgccgcgggcgtcgaggaagcgcagcgcgtcgacgccgtcgtcgtaggcggcgggccagcggtgctccggggccaggcggtagttgacggacaccacgacggcgccgagcgcggcgcagaggcggcggcacacgccgttgaagggcccgatggccggggagaagagcgcgaagccgccgccgtggaagtacacgaccacggggagcgggcggtccgccgcggccggcgcgaagacgcgcgcccagatgccgcgggacgcgtccatggtcacgtcgtaggagcgcaccccggaggcgtccgggcgcgggctggcgcgcgcgctcaggagccggtcgatcacgccgtacaggcagcggttcaccgtcccgtcgcggcgctccacggcgtcgatggccgccgtcagcccggccagctggaggcgcaccgacagcggcagcggtggtggcttcggcttcggcttatctgctgctccttggttgctgtcgctggccatggactccattccttcgctctggcctgctcgtcggtatctttgatcagtgtttccctggggttggacgtgcgatggagtatatagctgacagctcgtgtgccgtgtgggcagcggagcaggtagagagtttgagacggaactgtcggtatggcggcgcgtgcgtgccctgtctgtatttgtcaagacgggcgtggcgacgtgtcgcctggccttccacaaacggcaacggagagaccctgtctg

SEQ ID NO: 28737 - protein, 134 aa, Zea mays subsp. mays
  peptide (1)..(134): Ceres Seq. ID no. 12406331
MTHDTRMEWDGVRASRVGELGRGYVAVDEGLHILQHLGSLGELREAVEAVEHAWVLGHQHLLPLPAQHVGVASLPVHERVEAADDDHGGREVVGEVGVVVGDVRGRVVAGGTVGQERGPREVGAPEVDHGRHAL

SEQ ID NO: 28738 - protein, 128 aa, Zea mays subsp. mays
  peptide (1)..(128): Ceres Seq. ID no. 12406332
MEWDGVRASRVGELGRGYVAVDEGLHILQHLGSLGELREAVEAVEHAWVLGHQHLLPLPAQHVGVASLPVHERVEAADDDHGGREVVGEVGVVVGDVRGRVVAGGTVGQERGPREVGAPEVDHGRHAL

SEQ ID NO: 28739 - protein, 71 aa, Zea mays subsp. mays
  peptide (1)..(71): Ceres Seq. ID no. 12406333
  misc_feature (1)..(71): NCBI GI NO: 13592175 NR Description: ppg3 [Leishmania major]
  misc_feature (1)..(71): NCBI GI NO: 13592175 NR Description: ppg3 [Leishmania major]
  misc_feature (1)..(71): NCBI GI NO: 13592175 NR Description: ppg3 [Leishmania major]
  misc_feature (1)..(71): NCBI GI NO: 13592175 NR Description: ppg3 [Leishmania major]
MSGSKPPMMTMAGGKSSARSALSSVTCAAGWSRVAPSGRNAVHEKSERLRLTTGATPSSSSSDGVRSTPPK

SEQ ID NO: 28740 - DNA, 1793 bp, Zea mays subsp. mays
  misc_feature (1)..(1793): Ceres Seq. ID no. 12408952
aatcacgcacggacgataaatccaagtaaggaaatccccgatgatctcctgcgcgtcgcagcgccagccactcgattagtggagtccaccaaccaagcacgcgtccctccccgtcccagatcccatcccgcggcagccggtcagtccgatccatctccagtacccagcccgtcacccgccttccccgttcgctctcgtcggcgcgcgatggagggtctcatcaaggggttggtccacgtggccatcgacgccgtggaggacgccgtgagggagagggaccacggccgcgccgacgacgacgaggtgccgaggaggagggcggcccaaagctccgatccagatgacgacggggaggaggaacgcgacgaacgatcgcggtcgacgtgggccgaggtcgtctccgagcagaagtgcagcgatccggacgagcgccgggaccatcgaagctcggggcgggacaatcgccatgagaggagggatgacgagggttggaaaagggccgatggtcggaaccagcagcagcaccacgcaggccggcagaaccagtgcgagggggaggaaaggtgggatggcagtggcagccggcggcgtcagcaacagcagcaggcacaaggatacgggaatcagcatcaggaagaagaaaggataaacgatggaggctggcagaccgtcggtgagaaaaagcgccatggaagaccacagcagtctgaagcatggaatggatacagaaagccaccatcagaacaaaagtactctgaggatgtcggtcatatccaccaaggactcaatttcgagcccaccagggaggagctgaatagcttatcgaaagcgtgtagccgactttgggagctcgatatgaaccgtattgttcctggtaaggactacataatcgactgtggcaaggggaagaaagtttatcagaagggtgatatggcatctgaaagcttgttcagctggctaggcgacgatgtgctaagaaaacccacctactcacgtttctgcgcacttctggataactacaacccccaccaggggtacaaagaagttgttacccagcaggataagcacgaagaaatagctttcgttgaagagatcgctagaacagcgccaattaagtacttgcaccggtacttagtgcagaagggggctgtgcctcaggactacgaggacttcaagagaatgctgacatccctatggtttgatttgtatggaagaggtggcaactctagctgctcttctgcctttgagcatgtgtttgttggtgagatcaaaggacggggacaaggggagagtgaggtatcaggcttccataactggattcagttttacctggaagaagccaagggaaatgtggattaccaaggttatatatttccaaggcgccgtggtgaatcgcctgattcagagatacagctgctgactgttcagtttgagtggcatggcgtgctgaaatcggtatccagcacgttgattggcgtcagtcctgagtttgaggttgcactctacacgttgtgcttttttgttggaggggaagacaaccgcgtcgatattggcccgtatagtgtgaacgtcaagtgctaccgattggggaacaacaaaattggatcagcctttcccattgtagagaactgattatctggtgctatgcttctgcaggtttccaaatattcactttcttcgtttcataatcaattacgtgaagttaacaatgtactattttacttgtgcatgaaaaggtaccatactgttcaatttgttgctgccatctgcaatagtattgctacttgcactgc

SEQ ID NO: 28741 - protein, 543 aa, Zea mays subsp. mays
  peptide (1)..(543): Ceres Seq. ID no. 12408953
  misc_feature (70)..(543): NCBI GI NO: 38345945 NR Description: OSJNBb0103I08.16
  misc_feature (242)..(543): NCBI GI NO: 29367523 NR Description: putative serine protease-like protein
  misc_feature (114)..(543): NCBI GI NO: 20260612 NR Description: putative serine protease-like protein
  misc_feature (204)..(543): NCBI GI NO: 25407557 NR Description: probable serine proteinase-like protein
  misc_feature (204)..(436): NCBI GI NO: 30683929 NR Description: serine protease protein -related
  misc_feature (293)..(436): NCBI GI NO: 7488185 NR Description: probable serine proteinase - Arabidopsis thaliana
  misc_feature (268)..(541): NCBI GI NO: 22797893 NR Description: endoU protein [Xenopus laevis]
  misc_feature (267)..(536): NCBI GI NO: 5174623 NR Description: placental protein 11 precursor [Homo sapiens]
  misc_feature (256)..(536): NCBI GI NO: 6679429 NR Description: placental protein 11 related [Mus musculus]
  misc_feature (276)..(539): NCBI GI NO: 6561907 NR Description: pancreatic protein with two somatomedin B domains
NHARTINPSKEIPDDLLRVAAPATRLVESTNQARVPPRPRSHPAAAGQSDPSPVPSPSPAFPVRSRRRAMEGLIKGLVHVAIDAVEDAVRERDHGRADDDEVPRRRAAQSSDPDDDGEEERDERSRSTWAEVVSEQKCSDPDERRDHRSSGRDNRHERRDDEGWKRADGRNQQQHHAGRQNQCEGEERWDGSGSRRRQQQQQAQGYGNQHQEEERINDGGWQTVGEKKRHGRPQQSEAWNGYRKPPSEQKYSEDVGHIHQGLNFEPTREELNSLSKACSRLWELDMNRIVPGKDYIIDCGKGKKVYQKGDMASESLFSWLGDDVLRKPTYSRFCALLDNYNPHQGYKEVVTQQDKHEEIAFVEEIARTAPIKYLHRYLVQKGAVPQDYEDFKRMLTSLWFDLYGRGGNSSCSSAFEHVFVGEIKGRGQGESEVSGFHNWIQFYLEEAKGNVDYQGYIFPRRRGESPDSEIQLLTVQFEWHGVLKSVSSTLIGVSPEFEVALYTLCFFVGGEDNRVDIGPYSVNVKCYRLGNNKIGSAFPIVEN

SEQ ID NO: 28742 - protein, 474 aa, Zea mays subsp. mays
  peptide (1)..(474): Ceres Seq. ID no. 12408954
  misc_feature (1)..(474): NCBI GI NO: 38345945 NR Description: OSJNBb0103I08.16
  misc_feature (173)..(474): NCBI GI NO: 29367523 NR Description: putative serine protease-like protein
  misc_feature (45)..(474): NCBI GI NO: 20260612 NR Description: putative serine protease-like protein
  misc_feature (135)..(474): NCBI GI NO: 25407557 NR Description: probable serine proteinase-like protein
  misc_feature (135)..(367): NCBI GI NO: 30683929 NR Description: serine protease protein -related
  misc_feature (224)..(367): NCBI GI NO: 7488185 NR Description: probable serine proteinase - Arabidopsis thaliana
  misc_feature (199)..(472): NCBI GI NO: 22797893 NR Description: endoU protein [Xenopus laevis]
  misc_feature (198)..(467): NCBI GI NO: 5174623 NR Description: placental protein 11 precursor [Homo sapiens]
  misc_feature (187)..(467): NCBI GI NO: 6679429 NR Description: placental protein 11 related [Mus musculus]
  misc_feature (207)..(470): NCBI GI NO: 6561907 NR Description: pancreatic protein with two somatomedin B domains
MEGLIKGLVHVAIDAVEDAVRERDHGRADDDEVPRRRAAQSSDPDDDGEEERDERSRSTWAEVVSEQKCSDPDERRDHRSSGRDNRHERRDDEGWKRADGRNQQQHHAGRQNQCEGEERWDGSGSRRRQQQQQAQGYGNQHQEEERINDGGWQTVGEKKRHGRPQQSEAWNGYRKPPSEQKYSEDVGHIHQGLNFEPTREELNSLSKACSRLWELDMNRIVPGKDYIIDCGKGKKVYQKGDMASESLFSWLGDDVLRKPTYSRFCALLDNYNPHQGYKEVVTQQDKHEEIAFVEEIARTAPIKYLHRYLVQKGAVPQDYEDFKRMLTSLWFDLYGRGGNSSCSSAFEHVFVGEIKGRGQGESEVSGFHNWIQFYLEEAKGNVDYQGYIFPRRRGESPDSEIQLLTVQFEWHGVLKSVSSTLIGVSPEFEVALYTLCFFVGGEDNRVDIGPYSVNVKCYRLGNNKIGSAFPIVEN

SEQ ID NO: 28743 - DNA, 1527 bp, Zea mays subsp. mays
  misc_feature (1)..(1527): Ceres Seq. ID no. 12425149
gcacgagaccattacctagaacatcctaatcgaaaaaactttagccacaaatttcacccaaaaccaaaaaaataataatcccaaattaaagaaaaggagcagaagaaaaacaactttcatcgccgtccgccaccggagctcacttcgtcggccttccctcagtgtcaacccccttctcaaaacttgtatttgcacctcagtccctgccggtctgcccggtcgccgcctcgccggaggaagcccctcgtctccttgccctgcggcgggttcatggggttctcgctgtaccccatgaagacgtccacgcggatgctctggagcactagcttcttccgccataagctcagctcctcctcctgcttcctctgaggacgccccacccgcctcgatcgcttcggcggcgggccgctgctgctgcgctgtcctagcatccgttcaagtgtgtgtttgcgttcttaggtttcaagattggcttttgttgcgttcttggcgagacgaagggactagggcgcggacaaagaatcagcatgcatccgagcgcggtcagtttcgactccggcgacgggcggcggcgcggtggcgcgcagatgctgctcttcggcggcggaggcagcgccaacagcaacggcttcttccgaggtgttccgatggcggtcctggccatggacgacgcgacgcgcgtgggcaagcggcccttcttcacgacacacgaggagctcctggaggaggagtactacgacgagcaggcgccggagaagaagcgccgtctgacggcggagcaggtgcagctgctggagcggagcttcgaggaagagaacaagctggagcctgagcgcaagaccgagctggctcgccgcctggggatggcgccccgccaggtggccgtgtggttccagaaccgccgcgcgcgttggaagacaaagcagctcgagaccgactatgaccgcctcaaggctgcctacaacgcgctcgccgctgaccaccagggcctcctggccgacaacgatagcctccgggcacaggtgatctgcctaacagagaagctgcaaggcaaggagacatccctgtcggcaaccatcgctgcccaagaggtcgaccagccaaacgaacacaccacaggcactgagaaattgctggcgcagcagctcaaggacgacctgcacagcagctgcggttgcactggacatggtgccctgtcttcggaggaagaggatggtggcgtggtcagcgatgagggctgcaactttgatctccccgacgccatgtttgctgttggggtcaccaaccatggtgctgaggaggcgcagctggccaactggacatcttggttctggaactgatcggttgatggatggatgcatcaagtgcaaagagcaaatcctctcctggtttcgactcttttctgcaacatataattactgtgttgattatgtgccgtcagatgttttcaagtaatgaaacagaactgatgttgtaagtttatgtttctgaagatttgtatgttcatatatataataatatgcttgg

SEQ ID NO: 28744 - protein, 270 aa, Zea mays subsp. mays
  peptide (1)..(270): Ceres Seq. ID no. 12425150
  misc_feature (77)..(131): Pfam Name: Pfam Description:  Homeobox domain
  misc_feature (1)..(196): NCBI GI NO: 5006855 NR Description: homeodomain leucine zipper protein [Oryza sativa]
  misc_feature (217)..(270): NCBI GI NO: 5006855 NR Description: homeodomain leucine zipper protein [Oryza sativa]
  misc_feature (1)..(196): NCBI GI NO: 37573050 NR Description: homeodomain leucine zipper protein
  misc_feature (217)..(270): NCBI GI NO: 37573050 NR Description: homeodomain leucine zipper protein
  misc_feature (38)..(226): NCBI GI NO: 15232122 NR Description: homeobox-leucine zipper protein HAT5
  misc_feature (21)..(258): NCBI GI NO: 18034441 NR Description: homeodomain leucine zipper protein CPHB-5
  misc_feature (43)..(236): NCBI GI NO: 7446244 NR Description: homeotic protein - carrot
  misc_feature (72)..(219): NCBI GI NO: 15148920 NR Description: homeodomain leucine zipper protein HDZ3
  misc_feature (73)..(172): NCBI GI NO: 166754 NR Description: homeobox protein
  misc_feature (51)..(194): NCBI GI NO: 15148918 NR Description: homeodomain leucine zipper protein HDZ2
MHPSAVSFDSGDGRRRGGAQMLLFGGGGSANSNGFFRGVPMAVLAMDDATRVGKRPFFTTHEELLEEEYYDEQAPEKKRRLTAEQVQLLERSFEEENKLEPERKTELARRLGMAPRQVAVWFQNRRARWKTKQLETDYDRLKAAYNALAADHQGLLADNDSLRAQVICLTEKLQGKETSLSATIAAQEVDQPNEHTTGTEKLLAQQLKDDLHSSCGCTGHGALSSEEEDGGVVSDEGCNFDLPDAMFAVGVTNHGAEEAQLANWTSWFWN

SEQ ID NO: 28745 - protein, 250 aa, Zea mays subsp. mays
  peptide (1)..(250): Ceres Seq. ID no. 12425151
  misc_feature (57)..(111): Pfam Name: Pfam Description:  Homeobox domain
  misc_feature (1)..(176): NCBI GI NO: 5006855 NR Description: homeodomain leucine zipper protein [Oryza sativa]
  misc_feature (197)..(250): NCBI GI NO: 5006855 NR Description: homeodomain leucine zipper protein [Oryza sativa]
  misc_feature (1)..(176): NCBI GI NO: 37573050 NR Description: homeodomain leucine zipper protein
  misc_feature (197)..(250): NCBI GI NO: 37573050 NR Description: homeodomain leucine zipper protein
  misc_feature (18)..(206): NCBI GI NO: 15232122 NR Description: homeobox-leucine zipper protein HAT5
  misc_feature (1)..(238): NCBI GI NO: 18034441 NR Description: homeodomain leucine zipper protein CPHB-5
  misc_feature (23)..(216): NCBI GI NO: 7446244 NR Description: homeotic protein - carrot
  misc_feature (52)..(199): NCBI GI NO: 15148920 NR Description: homeodomain leucine zipper protein HDZ3
  misc_feature (53)..(152): NCBI GI NO: 166754 NR Description: homeobox protein
  misc_feature (31)..(174): NCBI GI NO: 15148918 NR Description: homeodomain leucine zipper protein HDZ2
MLLFGGGGSANSNGFFRGVPMAVLAMDDATRVGKRPFFTTHEELLEEEYYDEQAPEKKRRLTAEQVQLLERSFEEENKLEPERKTELARRLGMAPRQVAVWFQNRRARWKTKQLETDYDRLKAAYNALAADHQGLLADNDSLRAQVICLTEKLQGKETSLSATIAAQEVDQPNEHTTGTEKLLAQQLKDDLHSSCGCTGHGALSSEEEDGGVVSDEGCNFDLPDAMFAVGVTNHGAEEAQLANWTSWFWN
